United States Patent Application Publication US 2015/0052636 A1 - sequence listing, part 28

SEQ ID NO: 98187 - DNA, 763 bp, Vitis vinifera
  Intron number 1 from transcript GSVIVT01029207001 (locus G SVIVG01029207001) derived from phytozome v7.0 (chr-ID chr1 1; pos 18553745 to 18554507)
ttcttattttcttttacaaaagcgctaaacccttggtcctttactttaatcaataaggtccattttccttctagtccttttgggggatacaataaacatgtctagtataatttacttatatatttggatttaattataatacaaaacaggagcttgcttagtgaaaacaaaaggacaaaccaactctttggttcaagccctagagaggcttttgtttgcttcattgacatatgcggtttttgattaagcaaaatgaaatctagcctaatgtgtgaaaaaaagcaatggatgagtaatttccaaacgaggacatggcttgattgagaagggctttcaagtaactcaaagtggtagaacaagacagtaccgacagactttgacttagtgattctagaagtttgacaattagagtgtgtttagaagtaattataaaaaatatttttaatatttttttacacttcaaattttttatttttttaatattagaaagggtagaaatattttccaaactctctctaaaaatactaactactctttgactaatttagtggtccttacccgtcattctcacatgatcccacaagccatttttaagctcgaatctaccaacaactcgcgacccaaaaagtagttattgggcctagggtttggcctggccttccatctcaatccaagtaaaagcccacaaatattttcgaacgctcccttcctcttctcttctgtctctgccttgcgttgttgaagccgtggaatggaggacctc

SEQ ID NO: 98188 - DNA, 956 bp, Vitis vinifera
  Intron number 1 from transcript GSVIVT01021894001 (locus G SVIVG01021894001) derived from phytozome v7.0 (chr-ID chr1 4; pos 5971398 to 5972353)
cgcactcgccagcagcagctccaagatctcattgagtaatctctctcactcactcactctctcatctcttcgtatatgcgtgtttgtttctgtatttgtatctgtactgcccggtgttatgacgtagggtttcatttggttttggggcaggtataccaaaacaatagaaaagaaaaactatgttttgaatcttgaatattttgggagaaaaccagcgagttcatttaacctaacccaatacaacaatttagcttggctttactgagattttcctccccatagaaaaacgaaaaaaaagaaaaaaaaaaaaggaaaatttgttagtgtgtattccggttagtgtatctctctcacagagtgtctgtttggttcgtgagaaatgtgaggaaaagaaaaaggaaggaactagaatttaggaagagcaaaagtagataatttcactcagtttaacttaatgtagcaatttggcttggataagttgatctcttcatttctttgcacacaaacacaaaaaaattgaaaacaaaaatcataactttatcgatctatctatctattgctcgagttacaatttggtatcatatagggtctccttggatgatgacaaacttgggaaaagaaaatgaagtaattggaattcgggaagtagagaaaattaataactgtacacaattgtgatctgtcacaacacttttgcttggttgagatgatttttgtgtctgcgaataaaaaacaactgaaattagcagatccactttttccctttttcttttttctcttccagttttagttgctaaatgacactaattttgtttttgaactgtgatcgggttccatttctcttcttctttttaattttcaacttgcaaacccaaatttctgcacatttatcacatatttgctttgaatcatgacttaatttcctaaaatatctagattcaaaggaatatctcact

SEQ ID NO: 98189 - DNA, 888 bp, Vitis vinifera
  Intron number 1 from transcript GSVIVT01025727001 (locus G SVIVG01025727001) derived from phytozome v7.0 (chr-ID chr8 ; pos 12569417 to 12570304)
aacaggagccttatctgggaaggcgaaagaatcgggtaatcttctttctctgatctttcttctttcaaataatatgcgctccgcttggctgctaagaaaatggagcaatttaattttgctttacttgagtgaagccaaaatcttcatttaagcgagtgtaatgcgcctactagcccggcttcatttgtgtggaggctaaaaaattaaaatcgtgagagtccaactctcattttcttttcttttatattctttttagtttctcggaggccaaacggtgggttttgttttaattgctcaggagaaccgtgaaaaagattgcattgagaaatcaaataaacaataaaacctcgatatctctccgtttggtgagaattaggttttgtgattcagttttgtattgattttttttttccttctcaattcagtgacatttttttaataccaacatgggaagaggggaaaaaaacaaatatttgaattttacgttttaagttgttctttgtttctcaaaaatctcaactaaaccagaggggaatattatggaatggggctgcattgggcgagtatcagaactccaaagacgcccaccacaaagcccaaacccattccaaaaagtctctgtacttgccggcctttgggataatccgtgtttggttttgaggtcggcggtggggcacaggttgcttccccaccacctacggagtttgaaagtattcactaaagctacttaaacaacgtcgttcaatgtctgcttaccccaaagactattgaacggcgtccttttcatgattctcggaagttggaactgattattaccactttgcctaaaatgctccgcttcttttgcaaacaggagccttatctgggaaggtgaaagaatcgggtaat

SEQ ID NO: 98190 - DNA, 821 bp, Vitis vinifera
  Intron number 1 from transcript GSVIVT01027532001 (locus G SVIVG01027532001) derived from phytozome v7.0 (chr-ID chr1 5; pos 15953437 to 15954257)
ttcatcggttcaatgtaagaactctgcgtttctgtccccaaattttgatttttgccatcataacaatggaaaagtctaggtttagatgcgttttcaataatggacggtggcgctctcgttctcctattgctcaattgagctcattggctgcaatgtttcctgtaaaatcttataatttgactaagattttgtttataaaaccaggggctcatgcgtgcaacactcggaatggaaagcaaaaattggaattttggaattgtgaaattatgttcaattatttagatttatgatggtgaattgtaaagtttttgtcttcgttgatcctgaattcgaaaatcattttttttttttttttatagattttgatgctttatttattttatttttgctaaagcttctgtctttttgtaatgaatgaaaaaccatgatacactgttcttatttattcaaatatctgaatgaaaaaactgatatatctatcgctcttttgggcatgttttgtaagatagttgcaaagtttaagagttgaactgattttattctatcagaagtgtcagtcccagaagttgcactgaattactgtattgtcagagaagcaagtctgagactgtgtaacgagagtgtcattgttcttacatttattaagaacatttaactattatgtgtaagctaggtccatcttgaagttttagataaaaaaatttcctgtttctgaccaagcaaacagtttcattgttgtttccccaatcattttcattgcatttatttgttaatatattttctcaggtaaagttgagcatcgccggaaagggtattgtgaa

SEQ ID NO: 98191 - DNA, 855 bp, Vitis vinifera
  Intron number 2 from transcript GSVIVT01024678001 (locus G SVIVG01024678001) derived from phytozome v7.0 (chr-ID chr6 ; pos 7833194 to 7834048)
acgaggaggaagtatgtctatgttgctgctctcttctttttgtcatctgtttctgaaattgtgcttgcaactaccatgtttttttatccatttgcaaatgttgcttcaagttcttcttggcgttgtcttgttccccatgtttttaaaaaaaaaaaattaattatgtggtcatcatttacattagagcaagaagtctgctagaaaagaaaaaagaaagaatgaaaggaagaaagaaagatggcccctatatattttgctagctttatgttggttgtcatgttttatggacagcacaattaagttgctttactttcatttggagaattttgagaacgaggctgatagatgcattggacaattgagaataatgtaaaatattaaacaaatcaattattctctgattattatcattaaatcagcaacaaaaaaactttaattgtgtagcacacttgggttatgtctatttatgttcttccatgttcgatccattgtattttaggttgatcaggcagctttattcaattgtatatggataacataattttagtttcatctttgtttgcgaatacatcctgatggacctttaagatggttagaaaataggacaatctgtctttttaaaccaacagaagtggtccagagtttataacatatttggtttctcaatttgaaataacattgatatggctaaaattccctccagaagagcatgttaagtgtaatgtgcataaccatctcttgatgacaagagaggatattcacttccattgttatcaatttagatgcactaaggaggaaatgaactaatggttcattttgattactttaaaattttggtgcagcttgaacggtttg

SEQ ID NO: 98192 - DNA, 1030 bp, Vitis vinifera
  Intron number 3 from transcript GSVIVT01025851001 (locus G SVIVG01025851001) derived from phytozome v7.0 (chr-ID chr8 ; pos 11218590 to 11219619)
atgtaagggcatactttgattcttgaattgggcttttgaaacctctataagcactttatttattgttaggtctttaggtgacttgtatgtagagatcattgtttgagtgcctaatgggtgggagtgagaggtgtacctcgtgaaccatctaatgggatttccctttgaatgtaatcttttttgttttactgaagatgtatttagggcaggaacattgggcatataagtgggcattccatcttagtgtcaatccgcctcaatatctatacaaagatggagtgtttggactttggagtatttctattgattatcatgtcatttaggcccaagtcagacacacaattgcttcagtttgaatatccagaggatgcttgtgattcaactggaatgcttaatgccctgaatgggattttagagcttggggttaatgttctcgatgatgaattagatggaagtttattaaatcgttttattcctttgaattagatggttaaaatcattgcatcatgatattgtttttcttcttcctctttgaattgcaatcttttaaatgatattcatatggttggaattccctttggtgatggatgatgggtgctgtgctaattaatcctgccgtacctatgcaatgcccttagatgcagcagtagaatcatgttcagctgaggaatgaatgcccatttgctttaagatctatagctcactggaaatgccagggggatacttggaagaatgagctcactgttgtggactgtgattatgcaacttgtcaataaaaaatctggggcagggcagatagtgctttttcctaaattttcttggtaacaaggattaaacatttcagcctgggcaatgcgacttaaacatgtcatcttgacaaacagcgtctacacatatataaacaccactatcttaagcacatctgtgagaacaagttaagaagaaagtggttgaggagttttaagacttgtttttcacatcctaaacttttacaggtaaactgtttaccagaggtcgatcttcaaggagt

SEQ ID NO: 98193 - DNA, 400 bp, Vitis vinifera
  Intron number 4 from transcript GSVIVT01026856001 (locus G SVIVG01026856001) derived from phytozome v7.0 (chr-ID chr1 5; pos 19920034 to 19920433)
cccttttctttactgccgtccagacttacttctcagtcttccctcattgatgcatgcatgccctgttttctcgctatctattgagtgcttctgcattttacctagcccaaattcatggactccatataactctttgatggttgcaaagtaaattaggcaaagagtcattggtctcgtttcttttccatttcagcctattttctaccttcctttccgtgtgtaaaaaagtaaagaaggaatgtgtggtgtgatcttattttggtgtattttgtgcttatgtatgcatcagtaatattatgtttgatttaagtaactaaaaattgatatgggtgtggactattttttctatgtttggatccctattaatgtattatattaggttgggaattttatttcattg

SEQ ID NO: 98194 - DNA, 850 bp, Vitis vinifera
  Intron number 2 from transcript GSVIVT01021681001 (locus G SVIVG01021681001) derived from phytozome v7.0 (chr-ID chr1 0; pos 9265231 to 9266080 reverse strand)
tagtagctgcaactgtatctgttcctgcaaagaaagttaagaaaaaaaatataagtatttattatttgtattgacactcactttcaagttggatattgtttttgtttttatattgcaactttttcaaaaacagttacagaaaataagagtttacttaggcagcttttcgagaacattttctgtttttcagaacaaaaaatcatgaaaacacgtttggcaacaaaaaggggttaagaattaaaaaaaaaaatggatgctttcaaataacatctcttaattgtttctaaagacaattttaaaaaataattatacaaatatgtagaataattaaaaataaaacactaaacttaaaaattatttttaaaaatattaaaaataggttaaaaatattttaggtttccaaacagaattttattttataaaacatcataaaatagttttcaaaaattgttctcaaaaactttttttttttttttaaaaaaaaaaaaagttatcaaagaggccctaactttttggagtaatttttaaaaatatatagttaatacttattttcaggagcaaaattgtactaaaatctcaatatgaaaaacaattttttttttttaattgtttttcggtgaagacattgtacacacttatatgggttacaaaagttttggtccattcttagtgtttctaattctttctcaaaataccaaaaaaaatcaataaataagcatgaaaattttctcaaaaacttgttcaaataaaaattttgccgaactttttttaaaattaaaagattaatttcttttgaaagaataaaaaattattttcaagggcagtatccgaaaaggaaaaatagattacc

SEQ ID NO: 98195 - DNA, 820 bp, Vitis vinifera
  Intron number 1 from transcript GSVIVT01021681001 (locus G SVIVG01021681001) derived from phytozome v7.0 (chr-ID chr1 0; pos 9266115 to 9266934 reverse strand)
aacaaagcacccactgtcgtacatttatctaagatgtgatgaaatatatacttaattttaaatcgcttattataaaaattttaatcacaaattaataaattatcatgtaaccattatcttacaattaacttcaaaggactgtccttatagaattaattttcaaattaatatttttgtttctcgagtattaccaaagcactccaaacaagggaaattcctcaatcaaaatgacattgtcttagataattattacataagaacatgtattatatgactgcccatatgttaaatataattcctagccacaaggtagagatcatttttctttgtcatggtaagaccaggttttgcatcggtatctatatcttccatcttcatgccagcaggcatttcccagtcaaatgagtaaagaagattagcgagtgcaagctctactgtcacagctccaagattcatccctggccatattctccggccggccccaaatggtatcagcttataatcttgtcctttgaagtcgatacaagtacccaaaaatctctcaggcatgaactcttctgggttttcccaggattcaggatctcttccaattgcccatgcattgacaaacactagggttttggtcggtatctaatacccatctatattgcacttttgaagtgtttctcgagggattagcaagggtgctgcaggatacaatctcatgctttccttcaccaatgccttcatataagtaagcttttgaatatcatcttcatccacaaaacacttctccccaactaaagttctgacttctttttgtgctttcttcatcactcta

SEQ ID NO: 98196 - DNA, 773 bp, Vitis vinifera
  Intron number 1 from transcript GSVIVT01025519001 (locus G SVIVG01025519001) derived from phytozome v7.0 (chr-ID chr6 ; pos 6444 to 7216 reverse strand)
cggttggtattatttctatttcctttttgttggtcatgcttgcattttaccgtgggattgttggtggtcagtgcttctcctttttctctgctttttcaatgcaaaaattttacccattttagtatcaaacttctttaaagatgcttctgcttgagttttcagattcaaaagtacaagtgatcatgttgtttaattatttgacttttaaccttcaatcattaattgggctcttggctaacccgcatgggagctttagtttaccatagctgaaggagtgtcgggtgtcacaaactgttacctgctctgaatccagattctttgacataagagttgtccaaaatccttgtaccttttgacaatgacctaaaaattacatgacatggattttgtttgtttgtttgtttttttttttttttctagaaagtaatctctgaagtataaatcggttatcctgtgaaggggttccttgtttatgtttggatttcaaatgccaagagtttctatttccagaagtacacctccattgggtgtagtgcattggtgtggaacagattgacagtaatgggaatatggttatatttaccgcattgaagatatgtcatcgttacttgatttattgaaaatgagattgttgttactgtggtcactgccaaatatatatttatcttttgtttctgttatgtgtttatgcatcatctataggcacatgaagtttatacatcatcccaacactaataatggtcagtcttatttggtaactgaattaatattac

SEQ ID NO: 98197 - DNA, 444 bp, Vitis vinifera
  Intron number 5 from transcript GSVIVT01022144001 (locus G SVIVG01022144001) derived from phytozome v7.0 (chr-ID chr7 ; pos 16931097 to 16931540)
aggttcacactcttaggtaatggcctcttagttagtgcttaagttctaaacctttttattttttctaattgagaggaaagaagaaaaatcatatgatcgtttcatcatccctaatttccttactgagaacaatgtaagaaaaaaaagaagttagcaacaatgaaacctcccattaatctgaacccaaaacaatttcttggtaaaattgaagaagtaggtctttttttaaaaaaaagatctttgatctcttccgcagtttcttgataacaaaaattaaagggggtaaatatttttatgggaaagaactaagaagttcaaactaacatatgtatcatacaattataaaaatgcaaaataatgggtagatgaatgtggctcggaccttgtgaaagcagccatttcttttagagatcactcattggaagctctatggcaggttggttc

SEQ ID NO: 98198 - DNA, 1017 bp, Vitis vinifera
  Intron number 1 from transcript GSVIVT01022267001 (locus G SVIVG01022267001) derived from phytozome v7.0 (chr-ID chr7 ; pos 18027092 to 18028108)
atatccatcaggtacattcttcatggttgtggtgagtgatgataattatactcccttatgctcatatttgtacatatataaaatgtgcaggtctagcaatagaaatgaaaatagatttctatttaattaaaaaaaaacgaaaaataaaagaaaaaaataaactggtaccacactttcaacaacttttttctgaaaacgggtaatttttagaataacatcaaaatatagactgctatatatatagatagtgttttgaaaaatgcaagcacttcaagaattgaaaatgatataaaaacaacaaggtcttaaacatggccattgttttcaattctaaaaataaaaacacttttgaaaaaccagttgcatttctgttatcattaaatgtttgcaaccttttggttccttttcaaacaatgaagctgcttgctggaaatatgttttagtgaaatttccagaagctctcattgagcataagaaaaaaggtgcatttggcttccaagaagtcaatccaaacatgggtttgtttcatattactagaaaaggaaccctacatctccgatatagccaaggtgtctcagaggtggcacttacatgtaatcatccatagctaaccactgctgtgctcaagctaattgtgattcaaatgattaatgtaccagcatacatgctattggagttttataaaccagtgcttcaaactttagcactggtcatataatggttctagttttctcgtggcagtagcagtagtgttccttcagcataagaatgatataattattggacaactgctttctgttgttcatcgtgcatactctgtgccataattagggtagaattggtgttcatgagtggaaacttggttgtgaatatgttcttcatcttttgttatttatcggattttggtttacctacatgtgaattcctgaagaaacatcttaacaaataattttattcagcatgtttctatgattgggtggcaataaaagcaggtagaggaccatagtgacaaagaaa

SEQ ID NO: 98199 - DNA, 954 bp, Vitis vinifera
  Intron number 1 from transcript GSVIVT01028133001 (locus G SVIVG01028133001) derived from phytozome v7.0 (chr-ID chr7 ; pos 4063822 to 4064775 reverse strand)
ctattctccatctctgggtcttttattcagaaaaggtaggtacccatttttgtcgtttgctttattagagaattttctatctggagggttttgtatgtgggtttgtctctgtttttgttcaattggaggtttttctatgtgagtatgtcaggtttatttgtttttggttatttgtttgtgggggtctcggattttctggggaggggagtggcttgatagtttgatgtgggggtttcatctagggttttgtttgatttcttgtgttttttgttgtttggttggtttgatttgtgtaccattggggattgttgatttggcgtttgggttgatgtaggtttgcgttttcctttctcaattctgttttttctgttcttagtttcttccgtcttgatgggaaatttgggagaggatcattgatcatatcatttcattaaattctactctctctctcgctttttttttttttggtctctatgatgtgggaattcacattctgttttcatctgcaaatatccatttatataatgtgtaagatatcatttatctgtgatcttgtttttcctgctgtgtacattggtataattcgattattttgggctattctgcacttcttaattacggcctatttcttttgtttttggctactgctttctctattgctgttggtttttcaatagactttgttgattcatgtttctttttttccttttcttccctaatatactgacttttatgatccattctatactgttaactgcttcttgtgatttttttttttttttttaatattcttttgaacattctgttatgaatgtttcttttatctctgttttttgttattttgatataatggtgtttataaatggtttaatcactctcaaggatttgtttgatattggatccttattggtttcttatttcttggctatagcagttccaaagttgctgcattgc

SEQ ID NO: 98200 - DNA, 997 bp, Vitis vinifera
  Intron number 2 from transcript GSVIVT01027988001 (locus G SVIVG01027988001) derived from phytozome v7.0 (chr-ID chr7 ; pos 3023197 to 3024193 reverse strand)
aggtgagctctctcttctctgttggattttcttccattttggctactctctgaaactttgatcgaagatttatttgatctatactccataaatcttagttctattctaaataaacttgcgtttgatctttctctgccctaaacctcggtttggttgtctagagaactaggaaaagaaatgagggatttggtgctgttgataggggggttttgttttattctgttctaatgaggagtctgagattcaattttttttccttttctttcggcgtttttttcttggcatccaaacaggagatcagagtgctatgtctgtcttctctctgttctctttttctctcttttgcatgaaaatatcgtcgttttagcatatagtcatacgcctacttgtttttgttgtttgtgttctgtttaatttttgtttctgggttcttatatataaaaatatatgatgttttagattcggaaaattttcttccccttgtaggtggataatgccagcgaattgcctgtttattgcacccggtgtctagatttctctttgacctttttctgttatggataatttagaatgttgaattggaaactttgattttcaaacagaaggtgtattgccttgtctgaactttaggcatattaggatatgattgtacaaacagaatgttatgtcacacatttcatttatttttccccaatctgtgggactattcttatccttaaaactaattaagttggctttccctctgtggattggtaaaaaattggaggttgcctttagagattaatctgtttttgctctataatcttcttgccataaactagtatttatattgcctcaagattttgtaaatatcattattttcattttcggttttggggacggatatcactgttttgctgtgtctatactcgtgtctttattttgctgtacatattttaactaactctatttggactttgtagtcggcatcctgaggtgaagtgggcccaaagagctg

SEQ ID NO: 98201 - DNA, 843 bp, Vitis vinifera
  Intron number 1 from transcript GSVIVT01027742001 (locus G SVIVG01027742001) derived from phytozome v7.0 (chr-ID chr5 ; pos 7357469 to 7358311 reverse strand)
cggagccgcttgatttctttatttggactgtggaggtacggatatattgctttgtttttggtggttttgtttggatcttatgtgatgtgggcgtagatcttgttgatcagatgtgtgattgaattttccctcgtgttgcttaaaattattagtgaatttcttgttagaaaattttcttttccctgtttggggatctgagtatcatgattaatgcttttaaaaaggtaatttttttaatacagacgttgatactcatctgggtttatttggattgggtagatggttattgaaatatcaattgttatataatgtctttttattgattgttcaatggaatcagtgtaaattgggaagtttgtactgttgatgattggagattagaagggctaattgaatgaacaaaccaacaagaggtgtgattttgttaaattcccttgccaatttatgtaaattttaaggtgtaaattttaaaagacgattttaaggtgtaaattttttaaataatgaattttaaaaatcgtatttaaagataattttttttttcatatttttaaaatgaaataaatcacctttagaataaacgattttaaaagttatctttacttttagaatatttcttttataactttatagtcttgtcaaaaatcccctagtctggctacctttttgaatttctaccagccgccctaaattgacttttaaaacaactacaatgagaaaaggtggttcaacttagggtaagatccgcataaaaacataaattattagcaaaaattatcaaactctaaaaactgcataccatgagtgacatcctccgttattgatgtgtttgaaggaaaagac

SEQ ID NO: 98202 - DNA, 570 bp, Vitis vinifera
  Intron number 1 from transcript GSVIVT01021575001 (locus G SVIVG01021575001) derived from phytozome v7.0 (chr-ID chr1 0; pos 7350773 to 7351342)
gtacgagatctccgtcaattctcaggcgacttttggtatgattgatcgatctgtgtcttttttatgtgttattttttctgtttgactgccgagaaaatggaggagaggaaacgaaaatgctgaatggcacagtcctctttgattcctgaaaacagaggattctcacgacacgtctacatgagaggcgttgcatgttttcttttcctgtgtctttttgttttattggttctttttttcttccctcaagatctacgttttatttttctgttattttcttttccctcgtgttctcggcaagcaaacaaggtaatactattttcatgccctagaaaatcgcaattttgcatttccttttgtgttgtcatcctttctcgggaaatttcatgcgttcataattgttttggaaggagccaattttatctgaccataatggcctcatcaagacgaaaaaatcacgaagtttgtataatgtagcaggcataataattgcaactttagagggtaatatcgtaaatgtggttatgcgtggtggcaggagagttgaagaagcttctgacggcggagactggg

SEQ ID NO: 98203 - DNA, 877 bp, Vitis vinifera
  Intron number 3 from transcript GSVIVT01018962001 (locus G SVIVG01018962001) derived from phytozome v7.0 (chr-ID chr4 ; pos 18302844 to 18303720 reverse strand)
agaagcttgggcgaattttgtgagtattacccatctccatttttttacggtacatagtacactcaaaattactaaaatatgagctttgttttaggcgtagaatgtgtagttgaagattttttttatgttagcatcaaattacaattctgtttaaagaaattatttatcaccactcacggtttgatccatgatccgaagaaagtgcctgtgaagtagcagagtagaaaataaatggctataactcttaacgcttgggagagattgattcatatagtggcaattagttcacatagtgttaaagagatacagaaattcaaaaaatgaaagggaaggtaaatagcatccctttatgttcattagattgatatgtttgtgataatcataattttaggtcggttttacttcaatgatttaaagctccataccagttaccttatcaatcaatattgatcatttcaagacgaaataggacccaaaagatcctttcttattaatgtatgtgagtaaaaattggagaggaaatatgaaaaagaaaaaaaaatgtgttcagagttgttctgtttccattttagaatgtaatctgtaaagtcacaagtgttgcctctgctggctgatactagaaatgcatagttgagtgtcttgatttcagaggttagccaatgttgagtgatatttataagctttcatagtaattggttgcatgaggaccatggaaatcctagccctattataatcatcaattattctgttttttttttttttttttttttggccagatagttccgagcttccaatgagaaatcataatcattttgtggtactaaagttccattgctttgtaggataacattcactccaacgatccagcattgcagca

SEQ ID NO: 98204 - DNA, 826 bp, Vitis vinifera
  Intron number 1 from transcript GSVIVT01026440001 (locus G SVIVG01026440001) derived from phytozome v7.0 (chr-ID chr4 ; pos 23611406 to 23612231)
gccttgagacctttcttctcctgctcgcttggaaggtatttctatctcttttgttcatcctttgaaaaaaaaaaaacttttttttttttcatttgtatatccatggcttgaatgatttccttctttcatgaaacgttattgaatgcagaacacggactcccttacaacaatcctcaatattcattcatttcgaatcaaagctgatgaacctgttaagattttgtaaacctttaaggcaatgcggtctattagtttcaatttcaaatgacaatttcttaatcaagtttaatcaaccaaaggaatgaagaaactgtgaagaaagaaatgatatctaacgatcaaatattgcgttgctagtcttttattctgtctttgtccaaaattctcaattccctttgttcccacttcccagtgctatatttttccacattacctttactgagcgccagaataaggcagactatgagttgccaaatgcactaagagtgcgtttgggagtgattttagaaagttgttctaatctttttaacacttaaaattttttatctttcaagcataaaaaagactaggaacgcctcctagcataactaccaaatgcactctaaattgctaacaacatttatatttttaaactttctgtacttaattatgttaccaaacaagtttctattttcttgcaagttgtaatgaccatagtccatgtttcaggttttttgatctagattacatatattaatgtctaatggtcatgtttgttttatgttccaaatataaggtttagtagtttgtaatattctgtttaaatgatgtttcttgccaggttttt

SEQ ID NO: 98205 - DNA, 678 bp, Vitis vinifera
  Intron number 1 from transcript GSVIVT01022838001 (locus G SVIVG01022838001) derived from phytozome v7.0 (chr-ID chr1 2; pos 18887385 to 18888062)
aagccaagcttcgggacgccgatcgtcggagacaggtcgtcaatttttttttgatcgtgtcttaggcttctgggaaaattgaggaaatggataaaagagtagaattttgggatttttcttttgtttctgtttgcttttgaagtaaaaaaaaaggttcaagtcaattgagcgagatagtgcttttaggctctgttgaatggagttttctgattttcccggttccaaataacgggaatttctttttcttttcttttttttccattattttctcagcatccaaacaggttatttatattttcttttgtttttttaggtgttactgtttgaattgtacctttactttgaaggttgttatttatagtgttaggtgggggtgggtgcttcttcttctttctcttggttttctatgtttggtcatgaatgtaaactatctatgcctttcttgtttgccgtgaattccgggatgatatgagcatggtcatttgtattttcaatttgggtgaaattttaattttttttgtagccacccgtgacttcaatttcatgggaactatactttttatttattttttattgccgtttatttttctccaatttccctttcctggttttgagttgatcgaatttccatttcctggtgcagcaattctacgagaggctgtcaagcaaggcacggcc

SEQ ID NO: 98206 - DNA, 739 bp, Vitis vinifera
  Intron number 6 from transcript GSVIVT01029836001 (locus G SVIVG01029836001) derived from phytozome v7.0 (chr-ID chr8 ; pos 301560 to 302298 reverse strand)
cagaagacaggtttgttcttcctgaaattttaatttaagcccatcatattttctgcagatgttactaacatagtttcaacttgtacttgtacctttcaaatcgagaatttgaaatcaaacagcagttcggggtcagaatgactgtttcaggattcccaagtttcctttgcctctctgcattttcagcattcatatgaagcataaacatgttatagaccatctgaattgtcagctcatcttaactagtcaagaaaacttgtttatttcttgaattgattgcatcactagaagaataaatccatgcctgaaaggatgagtaaccatatcgaaaaatctttaactgcatggaccaagtaaggatcaactgtttgtattatccaccaattatttgttgctgccttcagaaaatttcaagaggctgcgtttccaggactacatagttgcagaaatctcatgtttatttggcctcttcttcgcatcatttgtgaatagtgatggtgtgattttgttgaaagatcacttgatctcatctgattaattcttaagaatctggaaaattgtcttttagtgtatccaaccacttgtcattatgagcttttctttaaaaatgaacattatgttgtgttatgtagtttgcaatttttccccttattatgacatgttttggatgctgtttaaaatcatttcctttcacctttttccagggaagaggccagagaaatacaggcacagtcttcaa

SEQ ID NO: 98207 - DNA, 481 bp, Vitis vinifera
  Intron number 1 from transcript GSVIVT01026847001 (locus G SVIVG01026847001) derived from phytozome v7.0 (chr-ID chr1 5; pos 19993332 to 19993812)
ttgcttctcggggctgggtatgtattctattgaacttggactttccctgtttgtatttttctgtttatttttattgttctatcttcatcttgtaaaactgcaagaaagaattgctttgtatatcatgtgcttgccagatattaataattttgtgctccatctttcatctggtatgaccctttttctccttttttttttcgatgagagccctttttcttatttttcaatggtacttttgattgagaaaatattgttcgttcaggaatgctttgtagacactaagttcacaaggatgcctcaaaaaaaaaaaaaaaaaaaaaagctttgtggttgagaattggaggctagcctattattttttcttttacacatatctgttattagattgttttgtcgggtttaaaggttgccttcctttgatcacaagttgtcataatttattgcagggtcaccttttattctaatcgagcagagaggagtt

SEQ ID NO: 98208 - DNA, 368 bp, Vitis vinifera
  Intron number 1 from transcript GSVIVT01025550001 (locus G SVIVG01025550001) derived from phytozome v7.0 (chr-ID chr8 ; pos 14119171 to 14119538)
aggtttgaacactaaactttgttttgcatatttaaagccctcagaaatgagagtaaaaaaatatattctttgcctgtctcaattttatgttctaggtgtatgtgtgttgcttagatttctggttattgatgtctaattcctttgaatgtgtccccacctgtgtacacacacacaagtgcctaagaaaaagcaaagaaataatgttgttgaagaatggatctagaatgtggatgatatgtcaatatgataatagtattctttatacaaacgaggcaagctctaactttaatggtaatttttgtgtttttttaatttaattttcttttggtaattctcattgcatttacttcgattttcttttatcagat

SEQ ID NO: 98209 - DNA, 543 bp, Vitis vinifera
  Intron number 1 from transcript GSVIVT01026094001 (locus G SVIVG01026094001) derived from phytozome v7.0 (chr-ID chr1 8; pos 24635930 to 24636472 reverse strand)
ggattcccgggataggtaattctttctaactagatgtgcttcttcttttctattaactggataagctctgcttcatcatgtgacatgtcagaggtatgtattaattaagaggtgactatgtacacattgatccaaatgaagattgatctcaacccacgtattaagctgagatcgatctaaatgccccttgttataaaaaattataatagttaggcataaataaaattcggtaccttgccatatggtccttgatctcactagttttcaacccctgatggtcataaccattaagtttctgcaggacagagtaatgagcgtggctcttaattatggtatctcagatgatttttttttctattcagtaaaagatttataataagttataaaaaaatgaaaaataaacaattgttttcaataaaaagttaaaaatcaaacgacctctacgtactctcacatttaatatgtttttctttgtccatttatggatttttattattattttattaactatgtgtcattgttctcaaattgaatttgacaggc

SEQ ID NO: 98210 - DNA, 953 bp, Vitis vinifera
  Intron number 2 from transcript GSVIVT01024380001 (locus G SVIVG01024380001) derived from phytozome v7.0 (chr-ID chr1 6; pos 1772424 to 1773376 reverse strand)
atcagcatactgaagttagcgtaagtgcagatgagtttggagtttctagtggcagccttgcctttgatgtttttgttttagaaatttcatatcattgttcttcagaaaattcctatggttctgtttggatgtttttgaaattttctaactttaaaacaggtttgtcaaacttaaatttgacaaacttttgactgaaaatagtttttttgagaattcgtctttaaaataggttgctttttagaataaaattgaggtgttttcggatgcctatttatagagtattctttaaaacaattgaaaatatggagaatattttggatatttgaattaccattaaaaactgtttttgaagaattatatttgaaaacattgccaaataggccttatatttcccttatggaatgccttttttgttttcctttttagtgtttttgtcatgcgggttgtgggttttattgcttgttttgattgttgctgagttctttgatggaactgcagttcagcaagaaggttgccgatgctaatcttgttgccttgccttctcgctcatgtttacaccacttcacctcattgttatcaagaaaactgctctacttatcttgcagtatgaattcattttggtgatttagaaatgacttgctttttcgtatatatgggttgtgtaggatgtgtatttgggattgttgtttggctttgcttgtcactaagttctcataaattgcaggcaagcaagaggattgtcaatgctaagttggattgcatgccttattgctgtgttttgttatagaaatttgatatccttgttcttcagaggatttctattcttgtcttacaaatatgctgttcttttgatgattcggggatgtgttcgtgcttttgcgtttttgtttgtggctgagttcttggaccctgaaattccttttttaaactgcaggctagcaagaggattgcag

SEQ ID NO: 98211 - DNA, 915 bp, Vitis vinifera
  Intron number 4 from transcript GSVIVT01024009001 (locus G SVIVG01024009001) derived from phytozome v7.0 (chr-ID chr3 ; pos 1765275 to 1766189 reverse strand)
ggaaaaggatcctgctccatttggttggggtatgtttatgtctctgttaaccttttttttctttctttatgacaataatgcttttatctggtctattcattgcctagtttgttcatgtgcatatacatttcatttctctttgtggtaattatgaatgtattcatgcatgcaataacatatcagataatatatttagcacagacaaatctaagctcatagcaacttgcatctgcgaaaaccaagtctttttaatgtcccctgaaaacttcctgaacttcatttagataccaggcttcttttattacagatacagtgagccatgtagacttgaatatttatccttggtgatggtataagatgcaagaacgttttctctttgtagttattttgcccataagagtagaatttgagagttttagacctgcacacataaacatatcaaagcactcccttagcaatccagagcacaaagttttactcctgcttttgtttctttaccagtcacatcctggcgagatggtttggcatagatagccatcgttgactacttcctaagaactgattattttcttgtgtgcaccactataatttgtttcaactctcaatagttgagtatgttacccactgatgaatgtagacccagtagctgatttgaggaagcttgctctacttggtgtttgggacattggaaaattgctagttctatgaaaacttattttctaaaaatccaaaataaagcatgataaactccttttttatgttatttatttgtttttatttttgcatctgaatattatatgcattggtttgaattgaagagcaacatgagagtttagaattcccatatagattttgatcttaggaggatcctgacatatcttaactgaatagttttcaatcagaaaacattgtaca

SEQ ID NO: 98212 - DNA, 871 bp, Vitis vinifera
  Intron number 1 from transcript GSVIVT01019205001 (locus G SVIVG01019205001) derived from phytozome v7.0 (chr-ID chr1 5; pos 3514602 to 3515472 reverse strand)
ttcgcagccaccaaccaacccaaccatccctcctggtaattaatttttcttctctcttattatctttttttatcattatatagaaatgtagaagaaaaaaaaatacattattaaattaaaaatgtatttttttaaaaaaaaatcttagaaaatcttttaaatattttaatattttccccattttttaatatattgatataatttaataaagtatgagatttatttttttatttgaaatctaaataattaattatttaatgcaatataatcaatgttctttaaagttgttgcaataaataattaatagaaaaacaaacgtaaaagaaaagtttagtatgccagatttgactccttgtgggtgaccatagtaaataatcaaatatgctctatcaaggatgaggtggaataagctttaaaaaaacctccgtccattgtccttttctggaatactctttcctctctacatttcattctcaaagccaaggctatatattaacaaacttaatgttgtatattcttttaaaattcaaaaaattaataaaaattcttttaaaaaattaaagttggttgatgactttacttgcttacaatagttatagattgaccctcatatggcataaacaagacatgaattttatgatatcaacactcttgttttaaagtttcctttaggaatacatatgtgcccaagtttttgctgcctgcactatacaatatcttaaactccatccactatttgatcaggaatttagaataaaagcagcaaggagggactgctattaatgcatcgtagtaagtaaattttaatcaacaaaacaattgtgaaattcgtgcagaaaagaggagtaagatatccagaattgtcctgact

SEQ ID NO: 98213 - DNA, 473 bp, Vitis vinifera
  Intron number 1 from transcript GSVIVT01028851001 (locus G SVIVG01028851001) derived from phytozome v7.0 (chr-ID chr1 6; pos 18084889 to 18085361)
gagacgaaggtctgttgtatctctgatatagctttttgttttggggtttgttctgttttccttgaggaataagcttgcatggctgtgatgggttttggctatttggttgctgagaaactgaggaaatggaaaggaaagaaaagatataggggccttgttgaaaagctaactctttctcttctacgattagaagaatcgagttttcttgttgtttcttttcctaatttttctcagaaatcaaacggagcattaaggaatttgaataagttctatgggttttgctttgcttgagctcctattcccactttagtaggttttgtaaagatgaaaattttctaggtcttctgatgttttttttatttttatattgttgatggttgttcccctttttctttttctctgagtcacagcgtatctcaagctgttctttattttgtcgtgacagaaaataatcttgaagttggaggtattcg

SEQ ID NO: 98214 - DNA, 660 bp, Vitis vinifera
  Intron number 1 from transcript GSVIVT01028021001 (locus G SVIVG01028021001) derived from phytozome v7.0 (chr-ID chr7 ; pos 3240304 to 3240963)
atcaccgttacctccgatagcaacctctctaaacggtaccctttttctattcttgttgtcatgctctggtcttatagttttagatggtaaaagaatgcgtaactctgtttggtattcgggaaaattggatttgagagaatggtggattgtgcggtccaaaacacgatgattagtccttttttggagaatgaatttcataagccttgaaaatgaatcgagtttatttgcttcctattatgcagtaattgctgacatgtcggtagccacgaaacatacctcatccagtagagccagcaatgttcatttgtgcaatatcattgtttcatttccgtttctatataatgatctgagattttgagatttgatagttgttgcatgaacctgtgtgattatgcctcaaatagattgttgtctctgatgaattataggattcataatctttcagattggggctatttctcagtaaggaagagcgccttttttagggtttcaatgcaatctccctgctgggtggattcgtaattttttcccatccaaatggagaggcttggtgctttctatgatctgacctaactaacatattgttatgatttgcttcaaactgagcagtttgtttgcttttcaggtacctcaagtatctgactaagaagtacttgaaga

SEQ ID NO: 98215 - DNA, 962 bp, Vitis vinifera
  Intron number 1 from transcript GSVIVT01018979001 (locus G SVIVG01018979001) derived from phytozome v7.0 (chr-ID chr4 ; pos 18137960 to 18138921)
aggtttgattccactttctttctttccgtttatatttatgttcgttttctgcagcaaactttaacattttcctctcctctttattcattctttcggagaatgatgtgtactgtgttgggctaatgctttgcctgttgtttgtgacgactgacgagacacatatgcttacaatttttcttttctgcaattttgtttttggcaccttgggtttccaggttgctatttttggttcccatcgaatcggagggaagaaagtattgataaccaagaagccattggaaacagaaatgaaaaccttgttattctgttcaacttcatccccaacttttttttttttttttcctttttcatatattgtcttaggaatcgaatttattataaggttttaatactggtgctgattctacaactatcattgttattgctttggcacgttgctgcttgtctttaccctgatggttcaaatttaaggtgatagctgtggtggctattgttattgatacatttctgttagatgtcggttttccctctcttatgcatgtcaatgtagaaagaacgacaatgacaaaaggatcatcacaaaaacaccatttcccccaaatgataaactatattttcacaagctctttctcatatttaatggcaaatttatttcttttgttgtttttaatattatattatattacaccttattggtaatgtgatttgaggttattagctgacattcttaggcagaaaaatctacatagcctggtattatttattgatttatcatttttcattcagtgttttcagaaattttggtctgttgcttttatacttctaatcactgtttatgggtcaattctcaatcagtattagatattttctgcatattcaacactattaagcttttctattttaatttttttgttatttaatctaaaatgaagggtatttgtgaggagaaaattaaagttaag

SEQ ID NO: 98216 - DNA, 315 bp, Vitis vinifera
  Intron number 1 from transcript GSVIVT01024315001 (locus G SVIVG01024315001) derived from phytozome v7.0 (chr-ID chr1 6; pos 777467 to 777781)
aaacaaggtggtgcccttcagaaggagctcatcaggtaaaaatacctagtgttttttgaaaatatttctaggcattaaaagcatttttgaagaaaaatgatgagtgtgttcgacaagatgtacatataatatgaatatgaaagtttgacttgttaagttattcggatttcttaatgaatatggtcaacacgtccgagcccactcggggagtcctttttggttactttctattatctaaaacagttgtgttctgatttgaaaacatgaattggttggtgatgtgctgggttgttgatgcttgatacagggtcttga

SEQ ID NO: 98217 - DNA, 869 bp, Vitis vinifera
  Intron number 1 from transcript GSVIVT01018940001 (locus G SVIVG01018940001) derived from phytozome v7.0 (chr-ID chr4 ; pos 18520683 to 18521551 reverse strand)
cttattgatcggttttctctgcgaaaattgtaaaggtttggttctatgttgatccgtttcttttttctctttttgtttcttgttctttctgcaatgctgttaagatgattttttttgtttctttattttttagtggattatgattttcttgattcagataggatattgaaccctctggttgctgatgaaagaaagaaaatgaaaatgcatctcaagtagattggttttataaggcttagttgagtggaaatttccctctccttggatccaaatcgcaaaaaaatgagggactcaaaacgtcttcactcatttgtttttcgtgcattttataaggaaccgcacggagcataatggtaccccataaaagttaaaactttcaattatggattctttgtgaggattacagtggcttatatttcaggttttttatggctacaatgtttggtgattctgttggattttcagaaatcatgatcagattcccattttattcctggcattgcgtgtgtttttcataaatttgtcttaatcattacagcttgggaaattgtggaaactgataaaagaagataataagaactgagaaggcattgattctctgctagcgagttgtaggaaattttcatctggatcagtgttacccttttgatgctaggacatcagacccattgattctttaagttctttgtgtggtggatgtaaccaagtattcaaaactgaatgtgcttaaaattatttaagaagagggtcatgtgttctgttttgtatgatggatctataaatgatatcacacgttgaaaagttttgcaacctaaagattctcatttgtatcagtttgtagctgagcggttgaagaaaaggattgttat

SEQ ID NO: 98218 - DNA, 845 bp, Vitis vinifera
  Intron number 2 from transcript GSVIVT01020701001 (locus G SVIVG01020701001) derived from phytozome v7.0 (chr-ID chr1 2; pos 3006229 to 3007073)
ggaacaggaaacacagaggcttctcagtgaaccaggtctctctctttctctctcatttcttgggtgtctgtgtgtatatatgtgtttgtgtttgtgggggtgtgaatttattattattttgtttttgtttaatgattgttttgatgttttgaggggtaaagcatctgaaacgggtggattgagttggggcctcatggggtttgtttgatcaatgcttcgtttatggtaattaaggagtgggtttgtagagatttgggttgggaacgggaaccaaagttgttttgttgtggttagatttttcttgctgatgacaaggaatactgtgcatttctttgcttgatgtggctccttacttttcctttttattttacacaatgattcgcctgagaatttggacaatttaattgtgaagaagcttgagatcatttggattttgttatttaccactatcagatggctcattttagggtgggtagcttgcttcggcttaatgtcaacattatgacagctatatcaattccaagttgtagcaaggaatgtgggtagggtttattaaaaaaatgttatatacgtcctgatggaccaatgccctaagtttgatgggatgtaacaaattaagtatttcaaagttttattccctttctttttcatgagagggtggttagtttttgtttggtggaatttctcttcaaagattctaaaattgttcctttatagtggtacttgcatttcttaattgcttttatgaaattttagtttttaatgtgggtcttttaatttactgatattattagtcctctgtgaatacagctccaggaattagtgcttctccttcagaagagaac

SEQ ID NO: 98219 - DNA, 359 bp, Vitis vinifera
  Intron number 1 from transcript GSVIVT01029548001 (locus G SVIVG01029548001) derived from phytozome v7.0 (chr-ID chr9 ; pos 21709465 to 21709823)
ggcgaaacatcgtcgatattatctgtactattcaccattctccctacacatgcctaaactgatcatactcttatccatatatatatatatattacaattattactagtatttcttctttataatcaaaagggtacatatagttggaaaaatatcataggtttagggttcacttctgaaactaatgaacatggtctgatagcttcttcataccttgaacgtatactcaatcttcttcataccaacaagatgacgtacttcagaaactcatcttgttgcagaggcctatatgtatgcatagtaactggaatttttttttcttgcagctgaatttctagggtttgaagattacattccatcg

SEQ ID NO: 98220 - DNA, 960 bp, Vitis vinifera
  Intron number 1 from transcript GSVIVT01023491001 (locus G SVIVG01023491001) derived from phytozome v7.0 (chr-ID chr1 4; pos 11048703 to 11049662 reverse strand)
attttcacaagcctaatcttgctagtggatatctggtaatacttcttgctccctcttttccctttgtgttgttgtcaattgtcttgcattgccaacattgacgttttttgtaagttgtgaagtatagcatattctttaatttgtaattgaggtctaagagaatgatagaggccatttgaatttataatattattaatgtgcatttcaattcatggaatttattatttgaaaatcaacattgccaatttgatgcactagaaaaatatataattcatgaagtttattgaaatttatggtatatttgtctcaatcaccattatgtttcaatatctgataatttattctgcaaagtgagccttctgcttgagaagatgtttcttgagagaaactttgattactccattctaacttgtcaaaataaatattggagtacagtcaacatgctaccttgaagacatttagatatgaaccacttttacttgggtcacagtctcataagcatatgttttatcaaagaatgtaggatttcttagcataacttttcctaatcaatgatatatgcttcacttttctgcaaaaacagttctgtaaaataaaggaacggttttgtgaaataaagtaaaaagtaacatagaaacctccattattgaaaccgataacactctttcttatgattgctccatgatatgcatgtgctcttttcttacctgagttacctctttcatggtttgcatgtaaatgggttaagtgaaccttggtattaagaatgcttatgaaaccaagaaactaaaaaacttactcttaaaaagttcactgataagtgcctttgtaaagaaactacttgatttttattgtgctggttttttgtgaaacccatttccatggttttgtgcatggcttgtttcttataccccaattttcagttttttcacttataaaaattatgtttccaggttgtcg

SEQ ID NO: 98221 - DNA, 467 bp, Vitis vinifera
  Intron number 1 from transcript GSVIVT01019515001 (locus G SVIVG01019515001) derived from phytozome v7.0 (chr-ID chr2 ; pos 1248431 to 1248897)
aaccgaacgcgttttcctcccaacgcttttcacacgtgacacaaattgaccaaattaccccttagccgttgcttcgtagccaaagaaaagttaaaaggaaaaatcttttttaacgtgtgaatattattaaaaaactggtgagaaaaaaaaaatctaaatagaagagaaaaaaaaatctaaatagaagatttcttttctttgaaaaaaaattgtatatctcagtattctaattttttcctcaatttttattttaaatctataaattttttaatatgtttttttaataatttttctttctatttaattattcgcacctttttcaggaccaaatatgttaaaaattcctatttattatttgattttgattacatctttaaaatagaattcgagcgcaggcaggtcaactgagttaaattgtcgtgtacgctaaagctttaatttgcggctcggctcgtcccgctggcgat

SEQ ID NO: 98222 - DNA, 912 bp, Vitis vinifera
  Intron number 1 from transcript GSVIVT01029815001 (locus G SVIVG01029815001) derived from phytozome v7.0 (chr-ID chr1 2; pos 15207174 to 15208085)
gaggttagttgacactctccttttattgctatgctaattcacagatgatagtttcaatttttttcccattcaattttttgttcattgctatcaatttgacgatttctgtttgattctattgtacatcattgttaactgtatgaaagcatgcttattgtagaggcatttattaaaatattaaaatttaatttttttttgtaataggatctatcatttcatccaactagaagagtttctccaattctatgcatttttctagaatacacagacaatcctgacctttcaagccattaaattgaaatctggcttactgatgcaaaagaattactaatttaatcaaagtagtttttttatcacttgcattattttttcttttctagatcttatcagctcagtttttgtgctgacatatagactggttcataaattcatgtttccctagaagattgaattcagaagtctcaatttcttgagatgtgaaagcatgccagataaatggtgtcccttgtcaggcaatgttagtggaaaatttatcatttcattcaagagaactttatatttgttttgacttcccatgttggttgaatgcattccctggacttggttagtttattttctgttctacttcaatccataccaaaaccaaacaatagaaacaaggtgaaaatgacaggacagttagatgttacaggacaacaatgaacccttcatgcaattctggaattgttaataaaattttctatccgactaaattcttgtaatcagaaatattaagctaatattggtttttgcatgatcctgattcctttatggaattttatgtcagtagttttaattctttggtgtcaacacatttttaagatatctcaatttacagggctatactccaatcttctgtgttggtgttttgga

SEQ ID NO: 98223 - DNA, 882 bp, Vitis vinifera
  Intron number 1 from transcript GSVIVT01027413001 (locus G SVIVG01027413001) derived from phytozome v7.0 (chr-ID chr1 5; pos 16919232 to 16920113)
tacgtggcattccatttgttctaaacagagtaagaaagaaaaaaaccatatcattagcattatctttcatgtgtattctttccccttttagattgttttttcaaaacccttaaagctgccttccatgcacgagaacaaaagttaaaagagtgcaaaagttaaaagagtgcaaaatcgaagcataatatgagaaaaaaaaaaaattaaaatcctttgataaatatttttagggatttaataaattcaaattattttcaattcaaaatttatgaaatgtgttttgaagttagaacaatagaagaatagttttctcaatcaatcattttagaaagttttttctcccttaaaaaactcaacaaaacatttcaaaatatcttaggaatcaaaacttgtttttaaattaaagaacaaaaaataatttttaaaaataagtttcagaaaatataatcaaataggtctatgatttttatttttatttttattttaaattgatgacaacaattttgacttattttttaaaaattatttggacagaagaaggatgaaacaatattaagaatttttaaaaatagttcattatttttaaaaacagaaaactgtttttaaatcataagtagaaataatctctcaaattttaattgttttgaaaaatatattttctaagttgaaaagccgttttcttaataacaatataccaacaaattctaagattttaacagaatggagactctaacatggcaccagatagggtgagtataggaactagggctatgcgtttatggaatgcccttaattgtgtaggaatcgaatgctatctgtttgacaatggtcatcgatggctgtacaggagcttctggccttaaggtcctccagagtggctgc

SEQ ID NO: 98224 - DNA, 862 bp, Vitis vinifera
  Intron number 4 from transcript GSVIVT01020010001 (locus G SVIVG01020010001) derived from phytozome v7.0 (chr-ID chr1 ; pos 11621192 to 11622053 reverse strand)
ctgagggattcacggtagcttttatgtttgttctatttgtctcaattgtctaactgtgagcttgtcttccttttgattttttctctcggtatcttttggttttcattttaatttaatttttacacccaccagctaaagaagggggatcaaatcatgggctatgtaaaaatatgttcaaatctttatatgtatgtagattaacgcccatcatctcaactctctattgactaatgattgatgctaggtccaggatttttttagttaaaaagactgtcagatattaattcttctcgttgaatttgataaacgaaaaactcccagcaaatgcattaccctatattttgattgaataaagcatattattgcattccacatgaaagatggaggagggctgtcaaattttctgcatggcaaagagtattgtgttcttattccatagcatttctctgatctttttgtaagaagatgcattatctactctaagaaatataatgacttttgatgtttttcttgaagtagagagggctgaggccattaaatatgcatcttaaggaacttttcaaagccatggatcagcacaggattctttactctgctgtaatagcttaatggcatgcatcctatagctaggtgttttagatcataacaggtaatttcctgtttataacaaacaggcaattttattaaatctcaaggtttagaatgttttggagccccctgtgacatgtaataaatgtgagattccaccgtgtttttttcgtttcatttagcagcagcttttgagttatggtggttgtatttaacatcttgctttttatttacttcaggtgattgagcagtcgggagtggttgaggctggtgg

SEQ ID NO: 98225 - DNA, 456 bp, Vitis vinifera
  Intron number 1 from transcript GSVIVT01020010001 (locus G SVIVG01020010001) derived from phytozome v7.0 (chr-ID chr1 ; pos 11622522 to 11622977 reverse strand)
attccatttcattgttttataaagtatactttttagtgatgcttatgaatggatagcgcaccccaagtattaatggacaaaaaaaaaatttagatgtagaattacagaggttcattctttatagtattagttttaatgatttcctaattctaacatcaaatcagagtggcgcagcggaagcgtggtgggcccataacccacaggtcccaggatcgaaacctggctctgatacataatgaaatcttttagtttcctttcctcgttagacgacgtcgtttttgttttgctacaaattttcttttatccgactttgatggcgtagtcatcaagcgagacgtcgccgtttttcttcgttagcgtattcgttaagcagacaaggggttcgtatcctatataagaccgccaacatccaagttcccagagttcttcagtacaaacaagaatcttctccattct

SEQ ID NO: 98226 - DNA, 551 bp, Vitis vinifera
  Intron number 3 from transcript GSVIVT01026829001 (locus G SVIVG01026829001) derived from phytozome v7.0 (chr-ID chr1 5; pos 20128307 to 20128857 reverse strand)
gcttcagattaggaatccctgctgctcgggtatgtcttcgtatataatttctttgttggctgaaattaagtgagtgtggatggctaaaagatcgcacatggagtgattatttggaaaaggagaaagagtaagcctatttggcaatgctttcaaagattgttctgaacagttcttgttgagaactcaaatatgaaaaacaagtttcttggcttattctaagggtttatacacttacgtgtaatgtaatagtttgtaaaatatttttcatattttcaattgttgctcataatactctatataaaaaaaaaaaaatcccaattgaaacacttcaaattgttataaatatggtaatctattttcagaacaaattttgaaaaaactgttttgtattaaagctttgccaaaagttagaaaactgcctgacacagttttgttgttcttctccttttttttgggtcagtggagtaggggtgtaatggctgcctggagaattgagtttttcttttaataatgcaggcaaaagtaggaaaaatcaattggaaagaaataat

SEQ ID NO: 98227 - DNA, 490 bp, Vitis vinifera
  Intron number 2 from transcript GSVIVT01026829001 (locus G SVIVG01026829001) derived from phytozome v7.0 (chr-ID chr1 5; pos 20128897 to 20129386 reverse strand)
tcatcaaaacccagtttgggaagcttgatattttggtatcatttaaaccctcatttccatcttttttcttttctgggtttttgttgttcaagtcaaatatgtagaatgcttcggaattgaaaatttgtgggatacccacttacccaatttttcccttgattttgccctcctttttgatatgatatgtctgtgatgattttgatgctttgtgaagatggtcaatttcaatggattagaacttaatattgggagtttgaatgctttgagtttcaatttttatgctttatgtactgtgatagactacttttatatgatgcacaaccacccaaatgaagaattctccttacccacttataattcttgaaaattttgaagtgaatcttatgattagttcttgaggaatagatggcctctaaatggttactttattttttcagtttatggttaaaaattgggtaattggcattgtggacttctgaacaggtgaaca

SEQ ID NO: 98228 - DNA, 318 bp, Vitis vinifera
  Intron number 1 from transcript GSVIVT01024950001 (locus G SVIVG01024950001) derived from phytozome v7.0 (chr-ID chr6 ; pos 5738817 to 5739134 reverse strand)
ttgctgtaaagcagttgaatcgaaatggattccaggcatgctcttcttcttatttattttacttcatttcatttcaatgagaaactaattgtggttttgttcattttagctgcattcagtcgcaaaaatttcagacattgtcaaatttattttaattgaaatttttaacaatttttatctttttttccaatttttgaatggattgtttgcgctgtcctatgaactcgatgaattggaatgcatgctttgacttactgtttgaagaagcaaatgatgacactagaaaacatcgaaattgttgtgctgaaatccatctct

SEQ ID NO: 98229 - DNA, 460 bp, Vitis vinifera
  Intron number 1 from transcript GSVIVT01023295001 (locus G SVIVG01023295001) derived from phytozome v7.0 (chr-ID chr1 2; pos 20010046 to 20010505 reverse strand)
actcgcgcgagactattatcaaggcaacagtactggtacgttcttttatatctatatatctatttctttatatatatatatatatatatatagggcatcttcttgattatcaggaatagtaagtaggttgagcaaaagaattgactgccatcaccatgttcaccctagtcatggaaaacacatatacatcaagcaaggaagaccagaaaagacttgtatgaaaactactagacttaatcaattgatcaaccccaggtcttccaatgatgtagaaacgggcaatataatcattgaaaacaactaccaaataattcaagcaatgcatacccaaacttttttgaactgtcaattccctttcatatatattatgcatttggatcaattaggttctttcttttgataccttctctcttctaaaagcttttgttttgttattttctgaaatttaacactatagacc

SEQ ID NO: 98230 - DNA, 416 bp, Vitis vinifera
  Intron number 1 from transcript GSVIVT01019413001 (locus G SVIVG01019413001) derived from phytozome v7.0 (chr-ID chr2 ; pos 459948 to 460363)
aaggtgagagctttttttcctggaaaatccaagctcagtttcttagcaaaagcttggatctttctctccctgtttctgttttattgaatatgctttatattatatcttttcgctaatgggttttaaaattcatgaccccatgtgggctgtgttttttgattcatttcatgaagctgaagcatgatccttgatgggttttatatttaatcaccttttggaatctcaacttacttggattttgtttttcgtttttctttgatcctcttcatccccatgacttggatgtttgaagctacaaaatcagatctcttctggcttttctttcttgcttcaatcatttcagaggttattattatgttattcaccattcctgttcttttcatcgcagaaagtggtgttgaaattggacttacacg

SEQ ID NO: 98231 - DNA, 662 bp, Vitis vinifera
  Intron number 1 from transcript GSVIVT01022435001 (locus G SVIVG01022435001) derived from phytozome v7.0 (chr-ID chr8 ; pos 2996292 to 2996953 reverse strand)
tacctcctcctccttcacaccagcctcttcctcctgtaaggaaaaacctctctttctctccctctctctctatatgtagtgttgtttggttgcatggattcatatgacaactaaatcctaccaaaactggaaattagggcgtgtttggacatccttcgttgtgttctacttctcattttttcttgttcaatgggggtgattactggagaatcttgttatatattgctgttgattttgagttggtgcagtttatgggtcggagggaggggtggaaagatttgttagaatgatgtctaagagagatgcttgctactagtataaaataactcatccactatcccttttgatttcctggagtagtttcatcctcttccttaagataatttttcaacaagaatgtgaccttggttttgttatttctcaacttgtaaagatgctgtacaagacttattattaagaaaattttcccctttaaataaaaaaattcattgaagtttgatgggtcgcccaatcacactcttgtatgtaatttttcaataaagagggaaatgggtttgtttcttatcatgattttattttttggtgttttatttttcattttttaaaacctgaaattgatttagttttgattaaattaattggtgcaaaagtttgtggaggtt

SEQ ID NO: 98232 - DNA, 675 bp, Vitis vinifera
  Intron number 1 from transcript GSVIVT01028910001 (locus G SVIVG01028910001) derived from phytozome v7.0 (chr-ID chr1 6; pos 17631739 to 17632413 reverse strand)
tgaagaggaggttgttagtctggtattgctctcattctctttcctttacagtttgaaattccaagttgcttcatgtatatattttttctaggtaagacattagctaaagttgatgccttgaacattgtattgattcatcagttccagtgacaattaaattaggattatttctagaactgaatcgctgaaagaaacttaagacaatcaattctgtattatggaactagttttggttttttcaagaaaagaaaatggagagaaagacgaagaaagaagaaactcagctctgaaacattataactacattgttattagtattggtgggagaaaatgcatcaaagggaatcggctctctaggtactttcgcgctatcttgaagaaatactgctaataatctgactgttcttcatatgacctacatgagccgagaatcttctaccttagaggtgtctgctgcaatgacagagctggtggatgtgttcagtcatttgcttgaattagaaagccttaatgtggttatgtttttggattaaaaaaccaagagcaggatcagttgtagggcaggactgaaaatggatggatgcatcaaacttgttattttttcttgtataaatggagaaccacttgtctgatttgtttgatcattcttaccaggcctcaactgtggagaggata

SEQ ID NO: 98233 - DNA, 648 bp, Vitis vinifera
  Intron number 2 from transcript GSVIVT01025124001 (locus G SVIVG01025124001) derived from phytozome v7.0 (chr-ID chr6 ; pos 4229245 to 4229892)
gttcagatcaaggaattgtatcctttttcctatgcaaatttgttctctctgtgaatgtctctgagctgctaatttattttattttatttgttttgtatatagtccgtttggttgctgagaaaacggaggaatataaaaaagagaaatgaaattttgttggttttctaaaaatggaaagcacgttttgttatgaaaaatctgagactgaaattttattttatttgattttctatcattttcctgtattttctcaccaaccaatagtgaattgctcaaaattgttgttctaccatattctatagttcaacagttgtttttgctctgtttcagctggaacatagaacccaccaacagagttggcgaatcatttctgtattttcaaaattcatacgggtcttcttcataaaaaattgaacgcgtcaattggatttcagcaaatatccagtaattaccaaatctcagattattcccagcatcccagttagataattttttatagcaatctttagatattaaaatactctgttttaaggaattatagagaaactggtatgcctcttattcttgtatgaatcttttttcgtttctatgcttgggtttctttaacttaaatttcctttgtggggatttctaccaagtcgaatagtc

SEQ ID NO: 98234 - DNA, 277 bp, Vitis vinifera
  Intron number 5 from transcript GSVIVT01025124001 (locus G SVIVG01025124001) derived from phytozome v7.0 (chr-ID chr6 ; pos 4230811 to 4231087)
catacccaaggtgcaaaacaggtttgccatgttaacatgatttcacacttggcttgatatgtttcatcgggaacttctattaatatattttttggttgttttctgaaattggatgtcttattcccagtaatcaaggtaattattttcttttttcaatttcaaatcttctattttctgaatactctttgcaaagtttcagtttatagtaaatcaaacacttccttgattctgcatttgtgcagtgcccatactttaacaagttctgtttagccattga

SEQ ID NO: 98235 - DNA, 765 bp, Vitis vinifera
  Intron number 1 from transcript GSVIVT01022879001 (locus G SVIVG01022879001) derived from phytozome v7.0 (chr-ID chr1 2; pos 18485460 to 18486224 reverse strand)
gagcacaggtgatttcgatgttccgaaagctgcccacctatcttcactacctaatatttcttgagtttttgtcaattgacacgatttttatttttatttttaatttttaattttattttgataggttgttttgaatggacatatgcgagtttagagttttctcaattgaattgtgaataatttatggacgcttttttcatttgattctatcatttatgggtgttcttcagttcacatgaattttgatgggctgctgggattcagtggatttcggaaaatcatcccttcttttctttctcttgtttcttttacttttttttttggaatacacagttcatgtttaacagaattagtgtgttctcggtataatgattttaatgtttctcagtcaaattgtgaataagtaatgagtctatttgtcatatgccatcctatgattcatgggttaatgtaggtttttgtgaatgggattcattggattttgtgaatactattctgggtctttttggccattcattggaacttacaatgttggttataacaatattccaagcaaaatgctatgttttcttgggcatatgtaatgttttctcaattaaattgtgaataattgaaggaccattgagcgtaattttgctgaattctgtgatcttgtgccaaatttctcttttatcaatcaatatagtgaggggttcctttgggagactgagacttattgaatatgatggtttttttgcagtccgccagtgaggcgagcaagtgcaa

SEQ ID NO: 98236 - DNA, 749 bp, Vitis vinifera
  Intron number 2 from transcript GSVIVT01023800001 (locus G SVIVG01023800001) derived from phytozome v7.0 (chr-ID chr3 ; pos 3399318 to 3400066 reverse strand)
tcaaggtaaagctgctcaaattgatgatatttatttctattttcgcttttcttggcaaatcttacggaattttgtaattactgtcaatgtctctgaaatatttttatcctataatacaataaaatcttcttctaggttagggatgttgagcgtttttctgatctacgaagtcaacataaaaaggaaaagtttaaacctgcctctacatacttaagagagctcattatcccagtatcactacatatacagtgcaaataacttccgatttgggagggtagacaaagtccgacggacggggatccgaataccattctccctcccatgtagatattatttgcaggggatcggaacaccattctccctcccacacagttattgttcattttgggtccaatggatctcccaattcaaaacaaaacctacaacatgtatagtatcaggagtttttttcccaatttatcatcagaatacttggttcttcttcctcctaccgtttcctttttttcttcctttttgtctctcttttctttttcttacaggtatatatcttgataggatctcttattccttccatcattcaaactaaaactgatagcaagtgtgtggatcaaatatatatatatgatgtctgtatgagaactaatatgactaaatggactactggggattaattttcatacattgaatgacatggtttcttctcataatgctttactttatccagagattcctcccatcagagtttggaa

SEQ ID NO: 98237 - DNA, 450 bp, Vitis vinifera
  Intron number 1 from transcript GSVIVT01023800001 (locus G SVIVG01023800001) derived from phytozome v7.0 (chr-ID chr3 ; pos 3400162 to 3400611 reverse strand)
agagtttcaagagctccggcgtcactttggtccatgtgtgtacaatcctctctcatgcctcgtcattctttgtttttccaatttcggctccttttggttgcctagaaaatgaaggaaatttctagtcgtggcgttttcggttttcggatctttgagttactaagaaaacgaaaaatcataaacgtaactcggctaaaagggttgggatcatcggaattacgatggtccgcttggttgatgagaaaattcaaagaaagaaaagacaggagaagaggagtttggatcttatgttttaggttgttttgatttcaataatgtgaaaaactcacctagctttgagttttacatattaatttgttcttcttagctttaggtttgtataactgtttgattccttaattattgtttggtacagggagatctaaacgatcaccagagtttggtaaaggc

SEQ ID NO: 98238 - DNA, 686 bp, Vitis vinifera
  Intron number 1 from transcript GSVIVT01020388001 (locus G SVIVG01020388001) derived from phytozome v7.0 (chr-ID chr1 9; pos 20230812 to 20231497)
ggatatctacaaatacgatccctgggatcttccaagtaagtttttctagtttgattttttcttttcttttcatactttcttatgctttttaagatagttctttactagcataggctctcttttgacttacggtttgggtgatctagtacagtctgaagcaactagctccatattcataaaaatttcatgggtttgttcctttaatttgaatggtaaaacagttaagaatacagctgccactatttcttaattctaggccatgcatgttgaaagaaatccttgcatatttaaaaatccacttgtaagcagtcccttttaggctttgagaggagttcattaagagttccattttaagagggcttcataagaagaggttactctgttgtttgatgaatgggaatacatggggtttatcttatttggctttaaattatttgtcggtttttcccaaacaatattggtgattaacagatcagaactatgcggatatataccaattagatcctcttttatgagatttagaaagagagaattacaattttggatcttgcaattgtactcattttgtggtcaatcctctattttatgttcagttccttgtataccgatgagaaatcatatgtctcatatgaatcttttgttaatatgcagagaatagtagtgttacagacaaggagtggtacttc

SEQ ID NO: 98239 - DNA, 643 bp, Vitis vinifera
  Intron number 4 from transcript GSVIVT01021278001 (locus G SVIVG01021278001) derived from phytozome v7.0 (chr-ID chr1 0; pos 3314201 to 3314843)
taaaaattgtaagtatgttattttcctgtgaatatgatccattacattgacattcatactttggcttttaatttttcttctttagcatatggaaactcttggaatcataaaacatttgtgatcatattattaattatcctattaattcaatcaaaaggcaatttttggagtctaattgactggtggacatgtcattgaaatagtaaaatcttgctgattatagagaaatgacttttaccaagactccttttgttgtagtgaatactacagaaattggctcaagaatttgtttcctctatcttaaatgatttaaagtgagctattcatgccaattgcatatctactctctaatatgaaaaatgcatcttcttttttaataattttactttacaaatagctagcatttttaatttctatattgtctttgtatcatgggtaaattgaaaatctctgttatggtttctgacatcagcaaacctttatttctgacttatcactgacctgccttgcatggccgctttgtttgtcgttgtggtgcttgttagtgaagttgaggggaggtcagtgatgggtcagaagccttggagagaggtcttatcaacttagtcttaaatttcctgataacaaatttattttttggcag

SEQ ID NO: 98240 - DNA, 964 bp, Vitis vinifera
  Intron number 1 from transcript GSVIVT01027769001 (locus G SVIVG01027769001) derived from phytozome v7.0 (chr-ID chr5 ; pos 7528642 to 7529605 reverse strand)
attttttatttttttgaaccagcccattagtttcggttacataaaattaaaataaacgctacgttactataatcaagagacttgaaaattttctcaccaaatttctcttttggaagccgagaaattcaccaaccaaccacgtaccctacgctcaggctttgtgcagtcctcttaaagaggtccccaacagattctcattgaatttgaagcgttttgatgtcttccccagcagcgctctcattcaaccctcctgggttttctccctctctctctcttctctatgtttctgcatttgtttcaactttcaatacagctatatgtccttaatttttcccttttcaatactctcctggtgaattcaacatgggttttctgtcttgttgagatcttgaagtgacccatttgctgtttcagcctcactcactcaatcacatttatggtatgctgcattacaactgtagggtctatatctgagtgtctgtcgattttattctagcatttgcatgtttctgtgaattgaagatccgaatagactcatttctaaatgtttttcatagcctctctcatggatcttgtgagcacagactcctccatccatggatcacaagccttttctcccatcaaaagccaggcgagctcagtgcttccttctccctctcattcctcggacaccagtttccccattatagccattgccgtaataggaatcctggccactgctttcttgctggtgagctactacatctttgtaatcaaatgctgcctcaattggcaccggattgatctgctgagacgattttctttctcaaggagtcggcacccggaagaccctttaatggtgtactccccagcaatcgagagtcgaggcctggacgagtcagtcatcagatcaatcccaatattccagttcaggaaaggaggtggcagagagtttggagaaagaagccattgcgagtgtgcggtt

SEQ ID NO: 98241 - DNA, 415 bp, Vitis vinifera
  Intron number 1 from transcript GSVIVT01023790001 (locus G SVIVG01023790001) derived from phytozome v7.0 (chr-ID chr3 ; pos 3455112 to 3455526 reverse strand)
agagtttcaagagctccggcgttagtttggtctatgtacgtactactcgctcttatgtctggtcattttttcttttctaattttgacttattttggttgccgagaacatgagtaaagtcaatttggagttctagcattctcggatgtttaagtttccgaagaaacaaaaactgaaaatcgtcgttaatccggaaagaaaagggaatgtacggatccgcatgaaaagaaaagaaaagagaagagaagtttggatgtttatgctttcaagttgttttggtttcagcaaagtgaaaaaaacacaccctgtcttgaattcctacctttcaattggaggattagagttatgaaagagttgattgattggttatgttatgttgcagggagatctatacgatcacgagagtttggtgaaggc

SEQ ID NO: 98242 - DNA, 909 bp, Vitis vinifera
  Intron number 2 from transcript GSVIVT01020043001 (locus G SVIVG01020043001) derived from phytozome v7.0 (chr-ID chr1 ; pos 11226432 to 11227340 reverse strand)
caccggcaatctttgcatcaaagtaaatagactatctttatctctcgttccttttctttttccacagtttttgtagattttgttttctttgtcgtttggcttctagctgtttgagttgtgtataagtctggtaatttgattatgaccatcaaattctttgcctgtagaaaaaacaaaccagtggtttaaattgtgttatcccatatgatatttccatcatgctctttcaatggaaagcatgttgtgtgttgcatggttatattccactattatgatggttttggcattcagattttcctattaataatcatccacttctagggcaggttgctgacttcaactattttcatttatgtagatgtctgataccatttctcaaatttaatacgcatattttggttgtgccactgttttagatttttgtctttcatgcagggattgactttattcctatgataatacatataattttcaatcccattttgctttgatgggttcatcttattactctttatgctatttttttctgcctgtttctgttctgtcatccaaagattctttcactcatgttttcaagtcagattgagagaatccctcccctggtaaaattctgttgatttgtatttgtgctgtgagaaatttgacatttgtgggatagcattatttgttcttaaatcttagcattttatgattgatgtattttaatgaaccgtggtagaaatgtggaaatcctattaattttctggcaagtatttcctgggatagcgttttatgattgatgtatgttagtgaaccgtggtagaaatgtggaaatcctattaattttctggcaattatttcctctttaaaatttgatgcattactatccagttagaaatattcttatagtctcctgtgagcaggaagttc

SEQ ID NO: 98243 - DNA, 186 bp, Vitis vinifera
  Intron number 1 from transcript GSVIVT01025809001 (locus G SVIVG01025809001) derived from phytozome v7.0 (chr-ID chr8 ; pos 11628733 to 11628918)
cctcacccgtgttcagggtaccaaaaccaacacacttccattctcttttatttctaattattttttcttttcttcttcatcttaaattcgctttatctttgatctactgccatggatttaaattcttattaaaagaatttgtgattggattttctgtttgtgtctttcagtaaatcgtggcgatct

SEQ ID NO: 98244 - DNA, 999 bp, Vitis vinifera
  Intron number 1 from transcript GSVIVT01026934001 (locus G SVIVG01026934001) derived from phytozome v7.0 (chr-ID chr1 5; pos 19275058 to 19276056)
tcactcttctttgggaatatcaaattgaatttcaggtattttctcatccattttttatcattctagaaaataagactaattgctttgaatttcaggtattctcatgttctcattgttgtatcaaatgttttttttcttttttcaagttgattgttctaggaaataggagtaattgctttagaaattctgcattttcctgagcctgaaaatattgtaatttggtatgttcagctatgctgatttccttggaaaatggagcaaagtatcgattcaagtcagcacgaaaataatagaaaatatgatcttaggggagaaaatatttcagagctgcaggagaacaatctaaagcatgggttgttgaaagattattggtagggttgaacattgttttattggtcaaaccaagaaacatcctagcttgtctagctcatgacatgtgaggtttggtagaattgccataacccgagcctcctcgaaatgttgatgacaatgtgaacaccttggtgattcactctttggcttgtgtctgatcttgcctttgggtgttattttttcaatggcttctatggttgttttttttgggtttttctccagagcctgaattgtcatttttagtgttcgtctgtgaggaaacagttaagaaaaggccttaggtttatgaattttcaaatctcctgagagctccaatgaagatccaggactatgaactcgattgtttcttcttttcttttttttttcttttttttttaattctaattttaattgtttctgtgcttcaatgaaatctccagagtagcttttactttctggttagatcgaatgccccagctccatgtccattcctttaatttttctagacttcgtattgtggtacattgcttatggaggagcctttcttttggtttccaggtggggaaaggaatgggccagacggcaacttttctgtaaaatatcttctaattgttgtttctttacttctttttccatgcatcaggttca

SEQ ID NO: 98245 - DNA, 627 bp, Vitis vinifera
  Intron number 2 from transcript GSVIVT01029862001 (locus G SVIVG01029862001) derived from phytozome v7.0 (chr-ID chr8 ; pos 688382 to 689008)
tttagaatcaaaatgttaataaaaaaaaactctatttgataggatttttatacctataaatttcattaaacctagaaatgatacattggaagaatcttttaaatcttttagtatcaatagatttcgtttcacttcgatatcttccaaaatgaaaaaggatttctaagaaagaaagtatttgggttcttccaataagtaaaaagtgtatcatgtctaaatctaactaggtttcgcaatggtgaaggaattagtacaaaaaaaaaacaaaggattctaatatgtaatgaaactattgccaaaattgatatctcgttcaaaaagaaaaatatcaaatataggaatttctttttatatgttatatggatgatttgagctacatggaccataataaggaattgtttgatagtctttctccaaggaagagatgaaacataagcaacattaatttgatatcactaatcaaaatcttagtgaaacactaggtttgttatctcatgtttacctttcgtggaaagataccaattgaaagtataatttcttaaaataaagagttgggctaactatttagtcaaattatattgagaatggttagtatctattctcgagaaacaagtgggctatttttgt

SEQ ID NO: 98246 - DNA, 844 bp, Vitis vinifera
  Intron number 2 from transcript GSVIVT01021544001 (locus G SVIVG01021544001) derived from phytozome v7.0 (chr-ID chr1 0; pos 6867535 to 6868378)
aggcatccagatctgtgagtggagaattgtattttccagaatctttgatgatgatgatagttgtagtgtgttagtgatggcaatattgatgctcatagttatttgacaatgagtctgtaatattgtctattaagataatgccggtaagtcaactgataccttatgatggccatgagtcatgagtcatgactacgtgatatgggtcttagggatggatattgggtccaatgtacttccaccccaacattatgtgttatgggtctttgacccaattttttaccagaagttgtctcatatttctgaataggtatttgtaaaaacttgggcatagtctcaaccatttaacaaatttaacaactttttgatgagattttccctaccaagtttgctttgggaggaggatgaacttgaaagttgaaaccccgctcttacccttctctcaccatcttcatcgcagggccttttagcacggtataatttgcgtacaagtgcaggcagcgtcagttgcacagcttgattttggtttctgtttttaagtgatgaaccccctttctttttctttacggtggtgggccctgaaaattatagggtttgcattaatccaatgaccatttcaccctatacatatgaccaccatgagtgggtacagtttctaacctataagggcattttagtcacataagcaaaataatctacaaaatctggtctcacccaatcgcggtgtactaaaatccacgtgtcgtggttcgatactgatacaataaagaaggtgatgagatcccacaagatgaaagcgcgtggagggtcatctccctctccccctctccctttgtgagacaacacc

SEQ ID NO: 98247 - DNA, 503 bp, Vitis vinifera
  Intron number 2 from transcript GSVIVT01018938001 (locus G SVIVG01018938001) derived from phytozome v7.0 (chr-ID chr4 ; pos 18531142 to 18531644)
ttgccgaagctcgttctcacttctacccacggtaggtacgtatttgtgaactgcatttctttgcttttatttgtgaggcatttaatccaatattggtattgtattttcgcgatgttgtatttcgatttggatattgagaatcccatctcttgaaactgaaattatgctctctgaattttgtatctttaatcaacaattggagttgtgtataatgggccctgagaaactgttcttgtgcagtgttttttctaatgatttttacttactgaatctttgatgataaggaactgggaaattgacgtttttaacatatgggttgagagaccagtaattagaaagaaaaaaaaatggaaagctcatcaagataatgtatcattactctgaacatttggagaatgtagcattgctgcattgctatgagggtcatagttatatgatctcacttgtgattgaacttgttgtttgcagtgaggctgagatatatttatttggaggttgcgtca

SEQ ID NO: 98248 - DNA, 728 bp, Vitis vinifera
  Intron number 2 from transcript GSVIVT01023240001 (locus G SVIVG01023240001) derived from phytozome v7.0 (chr-ID chr1 2; pos 20768550 to 20769277)
caggatcgatccataaactcagaagcctagaagcagtgagtcatctacctcctgaattcaattcattttggcatacctgagcttcatgttagttcatatagaatatgcttttcgtgctgcagtttctttactattgcctcgtgttctatgaatttgtgttttttattctctagccctgttttcttaagatttgagagaatcaattttcccacttcatatcttctcaaaatattttgaatttccgcttcggttatcatttaattcaaattttagtttaaatttataataaaatttaaaaaaaaattattctaactaatataaagagatattttatatttaatgaaacttttatgatattaatattattttttaaatgctattatttcggcttcaagttcagctatcaaccaattaaaagcttttttccatgtgaagtagccaaatatgccttttagcccaatttttccccacaaaaacatgattaaaatactttatatggggcttgagtttgattacgcactaaatcactttaaagtgcaaaaaatttgaagcctttgtaaaattagggtttaagataattgctttgaagagagtctataagaagaaaatacttggctaaatttatctccttcattattctttatatgtttgttaagccaaactagtcttaattggatgggttttttgtgacaggtgtcgacatcgtattcatcggatttttcggtatt

SEQ ID NO: 98249 - DNA, 315 bp, Vitis vinifera
  Intron number 2 from transcript GSVIVT01027659001 (locus G SVIVG01027659001) derived from phytozome v7.0 (chr-ID chr1 5; pos 14551536 to 14551850)
gaccttcggattagcattttctgtggagcgtacaggtgaattttgcatgaatttgctcttccgctagctgtgtttgtttggttgcatgacatttgtgtttattcttttgctggatagacctaaagttgaatatttatcaattataaattttttgttgaattaaatattggaaatgaatttttgatcattaatcatttccatcattgaattttctttcgtgtagaattttcaactcatagttactagctgcaccaaaaaaattgttttaatattttttgtaattctaattttgttttattttattttatgtagagc

SEQ ID NO: 98250 - DNA, 454 bp, Vitis vinifera
  Intron number 2 from transcript GSVIVT01027116001 (locus G SVIVG01027116001) derived from phytozome v7.0 (chr-ID chr1 5; pos 17711968 to 17712421)
attctatagtgtatatttgtctcacgctttgtcttgactatgtttcgctatgacttgctcagttcatcaaatgataatcttggtttagtttctgaattgcccaatcattattgggttcgtttgattgtcattggaattgttagctataggtactctttatttcctctccctcattttctctcaaatttccaagatccaaacataggggaagttttttattgttggttcagtcttatcttatagaaagttacagcagtaacagcaaggggtactgatccatctcccaacccagtgagagaatggatcacacagttgttttcttttttggtgttcaagcatattgaacttgaaattttcttttttaattggattcttcatacctcaatttatcctgtaatatttttcggctgcaataaaatgtaaattctccagcagattggcaggtgccattttt

SEQ ID NO: 98251 - DNA, 847 bp, Vitis vinifera
  Intron number 2 from transcript GSVIVT01029987001 (locus G SVIVG01029987001) derived from phytozome v7.0 (chr-ID chr8 ; pos 2776269 to 2777115)
tgttggtgaaaggtaatatcttcaaatcctttctctaactatttggaggctaaaccacatgccattcagttgatattcatggagaaattgatgatgttttttttttggaaaaaattctgtcatatagtgtgaatttaaaatcagaatttgtaattgtttatactagtaataatgcacaaattgaagtcaaaaacattattatgaaaagaaatatatcataagtgtttgatgggtagggtgaaactgaagaacatatatgtttgaatgcttatatatgtctaaagtgttggaaaaatgttcatttcttctaatacaaataatcttacatatggtataggaagaaaaatgcaaatcaagttaatagttgtttatatcaggtggagaagcattatgaaaattttagatccatattggtgatatttcgtgaatcattttatccccaaattgcttttagggaattgaccatgcttttacataatgatatgtcctgttttatttacattgtgaactgccaaaaagtaaggataggatgatattttccaattgtttttcttgatgcgagcatatcttttctcaaagcttcaaccctatgcttttattggtcccagtggttgcatcaacctgaaccatgtcacaccatgttattgattcagtccttgagttcagatgataatatttctttctttagatttgggacactggcactttgaatctgttctattttttatttattcctttttatgtatatttatttcatgagtcatagcatttgaagaattcatttgtgattttaacattatcattgcttgcagtgttgcttggttgattggttgggcattgattctgg

SEQ ID NO: 98252 - DNA, 483 bp, Vitis vinifera
  Intron number 2 from transcript GSVIVT01028933001 (locus G SVIVG01028933001) derived from phytozome v7.0 (chr-ID chr1 6; pos 17264355 to 17264837)
taattgtgttcaagcttttgctatacagcaagaaggtattggaattcttatttccggaacattagcagtttttgttgtttctagctgagaaaagaaaaaaaattgaagtatatgattaaccgtcacggtgtttcttgttgcccttcattttctctgccatcaaatggtcattacttgggtacgttgtagactaatgctactagtaaactgagcatggtatattaatcttgtttggcattccccctttttcttggcaacaaatggggttcatgtttttagcttaattgcatcatgagaaaagtagaactctgctcaaacatctccaaatgagctatttgggcaatatgaaaattcaaatctagttttgtttcttcttcctacattgcctttgtcggacaaaaggtaaacgtgatttcatgttgattatgactaatgattatgaatgcagttggttttggagaagcaccaagggttgtaactcag

SEQ ID NO: 98253 - DNA, 675 bp, Vitis vinifera
  Intron number 1 from transcript GSVIVT01022462001 (locus G SVIVG01022462001) derived from phytozome v7.0 (chr-ID chr8 ; pos 3328124 to 3328798 reverse strand)
ccagggtgtgttaagtcttctgatctgttggctcatttgaatgttttcatgtcatttatggatgtcttctaagttttgtttctcgataaaggtttagggttaatgtgtgcattattaactaatttttatttttatcctttttcagatgcaaatgaataaatgtagttcattatgctgactactagttttgtaaatttcccttgatcagttgttgaagcgatttcaaagatttctacttttttgttaacattgtgaatgctcttatattttccttgatatgtatatccaatttttttggagatatttgttttcttgattctgctgtaaggatgcttactaaataacctatcacaaaaaaaaaaaaaaaaaaaaaaaaaaaaaaaaaaggaatgaaagaaaagaaaatgcttactcagtaattggctgttgaaacatcagtagtgttgataggccagcactaattgggaagaattaatatgcagctgttactttttttgtagaactgactagtccccataactacatttgttttctatgcttatatctttgtttgcttctgttgtgaaggggatgatagtagattctgcatatgcaggaagacttatatgtgggctttataaagcaggaatactttaattcctcttctacatgatccttctcattttctgtgtcagg

SEQ ID NO: 98254 - DNA, 973 bp, Vitis vinifera
  Intron number 1 from transcript GSVIVT01028359001 (locus G SVIVG01028359001) derived from phytozome v7.0 (chr-ID chr7 ; pos 6568993 to 6569965 reverse strand)
cgaatcgaaaccttcggtgcgcattcaaatttaaggtttttctcctcccttttgccttcgtttgctcagtttcggtttcggttttgtctttcaattgtatctttgtctgtaaaactatattctttttttaatctctatggaatagtattggttttacatggtgacacgacggaattgtactggaaagttatacaatttatatatatcatgctgcttcttcttcttttctttttctttttttttttgttggagactgttgtttaatgctttgttttgtgaagcattctcgttgattttcatgtgttcttttggcattcgttggtttgactgtatccattatagttctggttttgtgtttgcactgcattactctgctgttaaaggcctgcaactttggaagtatctttcttgggcttggaaggaaaaaattgcttttgtttgggtgtttttcaaaattttcaagaaacatttctctaaatctccatttgagtatatgattgccagataaggggaaataatgggataaaaattaatcagtctgcgtattggtggtgcatggattaagtatttaaaaagtgcttttctgattttggaggcaaagaaaacagtctgaaaatcagtgataggtaaaaagtaattttctgaaagcaagaaagcaaaaaatttgccttctaacttaataaaaaaatattgcttaaaaacgcttaaaattttattttccctgtaccattgtcatcaatattacccatgtggtcctacatgtgtcttacctgcttgcattgtttcatttacttattttggttagagaaggtagttgtttctcctgccatatttgtgcatagacaatatttatttgtaaataaacatgaccaagaaaggcattcaaaaaaactagtctaatcgattatggcagtgaagaataaatttcatgtctttttcattttggtaggtggctatatttggctgcttcaaa

SEQ ID NO: 98255 - DNA, 443 bp, Vitis vinifera
  Intron number 2 from transcript GSVIVT01028876001 (locus G SVIVG01028876001) derived from phytozome v7.0 (chr-ID chr1 6; pos 17903502 to 17903944)
aggttttcgatcgctgcgatttggtaaaagaacaggtatacaaaaccctagttagctcgcttttgatttctacacttttttatggttgtttttcacggcatcgttgaggatccgaggtttttgatcgtctcaagctcagctctagtgtgaaacatatagaaacagtgaggttttctttgaggattcaaagacttctcatgaagatttacaggagaacatcgatctaaagaggaagaagcggccgcagagattttatttaattttttggatttttaataaattagggttcttgattgacttatgattgcagttttgttgaaggcggcacagaactgaatcaatagatatatacacgtgtgtatatatattaggggaaagggacgaattgttagatgatttgttagggttttaatcaggatctatgaaggtgacaaagggtgctg

SEQ ID NO: 98256 - DNA, 587 bp, Vitis vinifera
  Intron number 1 from transcript GSVIVT01021054001 (locus G SVIVG01021054001) derived from phytozome v7.0 (chr-ID chr5 ; pos 14520247 to 14520833 reverse strand)
attctgtttggatctcttgggttacaggttttcttcatttctcatcctcttttttagttttatttatttttgtctctttttttctgactggtgggactctgtcgcaagtcttcaaagtgaagccaaaacataacatgggttggggttgttttgttttgtttctgcaaaataaaagaaaaacaaaacggaagcagttgttgaattactggaatagagctccaataggtggtgggaatggatgggacatctcccttttcttccaatctgaataagctgagatttcaagttttcgaaactttgacaaggaagacttgcactttaaaatcattcaaacttgttaataggatataccccagtgaagctgacattccatggtggatcaaggccaatgtttttggctaaaaaattactgtttgtttctcctgaaaccatgaaaataagtgagttgatactaggattgttggaactatggaaacaagcatcctattcctacctatggaacaaggcactatcataaatttactgggttgggactttggattgcatttgcaggggagttccaaattggggacaacataaaaccatta

SEQ ID NO: 98257 - DNA, 808 bp, Vitis vinifera
  Intron number 1 from transcript GSVIVT01021663001 (locus G SVIVG01021663001) derived from phytozome v7.0 (chr-ID chr1 0; pos 8920270 to 8921077 reverse strand)
tcctcagttctcttttggaagttagtatcagttaaatttatgctctagcttgtttttaattttgttgttaatcagtgaaactacttgctgtttgatgtttcttgattggtttatttgccagaattggagagttttacaagtttcatttactttaacttgttgtatctgtaaaaatgtttgcttgagcatacaatggtccaagcttgtatgttgaacgtagccttttgaactttgaagcaaagaattggacacttactgggttgctaaacatttatccaaaaaaaaaaccattattatgttgctaaaattcttatgcattatttacacctatcaaaaagagaaaaaccttaagcattatttatgcttattagatggtattttttcttttgctttcaaacttaaattatagtccagtacctggatgaaaagggatttacccgacaaacacacataattccttttagaattatgagtgtgcaaagttgttggtatcctggtcttgattgcttttcagaattctggtcctgataaatctcttatagattctaatggagtcaagaaaaaattggtgaaattggggttgatcctaaattttaggacagcctgtgcttgtcaaccaaaaattttgattttaacaatcttttggaaaattcattctttggttgaactctgctccaaatttctctgctggaaatttcagttcattctttggttcttttaagttttagaaaaactaccttcatttttcccctgaaatttttaatgttcctcaggtattcaaattcctctttactgctttgctagccag

SEQ ID NO: 98258 - DNA, 884 bp, Vitis vinifera
  Intron number 1 from transcript GSVIVT01029797001 (locus G SVIVG01029797001) derived from phytozome v7.0 (chr-ID chr1 2; pos 14897287 to 14898170 reverse strand)
ttctctggttttgagggtttccggtatttctgaaggtgtgtttgccattttctgcccccctcactttcttttctgatatgggttcattgttttgtgttcaattgttcgttttatatggcgttgattactgtagaatcaaactcagaatcgatggggtaataactttgattgattttgactttctgggttctgtttggttgcagagaacttagttgggttaaagtgggtgctgcaagggtcgacaaatcctatttggcaatccctagtgttttgtaattttagtgcgggataaacgaattgataggatttcaattattgggtttaccaggattctagaacttcgattcacattttatctggaaaaattcaatttaatgtacgttgtgttatattttgggagatttgaacaagggacttgtctatagtcttttaagtgaaccctccattgccctgatacgacatttagcaatatttttctgtaattattccattaaaacatgctttataagttgtgaatttctgagcatttttatgtgtcttgcatatgctatcgaaaatttgaagttaaaaccaaattttgactctgaaacttcacaatgattatagaggtataccaaagtcaaaagaaccaagcatcaccaaccttttgagtttgataatagaaaagttcataaataatttgcctcaaagattaatgaacaaaatgcaaaaagaaaaaaaaaaaaaaaaaaaatgaaagagacgaatgtgtgcatcttgtactctggccaccatctgatgtataggcttgactgttctatataatttccttcactctgaagacctactaattgatgttccttatgtttgcaactgatgttttcctcatgtgtgtaaaccaggtg

SEQ ID NO: 98259 - DNA, 708 bp, Vitis vinifera
  Intron number 1 from transcript GSVIVT01028481001 (locus G SVIVG01028481001) derived from phytozome v7.0 (chr-ID chr7 ; pos 8155381 to 8156088 reverse strand)
agccacctccgattggacccaaaagaggcaccaaggtcagtcatcatcgcttcagtttttaggagcttttatatctctgtttgcagcaataaagatgatacaactaatacaaactgacagctgatgtgaattttgtttttgtttttttttttttttaatttttttttaattttatttatttttttgtattcccagtagaagtaaatatcattcatactcacataggatgaaagcaagtgaattatttatcatgtataatataattcatattcaattcaataagagggtgttgaacacttttaagtccactggcaaaaaactagcaagtttgctattagcagtaattctaatattcttccaattttccatttctatttcacaaggcttcacttcaatcaaaattttcattcacttcataaatttctttacatgtagtcctctcctatatactaagccaatttaatgatttagagtaggaatatgggaaaagaaatcgaaattcataagaaagctaagggtattacaaggttgtagcaggctgactgaagttactgattctgagttttgtggagtcctggtttcactagattcaaaattttcttagcaaccaagcataggattaagcacatgcaatgcagggtcaaataacttatatctacctttgactgcacaggtgaagattctaaggaaggaatcctactggtacaa

SEQ ID NO: 98260 - DNA, 528 bp, Vitis vinifera
  Intron number 1 from transcript GSVIVT01024788001 (locus G SVIVG01024788001) derived from phytozome v7.0 (chr-ID chr6 ; pos 6946897 to 6947424 reverse strand)
aaggttagtctttttcaatttagtatcaattatatctgcttcacctatatattttcgggtatatgatcacattgcctgtttgagattcaaaatttgttcgaattttttcttctgtaattggatgcagaatgctacgaactgtgaattttgaacttgtgagacttctgtattgaacttgagaatttatatgagaattcaataaaaagagacatggaagcatttttggttaaattatagatgtgaacctgcattgctgcagacattacagactgatttcgagtcattttttgagcatctaactccatgttatttaagcattcttgtcactactctggggttggcattgtgtttgccattaaagattgtagattggccctagctgtttatttcttcatataaccttgaaattaaagagtagttgctgtttcttggaagagaattgtaaattgtaatcaccctctttatgattggctatagttgatttccttcattttcttgcgcctcgatgtacagggttggaggcagcag

SEQ ID NO: 98261 - DNA, 1061 bp, Vitis vinifera
  Intron number 3 from transcript GSVIVT01027530001 (locus G SVIVG01027530001) derived from phytozome v7.0 (chr-ID chr1 5; pos 15962287 to 15963347)
agatctcttgcgacgaggtctctaaaacggccgaggttagcactcgttaccccagtagactcaagcctttggaatgtgtggttaactctgtgtaaactcgaaaatcatgtattggttgtgtttgggaacatacccaaatttagttttgatttcagtcgtgccttctgttggtgggcttgaattggagtagggctttaatgcaagcgtgttgatggaagaggaatctttttgccttggcacacatattgaaaggggcagcatcatcgatgaaaaggatcaagcctcctacccacatgataaaaattttacccctgtttctagattatagcagagaaaaatgtgattgaaacccttacaaggaaagagattcgcaaaggaatatttttgtatggcaagcttagattggactatagatcaattcaccaccgtatatagattcataaaccagtgcaatatcagctttgtttagcctgtgagctctgttttggtgtttgaatgaaagttggattgatgcagcttcctagaagcataaattcttctaacctctagtagcccctttttttttataatcccaactattccttttaatttatgagttatttctgtttctttgcttgccaccaaggcaccaacacaaatgaaattggttttcttagccactgcctaaccacggagatgaaattatacacatatattttttttatttgtgctgctcgtgaactatgtttactgaaattgcttactggtgttttctagtattgtgttctaaactgggtttatttttagaaatacacatcgatttgaccatcacttttgttcaggaatgagtatttatgtttatgatgcatgtgactgattgtttttaattatattctatcaacttttgaatggattttggagtattagccaagaggttgttattattgtaatttttgttagattgttagagtctgttcttttgagcctgtgttgttattgtttttgtgacaatatgctgtgttctaatagttttgtgcttttatttggatagaattttttggcactctgtgctagtggctatt

SEQ ID NO: 98262 - DNA, 661 bp, Vitis vinifera
  Intron number 1 from transcript GSVIVT01028079001 (locus G SVIVG01028079001) derived from phytozome v7.0 (chr-ID chr7 ; pos 3655945 to 3656605 reverse strand)
ccactcccgtcagtgcttcaaccttcgagaggaaggtaacgtacacgataattagggttctgatccgattgattaaattgatattgttgatcattggatttgtagtgtactattctctaaatctaatgtgtactctggttgcggtggaagcgtcggggaaacgagagattgaaatttttgaactgtaattttttatttttgaggagaacagaggctctacagctttagcgaaatagttttaaactcgaatttacgaatttgaatctctcgtgtttggaaccagagaagtgattcctttattataatgacttaattcgaatccaaaacagcgccaaatccatatttttattttctttttgttctgtttggtgctgtggcttgtgaggacattggaattgaatagcaagtgactgtttgatttttcatgatttgggaccatgaagaacccagaaaacaaatccactgacctaatataactatttgcaactaaaagaacataaagatttagaattttgtttatttttcttatgtttcttgatgaattgggataggcttctgtcgagaataaattgtatggatttgagttgcccatcaggtctggtgctcattttgttgtattttatgtgtgttaatccggttgcagttagaaagtcttcccgcg

SEQ ID NO: 98263 - DNA, 1045 bp, Vitis vinifera
  Intron number 3 from transcript GSVIVT01018943001 (locus G SVIVG01018943001) derived from phytozome v7.0 (chr-ID chr4 ; pos 18502025 to 18503069)
tgctggactgcagcgagtctagtaagctctatttggtatgttctctacaatcttctaacagaaagaaagtaaacaatatcaagtacattttctcctgaatatttttttcatgtgaaagcatcgttactatggttaagtaccttcgcttttcaaacagttttaaaaaagaaacaatacaataaagaaatcaactgatgtactatgctgttagcctcaagaaggggaaggaaaacttacaattgtagatgttttatcaaagctttggcaaggtaatatagtgtcattgcaggattatgattgtcatcttgtacctattacttgaccctctaatttgattctagccttgcatatgatatcctacatctgataagggaaaaagttcctgacattacatatctatgggctcctcttaaccaagtagatgtgttttaaacttgtgaggacctattagaccgaaagtagacaatatttacacgattgggagtaggttcttacaaatggtatgaaagttgatccctaacatgggtatgagaatttgtttggtcttgcaagagatgtttgtcgatttagctttacaattttgtgggatataatgaggatgttgtgtctgtatggggaatgttatgatatcccacatcaaatatgataaaaagttattgatattatatatgtatgaactcctcttaaacatgtacacatctttttaaagttgtgagagcctactgggcctaaagtaaacaatatctatatggttgggagtgggtcattacactgcaagtagttgtttgaagtgaatttcatcccgcattacttgatttatattcttctagatggaacttcatgcaatacatgttctggggaatcttgtaattgctgctgcacccttatatagatcttactcttgagtggaacatttaattgttgtctagaaactatgcgattaatatattttttcattttttaaagaatgcttagctgtcagttgatgttgatagttgtttctgtaatatgttcaggcaatatcaggcactgtaatagtgttgaa

SEQ ID NO: 98264 - DNA, 678 bp, Vitis vinifera
  Intron number 1 from transcript GSVIVT01022402001 (locus G SVIVG01022402001) derived from phytozome v7.0 (chr-ID chr7 ; pos 19729278 to 19729955)
catctgggattgctggcttcactgctgcttactgggtctgttttcttccctcccggtccgatcattagacgtaactattttcataaattttaatttttaagatgattcattcatgcatgctattttttttgtttctaaggaatcatgaattatgagggaaagaaaacgaagagattaaagagaaaaaaaaaaatattaaagaaaggagaaactgtttatattcttttgctcagtgttaattttctaagaaaatcattttgtttccaagaaaattttctcgtagtctgcttttttcttctttgtagattgcaatcttcatgattgaaaatctttccctaataggataaagcaagaataatgttatctgagatagcccaaaatgcggtagtgtcattgtcttagaacttcacgatcatattacatcacattaatagtcttttccacatccattattggtcgtgatcatggtacgtacctttgatcacttactcttgagtcttgatgatacgcatcattagatttttttattttttattttgaaaaaggctttattttgaaaataaaaggaaaaatttcatttcacctggtagtggtatatgataggtctgtgaaggtgatgggggagatggtgtgatgtatacaggtggggccaagatccaaaagggacagggagaggtt

SEQ ID NO: 98265 - DNA, 760 bp, Vitis vinifera
  Intron number 2 from transcript GSVIVT01025336001 (locus G SVIVG01025336001) derived from phytozome v7.0 (chr-ID chr6 ; pos 1896628 to 1897387)
ttgcagagaacaagaacattgctggatttgacaatgtaagttccatactcagatttgaattttatttttattttttagttctataaatgttttagttccaaaatatgtgttttgatctctgtgtaagcttgtttgtgtaatatcacttcgagaatcaaatttggggattgtatgaggaatgatgcaaaacttttgttaaaattctgcaagtagtcatgactgaaaatcatttggtggtatcacaattatttggaggcggctgggccaaatcgaggtcagattaggttggaaaacaattctttgtataaaaaaatgaagagtgtgatgttggatggcagtgatagaattaggcaactatttgccaaatttgtgttgtgtattgaataatggaatcactgtgttcgctgattgtaaccattcaaacgcgcccaaactaaattcataagaaaacttagttgaaaatttctgctgtgaatttagtcacaattccataaaggcaaataataggaaaaagtcactaagttcagttgtgttattgagtaagataagaatttgttgaaatttcagctaaatattagaaaaacttagaatgaaggaaccaagttggaacagtcagatttaagggaaaatttttggtcatagataaaatgcatgtatagaaatgggttttttttccttccttttgttttaatgtttaattcactcattgtgtttttctgattcagccaggaaaaagtctttacacaactgtgagagaact

SEQ ID NO: 98266 - DNA, 544 bp, Vitis vinifera
  Intron number 1 from transcript GSVIVT01029923001 (locus G SVIVG01029923001) derived from phytozome v7.0 (chr-ID chr8 ; pos 1539481 to 1540024 reverse strand)
tcctatagatctacttgttgttgattgaaaattggaaactaatattcaaaagaaacaattgcttaattacaatactgatttcggaatttgaatattttgtggtaattgcgttgagtattgtccaacaaattgtttatcaatgattgaagaatatgaactttccagttctgatcgtcacgaattgaattataatcaaatcgctttgggttgtttaccaatgtcagttattgacgattacacaattcgaacaattttgaattcaccttaaataacaaacgaataaacacattgattcaagaacaattatcaattattaagactcggttttgatctaaagtaataataaagtaataaagtaatgaggtttctttctttttgcttggtcaataactacaaatcctaactatttatttgttggtgagaatcatggcttaatttggattgaatctatttatatatgtgctaatgacattaaagatgaaatacatggctctaacatttttctcactagcttcattatcatctctattccattccaacttaa

SEQ ID NO: 98267 - DNA, 506 bp, Vitis vinifera
  Intron number 1 from transcript GSVIVT01020575001 (locus G SVIVG01020575001) derived from phytozome v7.0 (chr-ID chr1 2; pos 4175232 to 4175737)
ttattagatatttccccactcaggtcactttcctttcccttcatgtttgttagtcctgcatttttatcttcctttttttcctgttgctgatgaaagtgtaaatacatattttttagtatggaaaggaaaaaaagtattcttccacaaattactccccctgaaagcacctaaagctacccactatcaatatttaaattttgatttttcccccttttttgggctgcaagccaagagatgaggttttatatggtagcctttttgatctatcatttagtagaaacatcagacactgagattaacaaagagggttaaatgtggcctttgttacttgtgtgtatgtatatatggtttttctgtttttttatcctctaattattcttcttaaatatatacacacacatatatggtttttctgttcttgtatcatctagttatccttcttaaatatttaagttgttgtatgtaccccaggccctgaacttcgctttcaaggattacttcaagag

SEQ ID NO: 98268 - DNA, 548 bp, Vitis vinifera
  Intron number 1 from transcript GSVIVT01028963001 (locus G SVIVG01028963001) derived from phytozome v7.0 (chr-ID chr1 6; pos 17035184 to 17035731 reverse strand)
caagggctccctgtctctaattggaggacaccgtatgtttgctttcattttcatgttctactatcttaacaaaaccataaagaagaacaaagcaaatatgatcaaacatttggtttcaacagagtcattatgttttgattgaatttcattgcatctacaaccaagcaaatgttgtagactgatgggatttgaagatttctttttttttttgtcaattattttgttagctacagacagattaatatttcattgataacaaaatctataatccttgaacattatgcaatttatttttttaaataaaatctgttttttagttttaatcttatatttaatgtgggagccttccttcaagaaatgtcattttgtaatgttataatgttaggctacctcacagatcatggtttgtatcaggggaagaaaagaaaaatggaaccatatatattcaatcattcaatgtcacatttcatggaaaacaaaaattttgtgatttatgccttgatttttcctgtgaaaacaatatgggataggcaaattcggcatctgga

SEQ ID NO: 98269 - DNA, 976 bp, Vitis vinifera
  Intron number 1 from transcript GSVIVT01020798001 (locus G SVIVG01020798001) derived from phytozome v7.0 (chr-ID chr1 2; pos 1843489 to 1844464)
ccacatcacttcatcatcatcgcctctgtaaaaaggtgcttttcatctccatcatttgtgaaattcccagtttcccagaagagttgagagtcaattcttaaacccattttaattttactgcttaattaatgattttgatcctgaaatggtttttctttctttccttcttttgggggtagaatttttttcatgcataatttttgaagatcttgccttgtccttcctttagggtgttctgggtttttcatttattgcggtgtcttaatgaagttgtgagaaaagggtctgttccaagtcatcttacaccaatgaagaccctaatttttcaaagaaaatattgatttggttctgatatgtcatgggtttgttcctaatttgtgaattttgaacgggccattaacccatcccgcaatcttcattgatgctctcttcttcattatatgtgaaaattcttggttttctgtgattaatgtctctgtatcttcattaaatgggtaagaaatttgcctctactttttttttctttcacttgtgtcaaggatataggtcagttctaagtcgtttgacctgtgagctagacaatctgtaagtcttaaaacaggtgggaaaggggaaattttgatgacacggaccctagttgtcaaagaagtgtttttaaaaaatgtttgggtgctaccatatttagctgggtttcttcccgtatatgaatcttggaggtgtggttactccagtttataatctccattttggtcattctgatagtcattttgtgtagaattatagtccattgaaagacccataactttttttttttctatatttttttaattcagaaatcttcctgtatcatgcttgagacttatgttcggagttcattaatgatatctcttatttttttcattctgaattttcattaaaatctcattagcacctggatctctttccattactgcttctgtttgtgaaggcagggtta

SEQ ID NO: 98270 - DNA, 624 bp, Vitis vinifera
  Intron number 2 from transcript GSVIVT01027705001 (locus G SVIVG01027705001) derived from phytozome v7.0 (chr-ID chr1 5; pos 14070808 to 14071431 reverse strand)
cctctctcaatttgacgataatctcctcttatctggtaactttttctcccaattttgttctttgttgtcaaatttcaatacccatttggctattctgaagatttgtcatcagtggattgtggtcaccattgaggaagtttactgcttttttttttcttgaaatttcgatatgtttcgccattttgaagatgttcggcaatggtgtattgtaattagcttggggaattttgctctttggtcttcatattacagtgttttcttttgctggtttgtccattccttcgcagtcatggctgctttgaagatctttctgtgtaggtattatgtgatttgtaattggcttgaggaagttgagtgttttgtcttcaaatttcaaagtttcgatacaaatttaaggtttcaaagttttttcatgggttgatcgttaatttatgtgaagaaggttgccactttttcttcagattttggtactcattttctgattttgagtttttaattatgggtaaattataatattgttaaggaagtttgttgtgttgtcttcagatttcacttaccctttttgcagtttgattttcttttttggtagattataatttgctcgaggaagtgaagagggttgca

SEQ ID NO: 98271 - DNA, 785 bp, Vitis vinifera
  Intron number 1 from transcript GSVIVT01023517001 (locus G SVIVG01023517001) derived from phytozome v7.0 (chr-ID chr1 4; pos 10545496 to 10546280 reverse strand)
aggggaaagaaaaacaaggaaaccaccacccccaggtaacaattccaaaatctcctcaatttctcgggccctttcaacttctcttcccaaaataaaataaatttaaatctccatttatttgtaatttattaatctttacccatccgttcgtaagatttttttcccttatttacccttccaaaagaaatttgtgctgaaaacccatctaaactatctttttaatagctgtcacatgatggtaatggtttctggaaaaagagaaaatgaaattgatagtaaggaattattagccagtccttaattaaaaggttttgattttttacttctcttctatatgctttggtttttcttgtttttctgaggttagggttttgaattatttggaaaatttattgaaaatttcatccgatgtacccttatccgcatcttgtgtgaattgggtcctttttgttttgatgaatttgttgtgtttgttgtttgatttggttgtgggtttcttgatgattttttaggtaccagtgtcattgtggaaactggttttgggttaaatgggaagtgggatttattcgtcttttttgggtttgtgagtacccttcagaccacttcctgttctagaccatctggttagggttagatctgttgaatctgatatatatttttttccttttatatatttgtagtttattttattttagctcatttacggtttctgctttatgttgtttttatttttgtttttgggggaatttaattttggtggtttctttgacacctggatgtagata

SEQ ID NO: 98272 - DNA, 583 bp, Vitis vinifera
  Intron number 1 from transcript GSVIVT01026261001 (locus G SVIVG01026261001) derived from phytozome v7.0 (chr-ID chr1 0; pos 15101060 to 15101642)
acaaaggttcggaattcaattctttttattgactgtgtttttttacgttacccctgtgtgaatagaattggtgggaattagtagagagttttaggtttacgagtctagacacctagggataatgtctaagatctgaaattaccgattattaattaagtctttatttattttttgacatcaaggaattgctggatgtgtttgatgtgtctttgagttgatcatagctacaatattagttatggtggtttgattgattgaaggggtttactctataattaatcttttaacacttaaaattttttatctttcaagcataaaaaaaaaaaaaagaagaagaagctagaaacacttcttagaatcactaccacacgcactctaagacctgttatttggtgcccattataatatcaaagttttgatactccaaatcaagtgtgagtgtgcccagaaattgttgagtatgaaatgttccatggctaatgtgtttttcttaatcaaatggttttttttattgtaaacaagttatcctcgtgtgaatttacatgagttgtctatggcagaagctggggacaagcgtattcct

SEQ ID NO: 98273 - DNA, 491 bp, Vitis vinifera
  Intron number 2 from transcript GSVIVT01025170001 (locus G SVIVG01025170001) derived from phytozome v7.0 (chr-ID chr6 ; pos 3774493 to 3774983 reverse strand)
ttttctggaacttgcacgaaccagttcgtcgtcaggtttgttttcttcttactcgccattgttactattgcattttcttgtttccttactttatactctgtttggttgcctagaaacagaaagaaagtaaaataaaaaagaaagacaaggaaaaattcattgtcgaagtgtttcattagatatttcccggttcttgataaatgaaaaatgtgaggtaattatatttgactcagctggtttgattttacctttccctgtgtttccttttcttttctttttttggccaaaagaaaggggaaaatgagggtttcgaagttcgttttcttttcctttttctcgtgtttttatggcaaccgaaccgaggatgatcttcttcccactgaaaattattgtaatcttgtgtttaatacactaaataatacccaaaatgaaaaaataaaataaaaatgagaacctgcttttcgtacttacacggttagccaatgtccagt

SEQ ID NO: 98274 - DNA, 661 bp, Vitis vinifera
  Intron number 2 from transcript GSVIVT01024344001 (locus G SVIVG01024344001) derived from phytozome v7.0 (chr-ID chr1 6; pos 1224982 to 1225642)
atgtaacttttctttttcttttttttttctttttccctaacttttcattttcatgaaaagtgagtacatttggctagggcgaattcagaatcagaacttgaaattttttggcaatttcaattattttctgtttgctcagatgaaaatttgggtatttgagtaaattttggagtctgagtttggaaaattttgtgctatttcaattattttctgtttgctcagatgaaaatttgggtatttgagtaaatttttgagtctgagtttggaaaattttgtgctatttcaatgtatttttctattaattgggatggaaattttgggttatttgggtatcaggttgaaattttgtaaaatccgaaacatttttatggtccaaatttatttttggaacaaatttatgaaaaccgacctacttagagactgcagatagaagagccaattttgtaattgcttcacatttggtgatcaaaacacactcaagttcacatttttcctacttgatcacctttacattcctcaattagaagtatttttcactttaagtagctgtttttaatgcctaactaggattatagttgagaactgttctgtattggagtataagaatgagccttgtaaatgctttaagttgatattgactagaggaagcgtctgtgacagg

SEQ ID NO: 98275 - DNA, 746 bp, Vitis vinifera
  Intron number 1 from transcript GSVIVT01025488001 (locus G SVIVG01025488001) derived from phytozome v7.0 (chr-ID chr6 ; pos 387737 to 388482)
ttcactgttggagataaagtacttgccaccaggttttgtttttcctctcttgccatttcaattcattctttcaaaagctataaaatggttcaaaaattgtctaaaattggcttcaaaatgagcataaaaagggatcctttagacaatggagaggaatgaaaagcagaaaagttgtctgggttcaattacttatcagtattctatgaattctgtacgagaattatggacttatataggggtgaagttgctggactaagtaaagaaaatcaagggtgtggtgtgttggtcacaaatttggtctgtccttagagaatttctgggttttcagtgttcaggatgataattggcattagggaagaaatgagcaggggcataccatttaataagatggaacttgtttcttttaagaagcaagaagggagctgaattgagaccataggaatttgggattaaggatttgttgtgtgagctgagaatggcttaggggtgcaaaatttaggtcttgtagctagttctctagatatttcgtcttgtcagaaatttctaaaagctcaaaattatggatacataggctttcatttacgtttcattttcttgatggttttttttttctctgtgttttcttataattatcttcctttttctatttatgcttgtttgtcatggatccatggttgagactgtgattaagaagttgtagaatgcatgcagtgcagtatttgggacggaaatttggcctgctgctg

SEQ ID NO: 98276 - DNA, 885 bp, Vitis vinifera
  Intron number 2 from transcript GSVIVT01027835001 (locus G SVIVG01027835001) derived from phytozome v7.0 (chr-ID chr5 ; pos 8391678 to 8392562)
tacaaactggagaagaagtggctgttaagctggtacgtgaattctttatatgctgaagatttccttattttatttgatggtattgagattgaacgatcaagtgtaatgttgtttacaactcctgtttgatgttatatccaagagaattgttggctggaagcaagttctttaattgtttctagatggttgagataaggttttgttgagtttaattttattcattttagctcgtagcaatatcagaagaaaggaatgatcttcttttggaattgaataagccttgcaaaataatttgtttgtgagcggtttaaaagagcagataaaacatggtagtctataggacccatgaagagatgactagcctatggacatggatggtttgaacctttgacttaaacatattaactatcgttttttttcaaatgtgcattcttaaagagggtattgttaagttagttggtctgttttgatatcatctctgcaatatagatatttttagatgatacccattttaattgcatgctactcctacttttggtgtttatagaagtttcaagtttaataagatttgagctttatccaatgaacaatgttgggtacagcacaaaagaagcagtccttcacttgtagattgcttgtgagttgaactcacactagtttttacttgcagtttatagtataagtttcctcctaagaacagtatcaggctaagcttttgttcagtttgattttgatcatagttttgcttgtttgtcataaaggttgtaaatgcccttggacactaataattctccatggttattttcttttcattccactttactaacttaactctctctcttttctgtaggaacctgtaaagacaaagcaccctcaacttcacta

SEQ ID NO: 98277 - DNA, 441 bp, Vitis vinifera
  Intron number 1 from transcript GSVIVT01019501001 (locus G SVIVG01019501001) derived from phytozome v7.0 (chr-ID chr2 ; pos 1157707 to 1158147)
gtaccagtgtggtggctgtggtgctgttcttcgtggtaatctttctttccctgtactttctttttcctgttgggcgtgtttggttggcgagaaatcaaaggaaaagagaagaaacgttaagtctttccaacaatttatgggtcatacttgaatagcgtattaggatgattgaatgctaagaaaaatctgattttaccctgtgggaaagggcacatccttacgtcaaaaattgttgtacaaaccatcccaatacgctcaaaaatggaaaaagaaaatcatagttaacatgctcaaaagtataaattaatctgcctagagaagggaatgtactaatttattttctcattgtttcttagtagccaaatgggtgttttcagtaatttttaagactttgtattattgttattttatacgatacagcaaagaagaaggcaccttcaa

SEQ ID NO: 98278 - DNA, 750 bp, Vitis vinifera
  Intron number 2 from transcript GSVIVT01021613001 (locus G SVIVG01021613001) derived from phytozome v7.0 (chr-ID chr1 0; pos 8097471 to 8098220 reverse strand)
tggtaagcaaactatctattttagtcaatatttacgaaaatgcatgcatgctggtaaagatgaacgatgtttgggtctattaagtattgttattcagcttggtttcacaaattaaggaaacaattgcgttcaaattcattttgttgaccttaaggcactcttcttcttggagcttctcaatgttttacaattgtaactgttagaaatgttgattatcataagtttggtcatgtaaggatggcattgctattttttctttttctatttccattgtttacttgtattggtgacacatgcacgttaaaaacctattgccaaaaaagattgcatttttctctgcccttaaggtgaaaacactttttctttcttgtatttttttttcttcagcttgcttatttacagtgtctatggtattcaatgttcatgatgtttgagaagtgatcatatgtaaattcccaaaactattgggagttgacagagcatgtggagaagataaagcatgaagattgtttgacttggatgagagttctgtatctccattaggattctcaatactagaggatgcttatttctgtataacatgcatttgatcacatggttgtttctttttgtacatctaggatatgaatccacgtcaaaacattattcttgaccttatttaacctttgtttttctactaatattatgttttctattttttatcttgttgtactagcggttggacctcaggggtcatagagttcgcagtct

SEQ ID NO: 98279 - DNA, 711 bp, Vitis vinifera
  Intron number 1 from transcript GSVIVT01021615001 (locus G SVIVG01021615001) derived from phytozome v7.0 (chr-ID chr1 0; pos 8112895 to 8113605)
tcgctaaggtacctaacagtttttaatgcctgtttggttctcgggaaaatgtaggaagggaaaagaaaagactagaaaagaaatcggtgttttgaacccggatttccattgcttgcttctgcgaagaataaaagccttaactttcctgggccggttgagttttctctttctcggtgatcaaacatggacactataggaagagcaaaaaaacattagaagtttttatcctaggtttttcgtgatttttagaaagtagaaagtctcactgttccgggccaatgcagctgcttggctcatctactggtaattttcatctttttgataactagtgcaacatagaggatttagtttcttttccatggggagaaaatgtgggaaaaggaaagagataaggaatttaggaccttagaaatttcaatttctgcatcttgagagaacagaaacagaaatttccgagtttaatataaccgattctgttaattgacctgagatcttgattttccagaagccaggatggatagaagatacgtgagtcagaattttatgtgttgtcattcttctgaactttctcgttagccaaatagggagtttatttatttattttttcttttggtttgattaatctaattttgttggcctctggttgaatattaacttaccaaccctgaagtttgtatttcatggtttttagttgcttttgactacaggtta

SEQ ID NO: 98280 - DNA, 544 bp, Vitis vinifera
  Intron number 1 from transcript GSVIVT01029984001 (locus G SVIVG01029984001) derived from phytozome v7.0 (chr-ID chr8 ; pos 2706091 to 2706634)
ctgatagtgggagcactcccttgggcctccaaagcgtgtgtagcactctcttctcctccctcttccaacttttctcatttatatatatttgtatttatattttcagtgttcttcgacacttccattttaagtatgtgagttccaatgtttaagctcaagcattgttggtctatcatctaacaatataagctttttgggtttcttgatacaccttattgggtagtataagcttttgaggcatttgatatggtattagagctgggattcttagagatcatgggtttgtggaggtgggatgtcaaagtattattcaatttggtatgcatgattggcacattatctaacaacttaagcttttggatgaaatggtggtagattaagatgagtttataactttggttcttggaagtcatggattctaacttcttgatatgtattcggatatttgattaaaagggtcaaaataatccctattttggaaataacaggtattcttttgtgtttttcaggtctttggagtgttgcatttagtggtttctcttgg

SEQ ID NO: 98281 - DNA, 472 bp, Vitis vinifera
  Intron number 3 from transcript GSVIVT01030144001 (locus G SVIVG01030144001) derived from phytozome v7.0 (chr-ID chr1 2; pos 10249976 to 10250447 reverse strand)
ggcaaagaaggtagttggaaagataagagtggaaggtaaggtcttgatgttgtaagtagactgcatttagagattagcttataactagtgcattcaaagatactttcagctatttggaaggaagggcttggagctagtcttagtccaataagtatatagcaactatgattttgaatctcaatttgtttccttaaatccagttatcagtttccttcacaatcatgtgataattatgaaaatagtaatttatttttcggttgcttgcattgaaattttataaaatataatagttagcaatcttgatcataatgtggagcttgttcttacttctcttcacatactcagaagtgccaccgacctatttgtgtttatcatttgaaaggcaccaattatagttgtgatttgactttggtgatataactgttggattatggcagtgaggaaacttcgaattataccaaggcggaaactt

SEQ ID NO: 98282 - DNA, 338 bp, Vitis vinifera
  Intron number 1 from transcript GSVIVT01027057001 (locus G SVIVG01027057001) derived from phytozome v7.0 (chr-ID chr1 5; pos 18289741 to 18290078 reverse strand)
ttttggtttcggaggaacgggaggtctcagcttaagtgagtcaaatgggagattcagacctttttttctttcctgtgtgtttttttttttgttttttttattttttatttacattttctcaactgtgactttcttttaaattcggccatgagcttgaatttgggattgcattcaatggattaaatgattttttttcctccttttgggcgaaggttcatcaactggagtttgaatttcttcaaaaaaatttaacctctttcttctgataatcgttttctgtgtaaaactttgattgctgaacaggtttaccactggtaaggaaagataaagctttcaaa

SEQ ID NO: 98283 - DNA, 242 bp, Vitis vinifera
  Intron number 2 from transcript GSVIVT01024906001 (locus G SVIVG01024906001) derived from phytozome v7.0 (chr-ID chr6 ; pos 6129647 to 6129888)
aatctcagaagttcgctccggaattggatcatctggttcggtttttcaatctgtagatatatatgtgttggttttgggtgtctttgacgatgcgtacaaatgtggtttttttttttttgtgttttcttctaaaattttggagaattagaatacaaggcaatggttgaaaatgacgcaattattggtttgatttattagtcataccgtgcttaaaattttaggtggacgtgacaaaagtgaag

SEQ ID NO: 98284 - DNA, 623 bp, Vitis vinifera
  Intron number 1 from transcript GSVIVT01025844001 (locus G SVIVG01025844001) derived from phytozome v7.0 (chr-ID chr8 ; pos 11294711 to 11295333)
tgtgcaaccccaaatttccgctacatctctatcaggtaaaacccttttgttcaagatcttctctttgatgttttcattcttttgtttcctgggtgtgatctctgcaaatttgtttatttgttcctttccaaatatccaaccttcagttttgttttgaagtcattttttaatttttgtttttaaattgatttcagaggttactggttcaagtgggtttttttcaaagtggttgttttgtatttttagggatttttttttactggttttgagttcgtaggaaaaggtaatggtgaatctttgttcttttggtccctgtttggggcccgagaaaacagaataatgttacctcaaccgggtgtaacgcaattgttatagcttctttgacatgcgttttgtttttctttgatttggaacgctccgtgattcattttcttttcatttcctgatttttttcttggcaaacaaaaggaaggtagaggtgttatttgtttgtttttttctctgttccttttcctcaagattcaatacatatgcgcaaatcttaacttagtttgtgtgtctaacgccatatcctcttgcatgttgcagaaacctagttttttagtgggaatttcaatccaagt

SEQ ID NO: 98285 - DNA, 567 bp, Vitis vinifera
  Intron number 3 from transcript GSVIVT01021399001 (locus G SVIVG01021399001) derived from phytozome v7.0 (chr-ID chr1 0; pos 4920261 to 4920827)
tgacattttctggagtccttcagcattcttattaggtaagtaacctgcggagcccttttagacatgaatcatactgtttctacaactaaaaaacttttcaaattaatttggaaatgagctggatttcattgctactactgcacttttgactggaaaagtggaaatctgaaaccaatcaaaggatggtctctaagttttcattttgtaactttgagcttggaagactttgagaacttttttttttggttgtcttttcttgttcaccttcaatggcacttgtttccctgtccccaatttttaaacctttcctgtagctggattttcactttttttttttttttctataatgagattatttgtttcatagatattttttaatcaagtttcttaatgtatttatattattcagtatgttaataatattatttaatcattactatattgaactggtttgttgctagttcaatctagtggcttaacaccaagttaagttgtgttttccaagttttcaaactagtattttcaatggcaggttacagtgatccagatccttctaaacaaggtctc

SEQ ID NO: 98286 - DNA, 935 bp, Vitis vinifera
  Intron number 1 from transcript GSVIVT01028273001 (locus G SVIVG01028273001) derived from phytozome v7.0 (chr-ID chr7 ; pos 5172512 to 5173446)
aaaggtgaataatccgcggctcgccattctccaaggtaaggcgttgcttctggaattagatgtctcaatcatgtcggcttgtgttttctatgatgctttctggttaatgcggtggtgtttcgttctttgatctgtttgatttttgctcgatcttcttgaaatagggattagaacttcttgtttcagtttccgcttactttactctagtgttctctaaattctcttgtggaaattagtacggattatttttctaattttgttcccaaatgtttctgagtgcttcttcactgaatgcatgtttctgtggctagtttagtttgctataatgttctgacagttttcttgattggctttatcgctgaatttaaatttaaccatcttctactttagaatcgataaaaggtttccgattatcatcttaaatgaaatgattggacttaatcaacattgttctttgagatgtgatggtatggggaaagaaacacataaatcattctatcttgctatgtattagtgtttttgtagtgtgtgtgcttgggatgaatgaggatgtaggcttaatgtagatggaataggggtgtgggcttaactcagatccatctacgatggtcatcttcatattcatatatgctgctatcaatttcagtttccttcgtcgggtgtcagaaatttagccctggttcaatgttcaaaattggccaaggccattcatttgttggttactagcattatatcatgaaatatgcacatctatcgggagcttgctgttattggattgcacagatcaaaatattctgatagattattgagtttattactcttgcttgtttctgcttattaactatcagaaattggttgctataagttgcaacgatggctaaggatttgttcacactccaggcatccttctgctgggaatcaacattttcattctg

SEQ ID NO: 98287 - DNA, 576 bp, Vitis vinifera
  Intron number 1 from transcript GSVIVT01024939001 (locus G SVIVG01024939001) derived from phytozome v7.0 (chr-ID chr6 ; pos 5877892 to 5878467)
ccagtaaagaaaccctagaagctctctattgtcaggtacgtcgctcacctcaatttccacttctctcgtgattccagttagggcttccatttgtgttcggtttctcgacgtaatctgtttggtttcttagaaatatgaggaaaaggaataataaatttgagttatagtttttaaaagtgtgataaggtcacccctaccgaggaagcagttgttttgagctcagttgagtggaaacaatgacaaatggaagattcaatattttaatttcttaccatctgttcggttgttaagaaagaagggggaaattagagtaagtaatgttgtttttggttatcaaaagaatgaaagctcgattgtagtaagccatgctaggcgcagttgaatggaggtttttgtttcatggaaattggaatcatggatatcaatttattttattttcccaccttttctcagaaaaccatacagggattagttttaaattcaactttgagcttttccattctttgatggtcatttgttggagttgagcagcctaggtaaaaatcattgacgaattatttatgtattaggcacggg

SEQ ID NO: 98288 - DNA, 259 bp, Vitis vinifera
  Intron number 1 from transcript GSVIVT01026433001 (locus G SVIVG01026433001) derived from phytozome v7.0 (chr-ID chr4 ; pos 23649640 to 23649898)
catcttcatactcttgtaagccatttagttgacattacactgctttacagcttcaaacctctaggagatccatgtttgaagttttcttttggttaatttttgaattttgtgcggtgtatatgcttgcttgcccataaatgtttttttttcttcttgaatatattattgtgtcccactctctccatccctacccatgacaacaaaatttgatgtgttctgagcagcttgtgttctatatattctatcctgcactggtagc

SEQ ID NO: 98289 - DNA, 724 bp, Vitis vinifera
  Intron number 1 from transcript GSVIVT01025659001 (locus G SVIVG01025659001) derived from phytozome v7.0 (chr-ID chr8 ; pos 13204545 to 13205268 reverse strand)
actcctcctcctccctcccctcgtctctgccgttggtacttttctcactcttttcctgtcgttctctatttcaatttttcttcatttccaaatcaaatgcttcgatctgctttgcttttggggaatttatgtttcttagttttttacgacttattaatttttaattaaggttattgtttcaaatagggttacttttttcttccgcccaaatgttgtagtacatgtgttttctctccatattcctgaaaaacaaaggtgtttagggtttctattgatgaccccatttatatggctctgcctccctgctttgccgctagtgataaattcagaatttaggccgattctttttcgttacggatgttcattgcccttgggcggcattgtaattgaattctcggtctgcagttttcattatgaaagggtcaagggcaaagagtgtaaaatgttggaggaccactattaatagcttttattcattcattttgacatttcagtagcgaacagagataataaagcacgaggaaacttgtaaccttcatttctataatttaaagctcattgctttgaataaactggtagttattaggatttttattttagtttattgtatttatttatttaaatttagtagttattatgggttgatgattatatcttctagcacttaataacatcttctgcacgtttaggtgacaaacctggcaattctgcagagttgtttgag

SEQ ID NO: 98290 - DNA, 488 bp, Vitis vinifera
  Intron number 2 from transcript GSVIVT01021514001 (locus G SVIVG01021514001) derived from phytozome v7.0 (chr-ID chr1 0; pos 6456391 to 6456878)
ttacagagcttcaggtatgtgtgttttggcctggtcttttttttttttcccctttcaatgaaattattacttgaaatgttgattctctcatgggtctgttgatgtgggtaaaatgggtgaagtgagagtcgcctccccagcctgttttcctgtaaattaaatcttcttttggggtctgttgtaccttttgtataaaggcagtcaaaatacaatctatctctgcaaaaacaaatatttcacaggttccatgaatgtgtttgcagccaactcatgccggccccccacttgtattcaaaattccaaagcctttgttatttgccaatttcatcacacatataagttgttgattctgaaatttttgtgagcatatcatttaactagtttctgattgtgttgaaaccataaatctagcaagatgaccgtgaattaataagtttgttggcatatttgcaggctagagccatcttactgcttgcaagtagagaaat

SEQ ID NO: 98291 - DNA, 756 bp, Vitis vinifera
  Intron number 2 from transcript GSVIVT01026479001 (locus G SVIVG01026479001) derived from phytozome v7.0 (chr-ID chr4 ; pos 22936123 to 22936878)
ctgttgcggtgttctgcaaattccgtaggtcatgttcaaggatcatgatgtttgcctctgtgtaacttgtgcctcttctggactatttgaaaaaagatatataaaagatcttttgagaatgtggaactctcaatccgaaggttgaaatacttgtttttgtgtaacttgttaacttggaccaaactgtttattggtgaaagattgatgtccatagtatatttcattgattagttggggtcggtttgagggagtagctttttgtttcctcttccatttttttttggcgctttttggctgccattgtatacgttgtgtgtactttggtgtgccctttttggcgctttttaatataaatctcatttactgatctttaaaaaaaaaaaaaatgacgtatgcctctctgtggttgggttaaactggaggtgtgttcctgatcttttttgaactccatgtaattgtggctctggtcttgtaatagtaacttttctctgtgaaatgtccctttatctaaccaagtaatgattgctcttttccacaggccatagatcatttttctctgatggttttgaaaatgatattttttagtgaaagaaatttatcaaataaaaaaatgtgaatgattcaatttaggttgtttttagattgtgtgctgcctctgccttttatctctatctttattaatttgatatgaacatggtattttgtctgtttctttttgcagtagctggtgttaagttaaatcttgagcagtggttt

SEQ ID NO: 98292 - DNA, 729 bp, Vitis vinifera
  Intron number 2 from transcript GSVIVT01020598001 (locus G SVIVG01020598001) derived from phytozome v7.0 (chr-ID chr1 2; pos 3945066 to 3945794)
catctctcgccgcggttacggttggcttccagaaggtattttcgtttcacgttttagatctttttgtttgaatgatgatttgtagttcaaatggaaattgatacatttggttttttttttttttttttttgggttttgattggttggagttgctctgatgacgatatttctcttcgtggattttgtttgagatccatttgcatgtgatttttaaaattttccgtatcattcatttattggattctggcagtgttgatttcttttaaagctattcatgtttttggggcaaaattttttccttgggttgaaaaatacattaaaaactctagaaaacaggtggtttctaaatgaatcaattgaaatttaggatctgatgacattcatttccttaatttttttttctccatatgaagactcaaatctttcttcataaaataaacatagtccttaaaaatactcagccacgactatttcttcaccaacctttggctctgttttgcaatattgggtagaatagaacaagtagatagacaatatttggattcagagatctaaagtgaatttcttgatgaatcattttctgacaagttattcactgtgacaactatgtttagatttgtgtgtatgtcctctgtagcaggggttgtcttgtttgcttatgtttgtcataggagatttgctaataagttgcctaaccactgggttttcgtgcttgaattaggtatctag

SEQ ID NO: 98293 - DNA, 369 bp, Vitis vinifera
  Intron number 3 from transcript GSVIVT01028825001 (locus G SVIVG01028825001) derived from phytozome v7.0 (chr-ID chr1 6; pos 18335545 to 18335913 reverse strand)
tcttggtttattacattaaacacataagccaagaggtaatgacctttatttgatattgaaggctgcattaataggttcatttatttgttatccttctgaaaaatgttagactttgggtgggttcttttatttaaatttttggtatttccttcttttgtgaatcagaagtttatattaggtttcaatataaattgatagtgactcaaaagtcttaatatttccaactactcggggcttgtttgccatcagagagggttttcattttctacttctgcttcataagtttgaatgctatgaatcttgctgaggtcaaagtcttctgctgtttatgcagattcaaatatttgagccatttagcattcttggatt

SEQ ID NO: 98294 - DNA, 394 bp, Vitis vinifera
  Intron number 1 from transcript GSVIVT01022921001 (locus G SVIVG01022921001) derived from phytozome v7.0 (chr-ID chr1 2; pos 18024011 to 18024404 reverse strand)
aatagtaagcgaccctcttcttctctttctcatttgttttctagggttcggttggattcttttttttttttgtctggttgcatgttttcccggtggattattattgtttttcttcaaggttttgtttggttgcatgttttcctctgtttttcctgcgattcccaggtaaccgaacgggacatggggaaaatttgtttatgcatgatccagtggaattagggtttaagggtagggtttaagaggagggatttgacttgtgtttttgtttctatatccttttctttccaaattttaattagatttattttccctttctgtttgtgttattcaaaatcctaaaatgtgagattttctttgcctgttgcagaaaaattcactgaaatatccttatcca

SEQ ID NO: 98295 - DNA, 596 bp, Vitis vinifera
  Intron number 2 from transcript GSVIVT01019410001 (locus G SVIVG01019410001) derived from phytozome v7.0 (chr-ID chr2 ; pos 434600 to 435195 reverse strand)
gggttgtaggcaataggttaattctaactcactctacatcctcttcatgttataattacaattgcagccaaataaccagttctgggcagtgtctcagaaccgtgtttgttgatcatcctccatttctgggtgtgtttggaagcaacttcaatgtcatttgcagaagaaataattttcttttattttctattattttttttagagagtcatcatcaccgaccttggagtttaccttctaattgaaaattctaaaaacttgttggttaagcttgtgtattggtttctagattatgtattaaataatagtcagaattccccgtgctattaaacatgtttttaaagcatgcatcaccagcattgggtggaagttaaagcggcaattttggaggttgacatggaagctttcagctgaaattacatgtcctctagacaatgtatatttaaaacttccacatcatttatatctttatttttataccaataattcattctttaattcgtgaagttacttccaaacccaccgtattcatgaactaatcacaaactttgaggtgtttcagtcttcttaaggactgacatttgtttgggaattgtag

SEQ ID NO: 98296 - DNA, 955 bp, Vitis vinifera
  Intron number 2 from transcript GSVIVT01023686001 (locus G SVIVG01023686001) derived from phytozome v7.0 (chr-ID chr1 1; pos 9274848 to 9275802 reverse strand)
ctattccaacaagcttgagaatttgcactagcttagtctaagttaggctcgaacaaaaccaacttagaggaaacataattgaagcttttggtgtatacccaaacttgagttatatggatttgagttacaacaatttgtatggtgagctttctccggaatggggccagtgccatagcttaacaagcctaaaaatctccaacaacaatctttctggtgtcttaccagctcaacttggggaagcaattcagctgcatcaacttgacctctcctcgaatcatctacttgggaaaatccctagagaattgggtaagctaacctcaatgttccatttggcgttaagcgacaaccacctttcaggcaacattccttgggaagtgagaaatcttgttaatcttgagcatcttagcttggcatcaaacaacttaagtggttcaattcccaaacaactgggaaaactttctaaagtattcttcttgaacttgagcaagaatgaatttggggatagcattcctgatgagatcgggaacatacattctcttcaaagtctcgatctcagtcaaaatatgctgaatgggaaaataccaccacagcttgcagaattacaacgcttagaagcattgaatctctcccacaatgaactctttggttccatcccatccacttttgaagatatgttgagtttgacatctgttgatttatcctctaatcacttggagggacctctccccgacatcaaagctttccaggaggctccatttgaggcattcataaacaatgatggtttatgtggcaatgtcactggtatgaagccccgtatcccattcacatgaaagaagaacaataggtctatgattttgattatctccagctccttatttcttctatgcatttccatgggaatttattttaccctgtactagagagtaaggaacagaaaaagcaagtccagtgaaac

SEQ ID NO: 98297 - DNA, 994 bp, Vitis vinifera
  Intron number 3 from transcript GSVIVT01021905001 (locus G SVIVG01021905001) derived from phytozome v7.0 (chr-ID chr1 4; pos 5794400 to 5795393 reverse strand)
ggaaggagttctccagttcagaatcggccagacaggtgatttttaacttctttgctctcaatttgttgcaatttgggatgcatgatttgctttggcatatggttcatcagatcagcatggtgaatgtgcatgtatatccatttgtttatctggattttatagactgtcatgatggattctaacttttaggttttgaggcacttgcattgcactttcagcttgtacagttgccagattctcaatgaaatgttaaatgacagcataaaaagtaaacaactcaggcctccctatgagtttcattttatatatcaagagttcctaaatcaactcagtttgatctttttatttatttactttctaccaagaaagaattttctaattggatgttgaaaacctttgagagtgttttgattcaaaaaaacatagacattggctgtgatctgaattttgaaacaacttgatctaataaatcagggccatcaatggtgcttccaaatcttctttttatttgatagtgcttcgtctgagttgtaataactgccctcaacaattgagtttgttaatgattcatgatttatttgatggtactgtgacagttgttttcttattttgtttcaaatgacatgactggcatgccaaaataaccttttacatgttatatggattgtcactatatggattaacataacttgtactgttctcttgcctatcacatatttggtactgttctcttgcctataaaaaaaaagggctttgtgttcttttattttgctctgaaactctgtgatttgatacgttaaaattttttatatgtgatcacagatgttctcattatggcttaacaaaaaccctttgggtagactagtataattttttcgagtccttggcaattatgtttgctttaaattatgacattcaattgcaaagctaacaatttgttggttttatatcaacattaggtggtgaagctgaaagctttttcaaagtttgagaa

SEQ ID NO: 98298 - DNA, 1017 bp, Vitis vinifera
  Intron number 1 from transcript GSVIVT01021823001 (locus G SVIVG01021823001) derived from phytozome v7.0 (chr-ID chr1 4; pos 6917993 to 6919009)
aggatccgactatttggtctcctttccggatccaggtacattttatggttcccattttttttcttcttctgaatttccaagtttgccctttacttttacacatcacagttgtgctaaaagggagaaaataatctccattatgaatataatcttaatttcacataattattccttttttaattcaaaaagtattttaaaatgacatgaaaataaaaatcgtatgaaaaagacacgtgagtgcatacagttcactggtggggcccagacaatggcccagagccattactgactgtgtcatgttggttattgggcctagatccaactggtccggtcaatcaacagtccttttccaattcaataagtttttagtttcactaatatttttcaatagatattattttttgccgatgactcagcctaaacataattatctgagccgtgacatggggcccatgtttgttgagcatggagtccattcatgtgctttcacaaactcattaaatcgcacatgactccatgtgcaagatttttaatagaatgaactgattgttcctgtgacccttttgaacatactcccacctaaaaaggtttgcgccttatttgttaattatttttttaaatgattttttatttttaaaaataaaaaataaaaaaatatttttgatatgtgacgaccatgacatgtatcatgtgacttggcttccacgaattactcaatcctgacacgggaagatagtgaaaataaataacggggctctttgagtttgataattgaaacgaggtaaatatgatgttttaaaatatagttaaaaatattaaaaatagattcaaaatattttaagttataatatgtttttattttacataacatcatagaacggtttttaaaaattatttttaaaaattgttttagaaaacagtttctaaaaaaaagccctttctctctttgtgttcacttacaggtttctttcccattttgtagataaacgaatttgaaggaggcggcatagccattgg

SEQ ID NO: 98299 - DNA, 965 bp, Vitis vinifera
  Intron number 5 from transcript GSVIVT01019047001 (locus G SVIVG01019047001) derived from phytozome v7.0 (chr-ID chr4 ; pos 17389029 to 17389993)
tctcgtggagtatccatatatagaggagtgatcaggtgaattaatacttcaagaaaatgcaaccaatatctacatttttctcttccaacttcattttctttctgcatttctctcagaagggctcagtggatacaatcaatgtccactaaatatgtacaagaccataattttcatctgatcctatattagtttcttctgaagcagttttgataacatctacattggagataatagcagacaagttaaaaacaaagatttcaatcttagaccctagtttgaagggatccataaaccacacaatgatttctttccccacatctatctacatatatattagccagtggatcaaggtaattaagaaacacatcattgtcattttgaggtgttccagtgctatttcagttggtagacgataatttgatatgcttgagagattgggcaatataggaagaagccctatggatagttcatcaacatgggtcagattatattagactgttagatccatcttcatgtctacaactctttgagtttatttattaatcagtttgttaagttgccgacctcattggccatgttgataacaagatagaaaacctttctaacattttaatctagtgatgtttagctttgtgatttaatttattcttgctcttgatatataatgctttatgaattcaaagttccttactgtgtagagccacacctactctagctgtctctcttacacagttgtatgctgagtttttgtttacctggaatgaccaacaagcatggtcctacaatgtttggttgccatgaattattggtttatatcatcatgtagaaaaagaagtgcggccagtccctgtccatattatgatgctcaattctaacatccacatgtcttaacattttcttatttcaagacattgagagctttgtctattcatttgtaatacaatattgttacagacaccaccagc

SEQ ID NO: 98300 - DNA, 795 bp, Vitis vinifera
  Intron number 1 from transcript GSVIVT01029389001 (locus G SVIVG01029389001) derived from phytozome v7.0 (chr-ID chr1 7; pos 16030878 to 16031672)
ccttctctttccagtttctacccatctctgcaaaggttggtagttcccttcttcttcctactcttttttgagggttttttgacctttttgtgttcttttatatatatagaatgagttatgggcaaattcatgtgaaaaataaaatgttttaagggtaatttttagatgaatttttatgggcaaattcttttatatgaaaattgtatctgtttgtggactttaataattcattagcagaaaataacagggctatatatttccttttttaaattttgagttaagctattgtgggaaattaaataattcattggagaaaaaaaaagaaaaaaaaaaaaaggaagcatctcaagaagatttttctcttttttggcttagcaaaaagagagaaatttagctgagaaaaatcgcctttgttttttttttttttttttttttgttaatatttatttaaaaaaaagcttagataatttggagaaaaagtatagggcaaaatatgtggtcaattaccaatcttttatatgattgagagtgatgtttaactatttagtggattgaaagagaaacacatttatttatttatttatttatttatctttttattgtgaaaattaaataaaaaatttacaaattttatttgattttgttttgagttttcactaatataaaaataaataaataatattttataatacacgtgtgggaattctatgacttttggaagaattttgactaattagtttgatttctaacaatgttttaggggaaggagggatataaattagataagattctgaa

SEQ ID NO: 98301 - DNA, 731 bp, Vitis vinifera
  Intron number 1 from transcript GSVIVT01026978001 (locus G SVIVG01026978001) derived from phytozome v7.0 (chr-ID chr1 5; pos 18873385 to 18874115 reverse strand)
ccgctgtcgcagtacccggctgatcggaggaggaggtgactgaatacgatttgacttcttctgatttggggtttaggccgttttgaaatgtaaaggttttggttgtggtgatattggaaggtttatatggcttggattacggttctagttgtttagagtgaaaaaaaaaaaagaagaaaaaaccaaggatgtcgatctgttctgtgtcatgttggaattggttttgtttctgtgttcccattgatttaactccaacgaagttgctgaattatttgtgaagaattttaactgacagcaaatggctatcagtttttctgtttgccatatgtcagaaatcttatgttctaccttcatcttctctggaatttttcattttccattgaatttttcattttggtgattgaatttataagttgatttagccgttgtctcggtttatagtctggagatgagtttgagacttgaaagttttctcaattgctagttcaggagccagctcccatgtttccaactttgtaacccatattaattttagcttgctttttacattttatcgatcaattttgtggaatttagaacatagattggatgaataaatactcttcttgttaggttatttccaatgacatcatttttgcctcatgatttggaacactgaacagtttaaagaaggaaactgatactctctttgaacagattctcagtaccacgtcagccacgtgattttttcg

SEQ ID NO: 98302 - DNA, 1005 bp, Vitis vinifera
  Intron number 1 from transcript GSVIVT01029662001 (locus G SVIVG01029662001) derived from phytozome v7.0 (chr-ID chr1 2; pos 12663582 to 12664586 reverse strand)
gcctttctgatctcatccgtattttgatccattagacttttagcgaattcagagttaggtggggccctctcattccttagggagtgagaggggtaaggggaaagggtgggtggccccttgcgttaggatgagtccagtgtagtcggatggaacggaagcgcatatcggaaacgaatctggcatctatggaacccacgtgcgaaccttcaaagctcgaagtgaaacgataacatccgaaactttgagttttctatggtaaacttaggcaagtccttatagactacctagttatgacaccttgatgcacgttggtgcattggggtgcactggttgacgcggaaggccagcgtggggccattataataaattgataagttcccataataatacctttctcatcgagaagattgggatctggcttccccgtaaggatatggatagagatgccgattcaaatgcagttagaaaggtttctttgattgattcctaaaccctcgtaaaagcttttttctaaaaaaaaaaatttagaaagaaaggactaaaagaaatctattgagccgagtttcatacaaataagatacaaaagactggacattgttgctacaaagagtaaaggcatcgctttattaaaaagaagagtaccaccacgtgtgcccaataagaagataattattgagtcagagaaccaattagcaagtttgaatttataattaagaagagattccacattttctactatacccattatcattctactaatataatacttgcatggacgtggagcatatatatatatatatatttcataataacatcaatcataactataggtaatccaacctcctttttttattgcttgccatatttccaccctgtctagctttctagagcagagatctagcaacgcattctaggcacagatcattggtattggatgtatcgttaggttgtgccgagtaaaatctgcttcgtttttttccgtttgtagaaaagagatcccttcac

SEQ ID NO: 98303 - DNA, 707 bp, Vitis vinifera
  Intron number 2 from transcript GSVIVT01023902001 (locus G SVIVG01023902001) derived from phytozome v7.0 (chr-ID chr3 ; pos 2582470 to 2583176)
cataacagcttgccagaacctttcctcatctcctggtgagaaaattctctcccttttttcggtttctaatacagtagatagattaagaaggcaccaaaacttatgagaatgcatgatgtttctctttatattctttgattagaatcagaaccatcaaaaaacaattaggataatatcactgtttgattgtatcaaattctagtcatggtttctgggtgtgtgctcaaaaggcatgtctattttctcactttatgtatagagtcaaaaggttttagatctgaaaagtatggtagaattgtttactagttgttaaagtgaatggagaacagttgaaaagcacaaactcaaaagtaacttcccatgagatgctcatgactcatgttctgtattagtcttttcatttcctaatcaactcatgctgaatctcgaaaggtccaaatcactagcaaacaccatgctttcatgcctttctacctgccattaaggttgtgtggtccgggcctttaggggaagaattaaggaaaatccggtgggtttgaattgggcatactggcctccatggctggctgggagttaaggtagcaatggagtcagtcagtccattgttccgggtagtctggatatctccaggactctggtttagatattgttatatactacttcaacatggtttctgatgtggtgctgtatgggaaaatgaaacagga

SEQ ID NO: 98304 - DNA, 764 bp, Vitis vinifera
  Intron number 1 from transcript GSVIVT01025085001 (locus G SVIVG01025085001) derived from phytozome v7.0 (chr-ID chr6 ; pos 4635634 to 4636397)
ttcaaacacagtccagtccaggtatggccactgtaagtttcaatcagattcatatagggagaagtgggaaagcgtttggatttatccatttttcgtacgttaaatttaggtcatggtttttttacacaaattttttggtctgttttgaatatgggtttcctgtgaatcgttcaaactcgatgggtttttgatgattttgtctgacccacctctttttgaatcagtttctttccgaatttaaagccacccagtttttctttttgtatttttggatttttttttacaatttcttttgcttattttttttgtttctgtttcggggaatatgttgataaggattctctttctgtttctgttcatatccatacgagtttagtgtgaaatcaaatcgtgaagcaagattttgatgtacagagaagggtcagggtaacagggtttgatttgggtgatacgggcctgcaattatttgtcacgactttcctttctatttgcttcttttgtttgtttgcatgattcgaatcaatccaaaatccaaaatatcttcttgggttttaaattgtctttgtttgttatttgttgcttttaaattttgacgatgattgtggtttttctttttcatttttcctgtttcctctctgtgtgaatcatgtcaaggtattttgtaaacatttttaaattatggcttttgctcattatgccatcatttatatctggttctgtgttcctcatttctcttattccttttctatgtgtatgcgtgttag

SEQ ID NO: 98305 - DNA, 907 bp, Vitis vinifera
  Intron number 2 from transcript GSVIVT01029183001 (locus G SVIVG01029183001) derived from phytozome v7.0 (chr-ID chr1 1; pos 18818309 to 18819215)
aaaggtatgcagatcttatctacagtaattctattaccttccgattttatctgatccaattactataacggaattgaatactttgaattataattaatttttttaaaaaataatattttggaaaaaatttagctttgaataagtctttgagaagtgtcaacattatggggcgtgaatgaaattggggccttttctatggtttcagtgatcactattttaaaaggaatgaaatttcttttggaaaatgaattattgttagtataatagtgttattcaaattttacttgttaaattaacaaaatattttcttataagtaaatcttattttaggtaaaggggtaggtgggtgggaaattaaccatagaggatcaccccacatgggttgtggttggtgggaagatgtaacaacgttttaataggaaaaaaatggaaaaattgccagcaaatcattttgattttttcccttatttctctatctatgattcaagggtggaatcctttgtacaatgattgtactaagaatacatcgataggaagaaaagcttgcactcaaccttcatcttgcgcaccagcctacctatctctctctctctcggttttattaattaattaattaatttatttatgatgcgtccgaccattcaactcattagaaccaaaatattattattattattattttgtcatattgtccatctaaagcttataatatatgaattttaatcattttgaatgttggcttatttagggaataaaaaatttattgtttatttatttatttatttgttaaaacatcttttaattttcctttttctcatattattaagttcggttgaaaattttaataaattaagctttttttaattaatttttttattgtttattgtttattgtttaggttatctga

SEQ ID NO: 98306 - DNA, 490 bp, Vitis vinifera
  Intron number 1 from transcript GSVIVT01024786001 (locus G SVIVG01024786001) derived from phytozome v7.0 (chr-ID chr6 ; pos 6952684 to 6953173)
ctctcaataacctgtttcaggtgctttttcaaacctatttctgttaatttttttccttggtccgtttggctgcagggaaaacagtgggaaatgaagcataataacaaaaatttgaggaattaaaacaaaaaccctccactgaacccaccctactggttgtattcataattatttttttctttacttcctccattcttctcagaaaccaaacataggtcgtgttagtacagaattgaagtcttggagttcccaattccactgttttattgctttatataccaagaattcatactgaattgaaattgcatgaacccaaaattttagacagatgaaatgaacagtaaatgagatattttcttactgccacaaaatcaaaattctcaatcaaatttgtattagcttgtccttattcgtttcagtatgattttacatggttctaacaaatgcatggtactttaggagaaggacatattcactagagcaaagctga

SEQ ID NO: 98307 - DNA, 354 bp, Vitis vinifera
  Intron number 2 from transcript GSVIVT01022661001 (locus G SVIVG01022661001) derived from phytozome v7.0 (chr-ID chr2 ; pos 14281206 to 14281559 reverse strand)
attagacttcataagctgttgggaaacaggcaagtttatttattaatttcctattacatttagtatagccactgttagattggtaatagagatacaagtttggattgaatcctgagaaaatacgaggaaaatgaaagaaaaaaattgaaggaaaataatcaattaagctttttcacttgcaaagaaaaaagaattgtacctaccttcccttaatttttttccttgtctgatccttagcccaaaccaagttcttgagctgatggttaaagaaacaatacccccatgaattagaaactcaaataagatcattttaattcaacactttaaaaaaaaattgtagctatgtttttctag

SEQ ID NO: 98308 - DNA, 1028 bp, Vitis vinifera
  Intron number 2 from transcript GSVIVT01025409001 (locus G SVIVG01025409001) derived from phytozome v7.0 (chr-ID chr6 ; pos 1006887 to 1007914)
gaagttccagcttcacagacaatattcgtatttgggtatgcactatatctatctatctatatatcgttttcagatgatattggtatttgggtatgcactatatatgtcattttttggttgcatctatgattttctttttgtttttctcttttattctgaaacaaaggtcttgtaattatagtctccttcttggtttgatgtcaccctttacctatcattgttggtttcattcatgtgtgtgtgtgtatatatatccatgtattgttttgaaaaaatagaatagctaaaaagattgttattggtttgatttgagtagggtgaggatgagatgtggttatgatcttctgtcaaacagctgaatattgcggatggacctatgtttttcttctttttaagctagaatgaagctattctgattatacttttcttcttggtttgatttgagtaggttattgatatcaaaataagcgatattatcattacgtggttacatattgttctttggttgcatttatgattctattgaagggaaaacttggtgttataatcaatcactcatttttgggttgatttcactagggtagactcacaggatagataaataatctatcattgttgttcttcttcatgtaggctatatctatggtctagatgtttggatgctgatgcttcctctttgttttatttctttaattatataggatcccaattatttgttatttttttatagtcttttagcacctttgtatatactcccagtgtagttggggtttgcccccttattttttggaaaaggtgcttgctaatatatgctttgtttgcctatgaggggggaaaaaaagaaaaaaagatcattgccttgttggtttctaaaactttatcttgggcaattgactcaattcctatccccttggtgatgcacttccattccaatacatatgtgctccttttataactggtgatgtttatgtttgtttaatctggcttgtcaaaattgtaattaggtttcattgcttaatagggttgaa

SEQ ID NO: 98309 - DNA, 1004 bp, Vitis vinifera
  Intron number 2 from transcript GSVIVT01024465001 (locus G SVIVG01024465001) derived from phytozome v7.0 (chr-ID chr1 6; pos 2982820 to 2983823 reverse strand)
gaatcattcatccttgttttcatcctgagggcctggtaattttcgtatctgtgttttaagtttttgtagtctgtttggtcggcgatataatacgggaaaataaaagaaaatagaataagaattaatctttttaatagattgaagtgggattgacattttggaaattaatgcggtaatgggtttcattttgattcggatgctccttttggttgctgaggaaatgcgggaaaagaaaagaaagtggaacagaatatatatattttaaaatttttatgtggttgctggagtctcaaatactctgtttggttgctgagaaaagacaaggaaaggaaaagaaagtagaatggaaagttgtgcatttagggccgtggtttgatatgaaaactccttttggttgctgagaaaaaacagaaactgaaaagaaagtagaacagaaaatggctttacttctaatttttcttacaaagttttttagtaattccattttaggttgatgctagtgattttgatatgaacactctgtttcattgctgatgaaccaaatggagcatttctttctttaattttgctttacctttgttcatcatattacttccttttagtgcattaccctccatttgtttggcaagacagaaaatggaaaacgagaggaacattgatttcaggaaaaatggtctgtccacatcaacttagatgaataatgtattaatcttagttgagaaactttcttctatcttgggtataaaaaattaaatagatgcatgatcaaactttatttctttacatttaacttgtacattacatttttcaggcaaaaaatcaataaaaaaaaaaacgaagggctgcttttgtgaaaaaaaaaaaaaaatcctaattttcttttttacttcctacacttttttaggtatcaaatggagcaataatggcttaaataatttttcttattatattttgtttattttataacatgatctctgtgcagcctgctccgaagacatatacag

SEQ ID NO: 98310 - DNA, 477 bp, Vitis vinifera
  Intron number 1 from transcript GSVIVT01030297001 (locus G SVIVG01030297001) derived from phytozome v7.0 (chr-ID chr8 ; pos 9323458 to 9323934)
attgtgagtttttcaatgtagtttcttgtaaattttatgcgttagtgttgcatatttccaactgtgggctatgaggtatgattaatggatagaggtagagtttttctctgagttccttttgattctaagaaaatggttcttttatcttgcatttatgtgtcaatgcctactggtttcatgctttgaacttctgttattgttttgaaaattctgaagggaagtcggttggtcaaactttggattccaatttgagtgaatgaacagagtttctctttttgagttagcacaatttcatcatgccatgtcttcttgttttcctttgccatgggcttcttccaactaaaacacttgcttagtattggcaccttttatacatgtggtggaatagtaaattgcaggtttcaacctgttttttggcgttgttttattttgttatcttgtttaatgttgatatcttgttttattgttatagttata

SEQ ID NO: 98311 - DNA, 899 bp, Vitis vinifera
  Intron number 1 from transcript GSVIVT01023714001 (locus G SVIVG01023714001) derived from phytozome v7.0 (chr-ID chr1 1; pos 9882458 to 9883356)
tctcggcataatccggccggccatcaacctgtctggtacagccatttgctagtttcttttctctcatttctttcggagatgattcctgcatttgtttttgttcttacattaattttgtgtatgaatgtgagtggtttggaattgttactcgatcacagtaatgcgatgattgtgaatatagttttgagccagcatttttatgtgtatgtgtatgtgtatgaatgcgggaattgaaagaatgtgagaattgtgacaatcaaatttaaatttgaatgcgagggctaatctaagaaggacggggatggaaaatcccaaaataaaggaaaatggtttttttttccctcattctatctcttttttctttttcttttattttttcatagtgaataagttctccaaaggaaaaaaatggtgtgccttgtaattttttcagaaatatcaggggcattcatgcattgtaagtgatttggaactgttattgagagagagagagagattttctgatatagcctcttaaaaatgtgagaattgtgacagttaagcataaatttgagagaagagcttaattggaaaaataccaaattggagggaattggtaaaattaggctaatgagctctcaaaataacagaatagcgtgaactgtaatttttttggaaatacgaggggtgtttatgcatgaattttgtcagagtcctcacatagaatgtacctttatacattccatggaaagtacaatttggaaccattagattttggtgttaacttatcgacaaatgtttgagatcatgtggtagtcaaaataatatataacacagtgaatagtaaggatgacattgatttacaatgtatattactccccaactttcaggtcgtttggaataacttcattggggtttag

SEQ ID NO: 98312 - DNA, 441 bp, Vitis vinifera
  Intron number 3 from transcript GSVIVT01023714001 (locus G SVIVG01023714001) derived from phytozome v7.0 (chr-ID chr1 1; pos 9883600 to 9884040)
aagttttggcaaaggagaagcatataagaagtaaggatttcttttcaatatgcaatttggagacatctttctctttgtgtttttagcatagatgttttgttggactgtatccccaagtctgagaattcaagttggcctctaatttggggaaattctgttattttgtttgcctagtttgaaaggtctttgactcaatgaataattatagaacctaaaaaacaaaagttgaatttatggtgaaattgacagggatgaggtactcaaaattctaatctttttgatttggaactttttggataacctcttacataatttgtctcaaatgttgcctctagtgtgtcaattttctctggttgagtttcaagtaacccttttaagttctaaaacattgttcttgttttttcagctatctttggtgcactttcatcctcaacacctagg

SEQ ID NO: 98313 - DNA, 965 bp, Vitis vinifera
  Intron number 3 from transcript GSVIVT01029648001 (locus G SVIVG01029648001) derived from phytozome v7.0 (chr-ID chr9 ; pos 20237450 to 20238414)
tgagaaagattttgcagctcttgcgcttgagacaggttagatgtcaaaccactgcatctggaaatgagaaataaatggcctttataaatctaaaaccatgctttgtgcttgacagcgttaagtttcttctcatatcttatatagatattccttttcaaaggatatagtggggtagggaattggggttgaacaccagggtgccctttttaggagtagtattgctagttcttgcattgttaatcagaattgttttcttactgtatcagatcatatatatatatatatatatatatatatatgtatgtatgtatgtatatatgtatgtatatttgtttcacctcagaatctgatgcttataccttagcactgcagctgtgatgaaaactttgggcagatagaaattggtattatctgtattttttctacgcttttgatagtagactctgacagtagtggcagtatttaccagctagctgtgcccaggtacaatgcatgatactgtaccatgttgcttctgagataggttatggaactgtggcccattagcattcatatcatgtccataaaacacacttgacactcaaatggggaagacaaactacaatttccattaaccaaaataaattgtctaatgagagcaaataatctagattgaaacgttgaaaatcaatgcctaactatggtactcaagaagctgaattaaatgtatcgaggatcaaatatcccaaacttgtattcttgatgctattttggatggtgaatcattagttcatctaacaaactgcttccttagtgattgaacattgttagttttatgtcaaatggattagttatgcatcatcaaggaggatataatgtctcttatcatgagcttactaatctaagcaagctatcccattagaaaaatggagtgttctttgatgacataagatcttctcattcacttctttgaatacagatattca

SEQ ID NO: 98314 - DNA, 782 bp, Vitis vinifera
  Intron number 1 from transcript GSVIVT01026722001 (locus G SVIVG01026722001) derived from phytozome v7.0 (chr-ID chr1 5; pos 5592555 to 5593336)
agaagaccaagaagtcctccagtgagtcttagtttaagtgattgcttcttacttgttcgtttttcctatgttttcctcacttgaactactactagctatcatatgaattattaagtggacaggagtctgaatggtctttatcttagtactacagtatgaattccttttagagcagtatctaagttatgaaaatattagtttgttgtggtttctttgatgttttgacttttttttatgctaccatgtgtgaaatttttttatcagtgttgatttccaaatagatggcaggagtatcataagtgtaattggtgctcttttcatttttggagataacctcttggtggggttttaagcatcttgtgcgtttgaatgaatccttattcttagcgggtttcacaatatttatggaagtgttgagttgaagtgctttcttgagcttgggcttggatatatcacattgatatttttaggatttaaagcatatcagcattcaagttgaagttctagtttaacttatttgttgtaaacattttaaaacctactttcatatataggtgcaaatttatgaataggaactaacaagtttgatcaaatttactttgtatccttaaagactaaagctaccaatcctttggatgaatgattttgttttatttctttgtgctctgatgcataatatgttgcttgttggtatataaaaaataataataatttcattccacttattggtcacgtctattgttacagtccagaggcttgatatcttaggtcgtttaggcggg

SEQ ID NO: 98315 - DNA, 1048 bp, Vitis vinifera
  Intron number 2 from transcript GSVIVT01026722001 (locus G SVIVG01026722001) derived from phytozome v7.0 (chr-ID chr1 5; pos 5593350 to 5594397)
tgctggctcctccaaaggagcatttagttgagcaggcaagtatagttcctttttctttttcgtttttccctgattccttctctttgattgtttattttgtatatggaatttcaatggtttcctgcaatttaatttcagtgcacattatattccttaccctaatccttagccatgacatgcaccttaaaaatacaatggtatggtccagttgaacagtgactcgcagctttagtctgtcattttttttttcttgataggtgaaaataaaaaggaatttggttggttatatttccttttgtaactaggatactcttcacttgccttttgatgcataaatatagtagtaaagtctccatatgcatgtagtgctcaaccgtggcagggttaatcaaattcattgaaaaggagactgaaaatctgatgagagtgaaccatatggaaacgatactgcattttcaagtttactctcttagagattatgggcattggtgatatttttaatgctttgaataattttatacatcttctaaccatatttagcttaaaaggtctgtgaaaaaaaatatttagcttaaaagaaattctacatttttgggtttttagagcatataacagtttctaatacaattgattcagtttaattagcctatataatttgcttttaagaatgttttgttagcagccttggttgacatactttatcacacaatatgaagttttctaaagttcattctgttctttagatggggagagaatgaaaattaatatatatggaaaaaaaaaaaagatgaagcttctgttttgtgcataattttgattggggtgtattatggtgattttgcacaggcatggggtggggtggggggagggggaggggggtttgttgatgcttattaagtgcatattgtctgaaaaaactaagaatgtattgatgtttatttgttttatttattacttcaagctgaactaactcgatatttactaaatttaatacccaacacactttgttattcatcacatgtatatgcagtatttccatccagataat

SEQ ID NO: 98316 - DNA, 677 bp, Vitis vinifera
  Intron number 1 from transcript GSVIVT01019542001 (locus G SVIVG01019542001) derived from phytozome v7.0 (chr-ID chr2 ; pos 1470708 to 1471384 reverse strand)
cgttcgagcttcgatcaaggtaccttctgtattcaaaattgattcgtgccgccaaccgcatcggagaaaccttcggagatgctgttagcatcattctttcaaaattgagatgaattttggactttgaactgttttatttaatgaatcactaatgctgaatcatactgagtagttcgatgttcacgccattatgcctatttgaagaagcaattaggagaattccttcatgtgattttgcaatttccttacccttccgattttgcaactatttactaatcaggctgtgactctatagtggaaccaattcgtgaaatccatttgtgatatgaaacatttttcttgattgtgatgtgtctatgttctaagaaatctataggttttttgtaatttatccatttttgttgttgcaggtgttatatggggtttttacataattgtattgtaagacttaatagatttcatattttgattttgtccattgctgctgttgttagttagctattacttttttatttgaatgtattgtaagaaagtaaaagaattcatgtttagattatgtccgttgctgttgttgaaagttaactgctcttgtaacatatatggcatattgatgtgctgacaccgttgcggattaatgcatgcacagttgctagtggaagtagtgccctcattgagag

SEQ ID NO: 98317 - DNA, 863 bp, Vitis vinifera
  Intron number 1 from transcript GSVIVT01020534001 (locus G SVIVG01020534001) derived from phytozome v7.0 (chr-ID chr1 2; pos 4733086 to 4733948 reverse strand)
tcagaactttcaaacgatataaccacgctcttgaggtttccactctgttactactcttctctttgctttcaatttcacctcttttctgaattttgtttcatgcctctgttttgtgtctcggcttcatttcttgatttcatttgacctctttagcttcttaaatgctttgtgtcacttattttgtttttccgttttaaaattgttacatttcaatgaaaattttctgactcggaacactcatttgttgaaatgctaagcgtacgtgcatagaaattcaatctatagaatagagtgagatattatttcagtctattaatcaattatatgtttaaaaataatcaatatattaatctcaattgatagtaagaatgttgttttatttttctttttgaattcaaatggaatttgaaattctctgtttggatgttgatagccatcttaggctctgtttggttttcaaaaactgttgggggaaagaaaagttcaagttcgggagtcaataattttttctccatttttttccccaatgacaatactatagaaactaggaggacatttatgcattttgaaacagacccttttaagttatttgcatttgattgcaaaattaagtagtgtatttggaacttttggaactttttttttttttttccttaatcttattgcttctgagatccaaacagagccttagcatacaattcatttgttttttattacaaaattaagcagactactgcaaaatttgtgaagttttttgaaaaacgatcatcatcttaaagtattctcatattgataaaaaattatcttcataatcttcatactgctgccccctgaatttagtttatcattcttataccagatat

SEQ ID NO: 98318 - DNA, 883 bp, Vitis vinifera
  Intron number 1 from transcript GSVIVT01024422001 (locus G SVIVG01024422001) derived from phytozome v7.0 (chr-ID chr1 6; pos 2379697 to 2380579)
ggattttttgtggcctaaggcggaggagctgcctggtatgtggtggtgcagttcttgaattgttttcggattttttaggttcattcccattctttattcatggtattctcacgtcagcacataaatattgtttgtttctcgggaatttcggataaatggtttaaaacccaaaattagggctgaggtgcagtttaatttttggaacggttaaagtgatgtgaacaatggaagggtgttccaaattggcacaaagccacaaaatgattagaactagatgactatgtttggttcccggaactcatcaaaaaaaaaaaaaaaaaaattctggttctggaaaattggagggaaataggagggaaactaaataaaaccgaaaatcgaaggaaagaaaaaaatgaagtacaataaaaaataaatttaaatttaataaaatatctttatatgttatatcaaactgatttggcttatttgaactattatatatcaagattaaataatttgaaaatacttaagtttgtaactaattttgaatatatttgattttcttttgaattttccatagtaaaatcatttttcttaatttttttttccctttaacttaatgcattcttcgaaccaaacataatagaagcttgaaatgaaaacaacacatgagttaattctaggaatgccacgagtttgaagcccattctacatggcatgattacaaatcttgtagatttaaatgccatcctgtgaacagatgtagctacccatcattctaggaggcaacataagtggattaaatgggtcgtaatgattttattttttttctttagactcatataccttgtacttacaaattgatggccttcataaatgcgtgcaggttctctcatactgg

SEQ ID NO: 98319 - DNA, 926 bp, Vitis vinifera
  Intron number 1 from transcript GSVIVT01025365001 (locus G SVIVG01025365001) derived from phytozome v7.0 (chr-ID chr6 ; pos 1429590 to 1430515)
attgctttgtgaatgtgagtacaaacgacactctgtttgtttgagaaatcaaatatgaaaaaacagtgttctcgaccatacaaaagtttttaaagttttttttatatttttaataatattttctaaaaaaaataactaagaacatttaaaatttagtctataaaacaatatgtttttaaaacaaattctcaaaaaatttgttttctatattttccaaaccatttttaagttaaagattacaaacttgttttcaaaaacaattttaagacaacacatgtagttgttccaaatactttctctttgaaaatggtaaatatttaaataattcttagcatatgtgattttttagtcttattctccctgttttatgccagtgaaaccctttgaccatgtttggttagtggaaaatttaaagaaaaatgcaagaaaaaagaaaataaataggaaaaataaaataaaaaataggtttaaagttaataaattatttttatttatttttttgaactcattttacttattttattgtgagattaaataatttgaaaatgtataagtttctaactaattttaattatattttatattcttcgatttttttcttaagacaatcaaatatgagaaaatttatttcttttgggttttttttctttcattagcatttttctggaacaaaacataacctgcacaaaaaatacttgagattatcttaaatttgtgctcaaaaatcactcccaaaaaattcttttgaattcaaaatttgggtttgagattcatttgttgaactaccaacttgatttgggttcagcagagataaatagaacctcttgtaaaactactaagatttgatattatgttaaattaccaactttcctaaggatttggattcattatacatcctcgtcataattttcctttctagggttgcg

SEQ ID NO: 98320 - DNA, 252 bp, Vitis vinifera
  Intron number 1 from transcript GSVIVT01020482001 (locus G SVIVG01020482001) derived from phytozome v7.0 (chr-ID chr1 9; pos 18722341 to 18722592 reverse strand)
tctcctccgaccccgacccccgattcctcgaccgggttattctctgataatcctatgcttttgcctgatattcaactgcccaaacttcttctgacttttcaattttcatggaatcaattgatttgattgtttttttatcagctaactattattcagcagagaaacttgtttggaaatttcaattttcgctgaaatatgctgattgtatgtttttttttttttttttatcagcaaaaggcgctggaagctgca

SEQ ID NO: 98321 - DNA, 1026 bp, Vitis vinifera
  Intron number 1 from transcript GSVIVT01027909001 (locus G SVIVG01027909001) derived from phytozome v7.0 (chr-ID chr5 ; pos 9251525 to 9252550 reverse strand)
tgtgtgggttttggctcctggatccggctcttgaggtaagataaagttgtgggtatgtttttattttatttgtttttgtgttcttttaataaaagcttgctgcttttttgttgggtgtttgtttattaatgtttttttagcactttgtgtggattgattgattgtaatcctaattttctgtgcttcttcttcttcttcttcttcttttttttttttctgggttttttggtttaattcgttcgagggttttgtttaaaggtggtaaggagcagattatataagcctataaacatgtattcaaagctggttggattgaggaaagctgaacttctgaacttctgctgtgtgattagatgtttagtttgtgacatgactgattttctcgaatatctatgtaacttctgctctgtgggatggttgattttgtttgaccttgattgaatttttaaactctttttttggggtgtatttctatagattgattccttcgttttcaagtttccttgttcttttgtcaatggtagaaggatataaatactgagattatcataatccttgaaaaattccaagtttctcataatctacgtatgtcagttgaattgtgagcttcctattggattttgttctcatacagaatagtgcaatctgagtactgtatctctgcggggaatcacatcttctgttttctttggtttgatggatttgcccctttttactaccttttatttttgcttttgatgtccatctcacaaagttaagaaaagaaagaaaagaattccttcattatatgttcaaagttaataattgaacagaccacaccaactttcaggttttgtcttgctttttgaaagcctatcttccccatcttgatccatgagtaaatttaataaattttagtttctttcttcaatttttatggaatatggtatacccattgagattcttgttcttaaatgtatgtctgcttagctttgtccctatagaatatattaattctcactgttcactttgctttacaggttactc

SEQ ID NO: 98322 - DNA, 708 bp, Vitis vinifera
  Intron number 2 from transcript GSVIVT01027968001 (locus G SVIVG01027968001) derived from phytozome v7.0 (chr-ID chr7 ; pos 2875957 to 2876664)
tacacggttggtcggttatgaatctcattgcatatcttaatattacacttcatgttgatccgagatatgatttgtccttttcctctggaatatttctgagtttgtcctgttttccatactgaatttgctcttgcatagttgtccaattattctgttgttattttcaaactcatttttcagtgttcaaattcatgctttggtaagatattgtgcataaaatgcagcatttcgattacggagacagattggaatggtgtcattaggtgggatctgaaagatgatcttcacttgaatatggaacagaaaaagaaaatgctgactgcaaatgtcatttaaacggaatggaatcgtttggaattttatgtacaacatagtgtgatgactgtggaagtatgaaatgtccaagcacgcctttaatgtaatcccatttcttggggcattctttctcgaattgtttgattgtgattttaatggaatattgctaaaagtgaatgagggcctggccctttaataatcctcgctgttatgattcggacagcttcttattgagcaacggtgataactctttatatgtatattgatatatatacaccttctatgtttgatataagttaatatctctgcaatggatctgctattgacagtttaaatgcatgatttcctacattgacaggtatactggttcagcttccattgcctaagcatata

SEQ ID NO: 98323 - DNA, 701 bp, Vitis vinifera
  Intron number 1 from transcript GSVIVT01027921001 (locus G SVIVG01027921001) derived from phytozome v7.0 (chr-ID chr5 ; pos 9459361 to 9460061)
gtttctcaagaggttggatctgctactgctgccaggttagatttctcatttctccctcacgacactcaatattttatcgtccttgcttctgcaagaatttggaaacttggctctgaagtgtgctgaggttgttgcataagagcttgtattccaaggttgcaaataataataaataaaaaaatctaaacttcaaaattttatccctctattattttcctaccttttatctgctaccaaatggtgactattttttcttcttgcctacttgtttgatgattttcttaaactgttagtttggtgtttgtatttcctttccctggtctttctgattcggccctgtctctgcctttatttcttttttctctctgtgttaataggttttcctgatcttgatcaagtgatgaagctgtgtttttattggtatcagtatctttatttggccatccagagttttttctttttaatctgtataaagagcaagaaaattttcgcttattactccattaattgttaatgggttttttaagatttctttaattttctgtgggttgtttcgattttattggttgtcccagtaattattgaaatgctttgagaattgagatatggcttaccctggtcactgttcttcagtttaacccctcaaactgagttattattcactagtgtaatttgttttgtgggagcagtcaggttgtggg

SEQ ID NO: 98324 - DNA, 624 bp, Vitis vinifera
  Intron number 1 from transcript GSVIVT01020090001 (locus G SVIVG01020090001) derived from phytozome v7.0 (chr-ID chr1 ; pos 10418701 to 10419324)
atcaagatttcccggactgtcattcgtgaatctgggtatataattctttcttctttttttcttttttaattatttgttattagttaatcatgatcattttttttattttttatttctcaaatccgaattatttgcttttggaaatgggtttttgggcttgtgatattaaatctgatcatcttgttggatgagtacgaaaataagggagaacaggcaaaaggcataataagggttttttcagttttgaaagccagaattgtattagagactcagtattgaggaattaaatggttggcaattgctccaaatatgccaagaaaacgttttggtggatgccattgtagatggcacttgcgtttgggaggttttcttgatgacagggcctcatccttgtagtcagggaggagctcttggggaaaaactttagtcgaagttgtgggcaatttcttctgctttgctcctcaatagtctcttttgataaatgcagtgttgtttaacattttgattacattacatcagtgtttcttcaacgaggattaattgatgaatttagtcctttggttttatatggtatgaactcttattgcaggaaggccaggattgttgaggaaaccctgctaataa

SEQ ID NO: 98325 - DNA, 308 bp, Vitis vinifera
  Intron number 1 from transcript GSVIVT01023985001 (locus G SVIVG01023985001) derived from phytozome v7.0 (chr-ID chr3 ; pos 1915788 to 1916095)
agtgtaagtagtgcttcctgtggtggaactttcaggtagtgcacctattttgttcgacattttttttaattttttagatgttgcttgttatttgattatttaatgtttatttattgtgatgctcaaatcagtttcaggttgcactattatgatctactatattttgtttgttttatagaaaactactttttagctccttgtcaccttcttttcccttatttttattctcatgattattattattaatattattattattatttttcttgattgcaggcgacaattggaaagcataattcttcacaacc

SEQ ID NO: 98326 - DNA, 731 bp, Vitis vinifera
  Intron number 1 from transcript GSVIVT01023699001 (locus G SVIVG01023699001) derived from phytozome v7.0 (chr-ID chr1 1; pos 9538919 to 9539649)
tccggcgcttctagattggtactctcgtgtttccttgatcgcactttactgtgattgaagcctaatttgtggtctatagtaccattgattttggaatatttgccattttccatggtaatatatcccacaaggatggtgctctcttcttaggcactttacatttctacacgtctaaagccattgaatttaggtccaattttagaaagactatggccgcagcagtttctgcagtggttctttgaaaattttattgttaactataccggatgaattattctccaataaatgatatttccaaaagggaatattgaattgatgataatgagagaaacatcagaagacctactattacaagtattgttattttttttactggtttttttggcacatgaggtggtctgagaaaacacccacatgtgtatgtagagtgagaagtattttgaatataagatggtccaagaaatgacctatatgagtatgtggggtgttaagtattttgaatatactaagatacagttggtagtaactgatttctttttctgggaaatgcaaagatatgaagccaaaccgaaggagtttctttgtgctttcgttgccttttattttctaagtccccttgagtaaaaaatgagttcttagtctgacactggctttgcaatttttttatttgatgttttcctactgaaaatgacaatataatgctgcacaatttgttttaattctgtttcagg

SEQ ID NO: 98327 - DNA, 629 bp, Vitis vinifera
  Intron number 1 from transcript GSVIVT01024578001 (locus G SVIVG01024578001) derived from phytozome v7.0 (chr-ID chr6 ; pos 8668216 to 8668844 reverse strand)
gtagagtaagtttcttgatcatctatatatgtaattttttttttttgaagtcttatgtttggttgatcatgagcatgcaggtctgcaggctcttgtagtatatagacagaaaaagtttcgccttagtttatgatatatacgatacatggagtagctgtgtgattaaaatatgagattgatgctattaatttaagtagttgggtgtcctcttttctacatgaaaagctttctttcaactgggcttcaattaaatttaacgataattggcttggtgggaggtgggtgtttctttagctccacttccatgtaaggggaaaaaagggacatattcatagatgaagatagccatgaagatatgcccattaaaaatgtaagcaaacacctatattcagccggttaaagcttgataatcttgagaagaagagtggagatgatgaatgttgatggctaatatgttggtgtcttattcttgtttgattgattttgatgatttattagggaactcccatgggcttttgttaagggttttgcaaggctcaaaagaatcaaatccttattcctttcttggttgattgtgattatggtctatgtatgatgaacagttggacgaagtcttgggcaaaggagca

SEQ ID NO: 98328 - DNA, 626 bp, Vitis vinifera
  Intron number 1 from transcript GSVIVT01020875001 (locus G SVIVG01020875001) derived from phytozome v7.0 (chr-ID chr1 2; pos 725100 to 725725 reverse strand)
tctattcctcctattgggtcttctcatctgctcaggtgacttgctttctcctggttggagttgttttttttccatgtctttgtaaattttgttcttaatatacttcttattcccttatcattgagatgtaaatctgttcatcctcaatggaatttcctctttcatttttcttttgctgtttttatttgcatttgggtggattgacatttcaaatggaactgcttatttttttggccttttagtttgagtttgaatatttttgctgctttccatgctggtgtttgaatttgattgcttttccttgctggtgctgtagttgtttgtttctaaatcattgtgtgtctctgtctttttttcttcaaatggactctgttttccgatgaggatatattctaaaaatctaagtactaaattcaaatttgcaataatggttcttgttcaatttcaaattttcccacaaatttcaaaactgtaattctccgaatatctcttgatttcaaaaaattcaattcagattttgcctctttttccaccatttgattgaaacagaatggacaaaagaaagcttaattgaaaggcttactttgattttgatttgaagttcaggttctacagagagaggagaa

SEQ ID NO: 98329 - DNA, 821 bp, Vitis vinifera
  Intron number 1 from transcript GSVIVT01020825001 (locus G SVIVG01020825001) derived from phytozome v7.0 (chr-ID chr1 2; pos 1504047 to 1504867 reverse strand)
aaacacaaccattaccatttgttcttacttccataaaggaagcatgggtctttacggtaggagatttttttttttttttttggtaccaactcaatactaaacaagtccgagctaattgaatagttgtattagaaattccatatatcggtttgccataaaggatataattaacaacttgaaggtgcatattatccctttcttgcaaataccgtgtgctatttcatatgtgactatgggtcgaaccaaaacaaaatactttttcttgataggtgtgatccctggatatagatcctaaattttcaattttttctcttccttggattttttttctcgttcctggtggtatcaagatgtcgatgtgctggaatatcttatttgtctctctaggaaactgatatctatctctataaaagattttaagttcaaacctgttttttttcctatattagacaactcgtatcaaacttatcccgttgtcattcataattatttatactatgtaattattaattaaaataacctagacaatataatgataacaattttaaatacatttaaagaaaatatataacaattctcaaaattatgctttgatagcagctgaaaactaattttgttttgattttgagaccaaaaaagctcgaacagtcactatcataatataagaattcaaattcatgggagaagtgtacattaaatggggaaggttgcagggttgcagccttaggcccctttgtataaatttttaataaatggagggtatggaaacaaaaaagagaagaaaaggagcagaccacagttttcgcacgtggtaaaaagga

SEQ ID NO: 98330 - DNA, 976 bp, Vitis vinifera
  Intron number 2 from transcript GSVIVT01029441001 (locus G SVIVG01029441001) derived from phytozome v7.0 (chr-ID chr9 ; pos 22864454 to 22865429 reverse strand)
tcaaccaaccatctgaattcatcctgcaatttcgagctccgatcgctgctctcaggttttgtcacacccctctttgttagggtttctttgattctatgtctaggttaacccttccttagggttttgacttttatttcccaatttattcatttattcttttaatttgttattaattttcttaattaccatcctggtgaagatgtgcatatcatcaatgtgactatttggtgcttttcttgggccgattggaaaattatgcaactttaggcaaacccctttcgattcgattttgtttcttgctttttttgtgttggttaattctaatggcgatcaccatcgccctcgttctttgtctcgcttccaattactcatacaaaacccctaaacttggtattgctggaggatggccccaattgtggttgtgtttgtgtttggatatgtatttgtagtatgctgttacaccagcagtgttattattgcgcaactcgatttgattacacttgtcctacttgcatgtgttaacgaacttccgccacacttgaaaaagtataggttgatcttctacttgctgattataagttgtagatctacatttttgttgtgtactatgatttatcccatattttagtaatataatattttccctattcaattctgatgtttttctgttcgattttgtcaattgcccccatgtaaacctatgaattgattgcccccatataaatctatgacttttggtattgaactctctttgtttttaataattgctgatttgaaattttcacatagtaacttgaagtttgattgatcgttcttgggttttataatacaaggaagctttttaatcaatcaaacatgagtagttaatgatgcatgtcgtggcaggtgactcaaatatgggattctggtctgaattgtgaacatgtgaaagtctgagttatgcggtacttggtgttcagaagcatacaagggaaag

SEQ ID NO: 98331 - DNA, 988 bp, Vitis vinifera
  Intron number 1 from transcript GSVIVT01024928001 (locus G SVIVG01024928001) derived from phytozome v7.0 (chr-ID chr6 ; pos 5955693 to 5956680 reverse strand)
ctctttctcggcgattttgggcttggtgctgttaggtaatgttctcgtttcttgtttctgtttggtttctgagaaaatgtgagagaggggaaggaatggcgttttgaagtgtcactggatttagaaaaatgctactgtttccggattttttttatgaagctagatgttttttccgatgagaaatgatggaaatggaagagatcaaaattttcggtcttggatttttcattgtttagggcacggggagtgaacacagggcttggtaaggacgaatatgactattagggctttttagttgaaagcagaaacaaaagaatcccaaagttagaaatgtgcgtttgtgtcggtgttttttttattttcatagcagccaaacagagggctgaagtgcctattttcagtaacattgcttgaattctgtgagatttcttagaatgagatttttttttcctttttaagtaatatgatgctttgggtgtttgagattttgggattagatttatgtgatctgatttttaatgttgaaattaaaagtgtatattgattaaatagggaatgattatttgtgagcatggcgttgaaatctgaatctcttcagattttgtattgggtccttcgttattgaggtgtaaggagtttcaacttcctttgggagcatggtgtttggttgagtgaaattgaagaatcaaaatgagattttgaaagttttatttcttttttgcattgctacttcaagttcactaaatcacacctttggcgaaaagtttccttctatctctagacttacatgttccagaacaatcattgatgtaatgcatttctcatcaacttgaagatgccaagtttatgtttaataattctttctaatatttctaatccatttctgcatgatacaaggatttgggctatataagatttgagcttgttattgatatgcttatgttaatgctctgcccaaattttttattcagaaacctcaaaagttgaa

SEQ ID NO: 98332 - DNA, 1016 bp, Vitis vinifera
  Intron number 2 from transcript GSVIVT01027852001 (locus G SVIVG01027852001) derived from phytozome v7.0 (chr-ID chr5 ; pos 8648821 to 8649836)
gaggacaattctaaaggcacgaccgccattgattagtgatttgtattgtttgtaaattctttttttattttttattgtttggggtttgtttggttacggagaatataaacaaaaaggaaataaaaatttgacatgctaaagaaaaatttgaatttaatggttcagtagaggatgaaaagttgaattagtttttttttttttttttttctaggttttcccttatcttgtcttttctacaaaatgaggcttaggctatatttggttccgaaaagtactaatgaaagaaaaaaaatgttaaaaaaaatggttttctcatatttgatttcatcataattttttttaaaattaaatataattaaaattagttagaaatttatatattttaaaattatttaatctttatataatagatgaaactaagtgaaattaatttgaaaaaacatataaaaataatttattaattttgaatctactttttatttttttcttttcttccacttttcctctttattttctttcccccatattttctcttgaattttgtgataaccaaacaaagtcttaggatttgtaaaggaagttcatgttaagctgtggttggttgctttatatatgaatggatttcaaattaaacttaaattttttaggcgtcaaatgcgaggaaaacttttgaagcatgagagttttgaatttcattgaatttgagttcaatttatgtagccaaacgtcaaattcaatccactcaaatgctgccttaggatacctagctttgatattgtgaatgaagtataatttctatttattttaatttgataaatgttaaatatctcatttgaacaaaattattattttagttttataaaagtttaagaaatattgtatttaagaaattatatttaaattagattaatatttttttcgtgaaattttagaagaaaatattgtcaaataaattttatttaattagatcatactcacaagctctacaaatattacatctaagaaatcttatttaa

SEQ ID NO: 98333 - DNA, 515 bp, Vitis vinifera
  Intron number 5 from transcript GSVIVT01027380001 (locus G SVIVG01027380001) derived from phytozome v7.0 (chr-ID chr1 3; pos 15502756 to 15503270 reverse strand)
gacttttcggtaagtaacatgcttaagcatatataaataatgacattaccttttttctcttaatgtttctcggggacagatttgtagttgtaacttccaatattgtgaatcctgcaattggttattttgtttgtaagctttatattctgtgtctaacagacctgataactactgaatgagtgtctgaatcccataatttcatcatgtaaacatctgatgctgcatatggtagtctagtaggctttgagtctggttacaggttgtgcatcagttggtatgcgatcttttagatggggtttaattaggctttttgctttctgtccatgtttattctttgggtgaggtggttattgttgtaacagaaaagaaaaataggttgaaaaagtcttgattgaaagggaacaaatctttcaaggtcaccaagttacaaaatggagatgcagaagaagacactgtcaagaaatgattttggtttttcattgctgactaaatcaaatattgtgcagaaattagat

SEQ ID NO: 98334 - DNA, 536 bp, Vitis vinifera
  Intron number 2 from transcript GSVIVT01027073001 (locus G SVIVG01027073001) derived from phytozome v7.0 (chr-ID chr1 5; pos 18157895 to 18158430)
cacctgcttcgccagcatcggctggaccgagttcggtacctatctctcttgtcttctttttctttctttttggttttcttctgtttggaagctgagaaaatttaggaataggagagaaactgtgatatgacgacgtgtgtgtgttgttctatttgtgttccatttccctctgtttggaagctgaggaaatttaggaaaaggagagcaactggttgttttttttttctttggtccttttcaatttggttggttgatgaaaagggagtcatctcatttgagcataataattgtgattcgctttactattttggagcttaaatagtggaggataaaaacggacattgtgggttttttttttcttttttcttattttctttgatggccctacatttgatcggactggtgttttgctcaatttattttctttattatcagagcatgattttggtggtgaaaacatcactaaaatgtgtatgattcggtaattataatgaattgcaggcaccacccagaaggccaacaaggactgcaacgga

SEQ ID NO: 98335 - DNA, 744 bp, Vitis vinifera
  Intron number 1 from transcript GSVIVT01028246001 (locus G SVIVG01028246001) derived from phytozome v7.0 (chr-ID chr7 ; pos 4911096 to 4911839 reverse strand)
aggagattttttactgtgagttgtttgatcattcctcctctgtttctgtttttgggttcttcttccaatttctattttcaatgttgaggtcttaattgcttgtttattactgtcagtataagatctaaaagaattttctcttctttttttccatttttttgaattctgaattctgttatgccccaaatgctacttaagatgaagcttgaaagaaccacttggatcatatagcttcagccataaattaaaaacaaaaacaaaattggttggatctgattaacaaaaattacattttttttttcactttctttatgggtggtggaggagaacttggctctgagtaatttattaatgttactcctttttggattttctgtgcttcttcttggtttattagctttttgccaaaatgtagttcatctgaccagcgtttcccatcagccactgattttttcctgaaatagttaataggtgagaatcatctgatgttctctttggtttatgttggaaagctaggcatcaacagcttttgtgtctcattaatgggttgtttccgattcacattgtagttcatttggccagcctttcttttgggtctttgctctgctaagtatatagtttgtactgtgatcataatttctcaaaccaagatgaaagggaaaatgcatcagagcttcctaccgtctaatctcattatcaaatttgtatctgactgatgttgaaatgttccttttcagctagtgg

SEQ ID NO: 98336 - DNA, 793 bp, Vitis vinifera
  Intron number 1 from transcript GSVIVT01020916001 (locus G SVIVG01020916001) derived from phytozome v7.0 (chr-ID chr5 ; pos 17246979 to 17247771)
tcgcctgcaaaatccatagggattttcttcatagggtacgttttgactgctgaaaagttccgggtttctgtttgtttcccgagaaagtgggcaaaaatggtgtctttttcttcttttcttttttctggtttgttgagcaaggtagggggttttgtgtatggttgttctgaaagtgggggaaagtaagaggaatcgaagtttttgttttctttcttccccattttatgttttatgtttgttttggttgctgagaagtgaagaattttgtgttggttgctgataaaccggaggaaatgaggattaaatgaagctgttctattttttcttttttctttttttaactacttttagtttcaatgttttcggttgttttggttgctaatcatgtgtgtattttctgtttggttgtctagaaaaggctggaaatgaaaagaaaatttagtctctttatttcatgtctagtgttgttttggttgctaagacaattaagggatttttgttttcttgttctggaaattgagaaaaggaaaaggaccaatgaagttttgttttgttagttttaagtttcaggttttctatttctgttggttgagagagtgaatttttttttcctttttctgtttagtttcctagaaatgcatgaaaagaagagaaaatgaagtttctttatttcatgccttgtgattggaggaaatgagaagttttcccagcatgttttatgttagcttttggagatgatctcaaggagataaaatgaagcaactgactatgatatgttttattcactttcagg

SEQ ID NO: 98337 - DNA, 764 bp, Vitis vinifera
  Intron number 3 from transcript GSVIVT01028181001 (locus G SVIVG01028181001) derived from phytozome v7.0 (chr-ID chr7 ; pos 4462357 to 4463120 reverse strand)
aacataggccctggcgaatccagcaggtttcttcggtaagactcaatgaaccatcacaattactatgtagtgtcacaagtagttctggaaaatcttgtttcagtgttgatgggtccagtgaaccacattttgctttgcaaagatgatgcatcaataagaatggtagctgaataaaatggtttgtggctagcagccatgcttctcggatatttggtagaatttggggaattctctttgtctctaatttaggaggatcctattccagtctgaataaactagaattgttccctggctattagtttgtagaactttgctcaatttcaaagttgcatgagtactccaaatttttgtcccaagagatactgcagattgttcaattgtttgttatttcaaaatttcatgctgcagattgtcctattatttgttagggaatgggaatcaacctaaacattcatatgcagtacctttgtggaaaaagaaaaaatctgcagttagtgacttcttactatatatgaccatgttttcttccctgtatgatgaactcctccaaagtgtcataactcatatgtactaaactctcaattcaaaacagtgaaatagtttcaaatgtataacataaatgcttacatactacttttatggtagtgctacttgtaagatgtgcaacataaatacttgaatacttatgttgttgtggattcacatactggttctaatttgtggccttttgtaaataaaaaaaataattataggctttgctgaaa

SEQ ID NO: 98338 - DNA, 796 bp, Vitis vinifera
  Intron number 1 from transcript GSVIVT01026915001 (locus G SVIVG01026915001) derived from phytozome v7.0 (chr-ID chr1 5; pos 19418404 to 19419199)
cggtcaaaggtaacgcccttttgaatagatctgctagattattgcataactaaatatgttaaacattgatctcacctttcttttggagctcatgagtataaaagaatttagggagatatgcttagttctatcaccttttatgaattctcctttaatttgtgcaatacaagcagcattatcttcatgtaactcggttgcattgcctctaatggaaggtagtccacatgtttcttgtatatgttgaatcattgaccttagtcatacacattcacgacttacttcatgaattgcaagaatttctttatatggatctgaaagatattatgcatctgcatatccaagcaattgttgttttgattcccttgagtaaaataggcccatactaatagttccgcaaagattgattttttttttttggagaattagtataattatttggtgtaaatgggcagataaaaatattaatattaacttctaaatttctaatatataaagggaaataaataataaataaattttttagaaaatatatgtaaatttcaaataaatttattgttaaggtaatcataatacatgagtggagggttgggaggaagtcatttaaattatttaaattaattttttttaaataaaataaaataataaaaaattttgatttatttatttttcctcttttaaaccctatctctagaaaactctgtttttctcggttccgattacaactgaatacggtctgcggctctctgcgtcttgagcggcagcaactctccgacaagccctctactggtgaccactc

SEQ ID NO: 98339 - DNA, 772 bp, Vitis vinifera
  Intron number 1 from transcript GSVIVT01025434001 (locus G SVIVG01025434001) derived from phytozome v7.0 (chr-ID chr6 ; pos 821873 to 822644 reverse strand)
tgtttggttgattggaaaattctctgttcattgaggtaaacagcacaaattttgatgtccttttttttgggtctatgtctgcttctgtgcaaatggtaattgctcttttgcggttttgttagtatatattggttggaatgggtgtttttgtgtttctgggctggttttgatcagatggaaatgaagatggtttggtcagtttttcatggaaattttggttttctgcaaatgggttttggagattcctgctttttgcttgatgggtttgtctgcaacatttggtctgatctttttccttgaatataggttcttgggtgtttcttattataatacatataaaatgctgtttgcgttgaacaaggtgttcttggatttctgtgtttatcctcatcaactggaaatgaattttcgttttttattttttttttggatttttgatccatattaggtctctgcaaattggttttcatatccatgctttctctctcatgggtttttatgcaacagtttgatctggaatcatttctgtaatgctagtttgatgaaatgggtgttctttcttttcttcattcatgaaagtttatgttagaaaaatttagatccatgctctttctttaatgggtttgtttccactaattgatccaacccctcattatctgaaactccttatggttcttggcttgcttcaatggtttcgatggcattgatcatatagactaattcaatgtattggtttctgtcaacaggaattgggactctgttatttgtttga

SEQ ID NO: 98340 - DNA, 611 bp, Vitis vinifera
  Intron number 1 from transcript GSVIVT01022340001 (locus G SVIVG01022340001) derived from phytozome v7.0 (chr-ID chr7 ; pos 18679912 to 18680522 reverse strand)
gatagctttgttcaggtctatttctctgctttgtctttgttcggctggtgagacatgggaaagaaaggggaagagaaatttgaaacgttttaacctctttggtatggaaataatcactattttgcattgacacgagtgaaaattattcaggaaaaaagtttttaaaaataagttattttttaaagaagaaacaaatgttgattgcttcattttttaaagtgaaaacaagtgttgattgctccactaaaatgtaaaatggaaaaattaagctcatactaagcaaatgtttggatcaagattaggtggttggggatgttgatttccaaatagggaatattcaaagattcaacatcaaatttcttttgttctcctccggcttcttagcaagagcatgaatacgcctttgtattttgctgtttgaatgtgttgcgatatttgtatgtataaataatgttgttgactgtcctcttgaagtgttattcaagctttttttttttctctcttccatcatctctctctagttatgtttaaagatcattggtttagctgtacacaaataaagttatgtatctgtatggtgcagactacagttgataatttcttgaagtatt

SEQ ID NO: 98341 - DNA, 814 bp, Vitis vinifera
  Intron number 1 from transcript GSVIVT01028707001 (locus G SVIVG01028707001) derived from phytozome v7.0 (chr-ID chr1 6; pos 19584308 to 19585121)
tattttgtagacttctacttcggtcacattgttttctaccctcatccaacggcttatatttcactacaaaatattcatcaatgaagataataattaggtactttagtatttttcacattccaaaaacaaaacaaaacaaagatatcatttcctaatataaattaaaatgtaataataataataagaaaaatgctttgagaacattgtcattgtgggtcccacattttttatggataaaaaggttgggcatatggctcagtgtaacatggacctcaaaggtgggctttagtaaagccttgaagatgtggaccttagcccacttgcgacttatgccgaaaattgctgatctattcatgagctctcttttgtggactgattttggtctaattgcaggtcaaaggacgcagagaagcagtctaaagttacaagagttacctagagcgaataactgggtctcagcctttcaggtacgtagcccagcccatcattgagaacgtcttgacatgggcctgagtcaaccaactgggcctaggcagataaaatacttttaggtttttagctaccaccaatatcttgttaattgctctgcaattaaggtcgtgtttggttaccttttagcaagcccaaacctcttttttaagcttagaatgagagggatttttttttttgttttttttgtataagaaaatctatcttaataattttattcttataacattttgcttatggattggattcattaatatttagtatatatgtaaattggtatccaaaaataacatatcattttcattttttgttagtaaaatagaga

SEQ ID NO: 98342 - DNA, 984 bp, Vitis vinifera
  Intron number 1 from transcript GSVIVT01026457001 (locus G SVIVG01026457001) derived from phytozome v7.0 (chr-ID chr4 ; pos 23260486 to 23261469)
atcacttctcctctctgctatccagtttcgagctggtgattctctctatattcatccatattctcataattgttctattatcagcgtttgcattcatgggtgtgtgtttgtttctctttcatcattgacttagttttgattgagtgcgtaaattatcctttcaaatttgtgaaatttagaaatgggtttggtgggtgatttgttgtttttccagtgggttggaggagaaacagtagaacttgaattctatggatctcctctcggttgctgggactgagatatgggtgatgtagcagagaaatgaagtttcaggcctcttgttgttttggtttccaagaaataaagaattcgtattaactaagccaaaatagtgtcatatgctcaattgaataccgggtttgtgttttcaggtccaaaatgatgaaaagtctaagattaattgatttctttatacatagtgaaaattatgctaagtattgatatgctaatgtcatatttatgtatgtatgtatgtatacggagagaagactgtgctacttatataacacaaattttgtaagtatcttttatatctactgtttagattaaagaattatttcccggttccaatattatgtaggtgtgtgattagattagcttaagtagtggactacatgtgaatgcaaaatctccactgcagataagtttggaaatctttttatcaataaaatggtgagaatattataaatcacatttatatcaaacgctattacagtagaggatatgaaagtgagatgtgtaatcaattaagtaccaccgaaaatctttaaaattgatttgtatttgtgttgcctctctttctttgctatggttattgtgagtgcatagctaatagcctcttcagtatacaattttcttgaacatatttttagtgtatgcttcttgaggcaattttgttttttgatgaacaagaagcaatataatacccatgtttccaggttactg

SEQ ID NO: 98343 - DNA, 773 bp, Vitis vinifera
  Intron number 4 from transcript GSVIVT01019302001 (locus G SVIVG01019302001) derived from phytozome v7.0 (chr-ID chr1 5; pos 1643580 to 1644352)
cagcctattttcagttgcaagtttagccgagacaggtaatataaattatacgatctcttctacattcactagcctcctaaattatatgatttcttctacattcactagcctcctaaattcttttgaatttgtactacttattcttattccctgttagttccagttgagacttgaaagacacaggactaacaaaaattaagggggtaaaaggcaaaatgttttcagattaacagagaatatttggtaatcttgtattctttgccttatttccataatttctgtaaattgttgctggacaagtaagatttgtcaatgtgtataagcttttggcagcactgatgccaacagtctgtccacaagttgaacagctttgtgattcaacattgggtatgcttaaacttagtaaaagcaggttggaactttttggtatgtagataaaaaggttttgaaaactaaaaacaagtggtcttcctttatgctttatttggttgttcagaattcatgagaaaggaaaagagacctttgagtcctacaacattggctccagttggaatctgtttcaagattcaaagtttttaactcccagttcttcccctccctccgccaggttttctcagtaatcaaatgaaccactgataagtcctcttctttgcttctgagattactatccgggtttggtatccttgagttatttttttgggtttatgtagtttcttgacagttataacgaatggacagggtatcccaggtcgacccattgagcacctattggt

SEQ ID NO: 98344 - DNA, 806 bp, Vitis vinifera
  Intron number 1 from transcript GSVIVT01024351001 (locus G SVIVG01024351001) derived from phytozome v7.0 (chr-ID chr1 6; pos 1315204 to 1316009 reverse strand)
agctttcatcgctcaagtgtattcgctcttggaaggtaaagtgagaagtttgagttgaattggagtatgtttggttgctgagaacacggcggaaaggagaagatgataaatttggaaatttggcaaaaaaattctctttttacttattgggaagaattctatgtgggaatatattttttttgaaaacaaacatataattaagcaaatagaagatatttgaatacaattagcgtcaatttggtgactgtgaaatggagggaaaagaagagaaacaaaagaaaagtaaatttgaaatattagggtctgtttattaattttttatgacaaaaatattttttgttgtctttctaagagaaaattgtccctggaaatattttcagttgaaacaaccagagcatgcctggcataagctaaagctgaatctctttgttaggcacacagctgatgccgtggaagcaatccgatatggtgaaaacattaatttgatagagtacatatagaattttctttttatccttttggtattggaaattttacctttttattgaaaaatcaaattaactctgtttggctgccaagacagtggagagcagaagtaccaagtctagtttttaccgttttgaaataattaaaataagtggggaacatataagtgatgtcattgctttgtttttgtatgaaatgaataaacagaagagaaaagtgtttcatgtttcatgtttcccagtagccaaatgggctaaggattccttatgttgatccacgtatgtgaaatttgattgcttgttttggcatcctgtaggggc

SEQ ID NO: 98345 - DNA, 704 bp, Vitis vinifera
  Intron number 2 from transcript GSVIVT01029468001 (locus G SVIVG01029468001) derived from phytozome v7.0 (chr-ID chr9 ; pos 22508640 to 22509343 reverse strand)
gtggctttgtccttacattcttccagttcatccaggtctctgtgtgtgtgtaaatataaatataaatataaacatgaatataactctcctgaaaggaggtgtaaaggatcgtggttagctgctgaagaagttattaatcatatcaacttgatgcataacaaagatcctaactagtggggaaagtcaaatggctagaaaatataagtggagatgattgtagtgcataatgaaggattggagaattaaaattgcttttggacaactaggacaagaatcttacgttagaggaaagctgtagtatcttattttatttttcatgttagagaatagaagcaaactatggagcaaggaggtttctttaaatagaatcctagactttgaattattttttaaaaatattttttgtgcatttgggttctttttctaattttatttatatttttagggattttcccctaaagtgtcctctttattccttaattcattaccatcaaatctttatctgattgtttactttgcttcaggttttttctccttgttaacagatctgggttctgttttcactttattaaagactttaatgttattctccttgataaacaagttactgaaaaattaggtggcttttcaggttgattttatctcgttgtaagcaagattttatttgttagtggtaaactttcaaatttttatctataggacgg

SEQ ID NO: 98346 - DNA, 981 bp, Vitis vinifera
  Intron number 1 from transcript GSVIVT01027580001 (locus G SVIVG01027580001) derived from phytozome v7.0 (chr-ID chr1 5; pos 15354195 to 15355175)
cgcatctgttctcgttgtattctcttttcttttgggtaagctgattagggttttgtatggctggtttttgctttaaccttttctatttcattttctctgtgcccaataatctcatgaaatttcgtttctaccgattgaccctgtctggttgggaaaactgaaggaaagaatggatgcatggttgctattggacgaggattaggaaaaaaaaaaccaaaaaataaaataaaataaaaacttcttttttattcttttgaacttgtaactttgccactgctgagaatgctggtagaaaggaaaattttttaaactttagggattataatttttagtattataagtcaagtagttacgtttggcttagcatgcttgggaaggtgtgagaggtagaagttcgtttatcatttttattgtacgtgtttttcagcagccaaaatagactgctttgggtataccgtttgggttttgatggtttctttaatgaattttccttatgctctgattgttttctgagaaatatttatatatattgtttatcaaatggtttttaccaatcaaaaatttacaaagaatgaaagctcaactctggcattattctttttgaacagttttttcttagtaacctaatggagaacttcacatgtttagttatttatttatgaatgttattgggagaatcgttattgttttttgtcattaggctataaactagttaggctgtttcagaatgttggattcttcctcctcttccttttttttttttttttttttttttttttttttttacctacttcaaattttttgtgtatttgttgaaatttgattttttttttttctgacactatgatgaactttgtggtcaattttgtggattgaaattgaatgagttaggggcatgagtattggttctttttttcctttctaatttttacttcaatggttgcagctaccattggataaaacgaaggggaagacctgctt

SEQ ID NO: 98347 - DNA, 450 bp, Vitis vinifera
  Intron number 3 from transcript GSVIVT01027618001 (locus G SVIVG01027618001) derived from phytozome v7.0 (chr-ID chr1 5; pos 15026547 to 15026996)
aaaaggtttagtttccttttacccctgttccccaatgacaacaccattctatcctgtgccaaataaggggtttgatgctgaaaagaatttggtattttggacttgattggaaaaaatatgtgaaatagaaaagtcaaaaactttttggctgtgctgaatttagcaacaattttgtgaatagttgaaagatgtataggaatgctttttaatggggaagtaattagactgaaaaagaagtttaaaataagccagcaaaacaatgttgcatgacacagagtgaaatatgaaccatgtccattgttgttgggtaacattcatttcaagaggatgtcacatttatttctgagcattgttgaagacttggtggatttatcacaataataatcctgtttgctttaattcacttcacatgcagagcaaccgtgtgaagcaggtactggcccacctgaa

SEQ ID NO: 98348 - DNA, 841 bp, Vitis vinifera
  Intron number 1 from transcript GSVIVT01028661001 (locus G SVIVG01028661001) derived from phytozome v7.0 (chr-ID chr7 ; pos 11788744 to 11789584)
gccccctccaagatcctctggcgtaccatccgtgggtgagttattaatatttttctgttgtccttatcagaaaaatgagagtgtcatgggtctggccctcctggttcaaatgatctaatgctgtttggtttttcttgtttgctgtttgtttttttattatttatttgctctgctgttgtgtattgactgtctgtttggttgctgagaaactttgggaagtggtaaagatgggatatgatcatatatcttaattaagttatttatgccgtgaataaaagcataaggaaacgaaaattctggatcttgtatttttgctaaaatcttaaatgtgctttcttatttttcttcttgtattgttaaatattaactattgtttaggagaaagagaaatcaggtgaaaagaatgaaagaatcttggctcaaactgactctcagctaagagtgggggggtttatgtcctttccgaagattgcttgcatttctcaacaatcaattttgtgaatgggtttctgttttgaattgccgggtgttttagtccatgctctactaggatttattactcattcactgaaatggtaaatgaaaactgttcgtttggttgctgagaaaatcaggaaaagaaaagaacaagaaattttaaattgtacaaaactcgaattaactaaggcatgcttgcaatgctcagttgagtggagtatttgtttgtctgaatccaaatcatggagaatcttcaattagaaattttggtgcctgtacctttccttcacttcattaggtaccatacagagcttaatttcaacactgtttttaatgaatttttttggttttgttttattgtagg

SEQ ID NO: 98349 - DNA, 879 bp, Vitis vinifera
  Intron number 1 from transcript GSVIVT01030439001 (locus G SVIVG01030439001) derived from phytozome v7.0 (chr-ID chr1 2; pos 5560470 to 5561348)
gttattatatacatttttgagttttaaactatttattaaaatcattaaaattattaataaattcaatacaaaatcttacttttaaatttattttctctaattaaaaaaaaacaatcataacaattctctattttactttattttttaaaaattatttctaaagattgaatttaggtataaatttttaaaaacaattttttttttaaataataagtcaaaatacgcttttattatttagtaaaagaaacttttaaggaatttttttagacgaaaataaaaaattatttcaaatgatgtataatacgacacttttttcaaataaaaattttaaaaaatattttaaattatgtatacagatatcattgacaatttatttatttattttttatttctaatttttacttaacattgaaataaaaataaattttcattctcaatcttacattcctttatatatatataaacgcattaattggaattactaaattaattaaaattatttttttaattttatgagagagaataacaatagaaattaaaaaaaaaaaaaatagggttaatggtaggttttagtgatatgatataaggtttttgcttacgtggcacatttttcatcggtcagctatcacagaattttttgtcctagagcaaatcattacaccgttggcagagtgggccctagaaactgtgacccagatcaatccaaccacggtgaggcttcgaagggaaaacaattcagcttaacgtctccatccgttacaacttccaaatcgcagagcttgtcaaagaagtggaagaagtctttacagataccccaaaacgtgttcacctaacctggtatcaggtgtttgatcaaagtactgaaccaaaacttccact

SEQ ID NO: 98350 - DNA, 935 bp, Vitis vinifera
  Intron number 1 from transcript GSVIVT01028621001 (locus G SVIVG01028621001) derived from phytozome v7.0 (chr-ID chr7 ; pos 10943616 to 10944550)
tctcttctgtaaaaacaagcattcttcattccgtaattgcagtttggattttgaatcttggaactgcttttcttgtttttcaaaataaaaattgcatttgaaatgtaatcccaattcggtagcccgacagttggaatttgtgtctatgtgttcgcttatgttgaatcttgttgattgtgcttatagaagggaccggatgagcttcattgtgccagggtgctgtttttttaagcatttttgaagtgcttttcttgcttttcgaggctaacatcggtgcatttttgtttccttctgaaaaaatggtgacaatgtgatttagggttttactcttttggcagtggaatttcatatcattgaatgctcttaggcttatgttttaaacggctagctgtatttctataggctactttgatgattgttcaatttgcgttacatttttccaaaattatgcgaacatgcttagcttttctgttacccatgtttcaaatgcgatttttttttttttttactgatgaatttgcagtacatttttttttaatagaattattataattttccaagttccaactgatcatgagctgagtttttcttgccctagatgaattagagaagaaagaaagtgctaaaatagttgcagttcttgagaatttttgtgcatttattcatcattctgtgcaagaaccaaacagggaaatcatagtttactagttgcttttgaattttcgtttttttttcctttccctttttcccttttatgcggtaaccaagtggagcaatctaaatgcaatttactgacttcttacctttagataacactcccctagtaccgccaaatactggtttttggtctattgtctgttgcattctttaggtgttattattattattatttttgttttgttttgctcattcggtcatatattctcctgcagtgt

SEQ ID NO: 98351 - DNA, 910 bp, Vitis vinifera
  Intron number 1 from transcript GSVIVT01028665001 (locus G SVIVG01028665001) derived from phytozome v7.0 (chr-ID chr7 ; pos 11866768 to 11867677 reverse strand)
ttaccacctatttagcattattattattatatcgtgtccctgcatacactgaacgccaaaatattgaacaacacccgaatctaaagtcaataggcaagaaaattgttgaaaagtgcgatggtttgccattagcagcaaaggttcttggtggtctcggataccgaatgtggcatcattcgcgcattaaggttgagttatcatcaccttccagcacatttaaaacaatgtttgttttattgtgcaacatttcccaaagactacgggtttaaggaaaaggaactagccttgttatggatgactgagggtttaatttgaccattggaaggatataaacaaatggaagatttaggtgctgagtactttcatgagttggtgtcaagcttatttttccaaaaatgtggtaatcatgaaacacggtttgtgatgcacaatctcattactgatctagctcaatcagttgcaagacaagtatgtatcaatttggaggataataagaattataccattttacaagacactcaacatgtttcatacaatcatttccatagggagacctttaaaaattttgaagctttcaaggaggcggagcatttgcgaacatttctagtcttaccaattgatcaagattatccttatggactagggtgttacttaactagtaaggtattttatgattaattcccaaaattaagatatttgagggtgttttctttaactagatataatgtaagtgagttaccagattcaatccgagatctaaagcacttatgatgtcttaatttgtctcggacttgtagtcaatggttgccagaatcaataagtgagctcaataatttatgaactttgatattgtataaatgttgtgatcttacaaggtttacttgtgcgcattggaaatttagctaatctt

SEQ ID NO: 98352 - DNA, 632 bp, Vitis vinifera
  Intron number 1 from transcript GSVIVT01021636001 (locus G SVIVG01021636001) derived from phytozome v7.0 (chr-ID chr1 0; pos 8501863 to 8502494)
gaagagttaaaacaagtaaatgtgtttgaaataacatttaaataatctattgacttcaaatctattttctatttttctttgcttttattttattttttatattttttctttttattttctttcgctcgcattttctttgaataaggcaaaacctttggctatatttgattcccaaaaaatatgaaggaaaacaaaaataaaggggaaacttaaaagaaaaaagtgaaagaaaattatatataaaaaaaagatttaaagttaataaattaattttatatattgtttcaaattcatttaaaatttaaaaaatagatttaaagtaaataaattgattttatttgtttcttcaaattcatttacatattttaatctttctatataagaaattaataatttaaaaatgaataaaaattaattaaatttaagtatattttattatggtccttattttctatagtaaaatcaatcatgagaaactaattttccttgaatatttctttctttcttttattcttgtatggaaccaaacatagtctatatgttgatgataataatatttcaaatctttttttttttttttttttaatgttaggtaagtgcaaggagcttcaacaactgaatttatttaataa

SEQ ID NO: 98353 - DNA, 334 bp, Vitis vinifera
  Intron number 3 from transcript GSVIVT01029113001 (locus G SVIVG01029113001) derived from phytozome v7.0 (chr-ID chr1 1; pos 19509954 to 19510287)
ggggaagttgtctccacaattccaagttggtattctttctctgcgcctttgttttgtttggttgctgagaatccttaggaaaaggaacagaacattgaattttgaatctttcatgttctgccatcaactgcatcaaatggttgtattcggctcacttgaggagaggttttgtctcttcgggttacaaatgacgaaaataaaatcgaagattgaaagttttagctttaaatttaaattttccctttttatttgaagcctaggaaccaaacgggcattagtgtttgaatcgtggaataatttgtgtgtttatggtttcatgcagcaattggcttca

SEQ ID NO: 98354 - DNA, 978 bp, Vitis vinifera
  Intron number 1 from transcript GSVIVT01018921001 (locus G SVIVG01018921001) derived from phytozome v7.0 (chr-ID chr4 ; pos 18627760 to 18628737 reverse strand)
tggctggtgggcttgaagccactctcaatcgtctggttagtacaaccgctattcctgtcagcgttttgacctttttttttcctttttaattttctatgtttggtgaggaattgaagatgtgaaacttgcgtatagagttttggattcttgttgatttggtctgattttgtagcaatcgcgtctaattatatatcttccaaatgatttgtctgaaaaaactgtaactttatgtctatgaattcctgtaatttattggaaaagtatgggatttccctccagtttgaagaatacttctcaattcactaggattaaatttgggttatgtgaacttttgagttcttcaattttcgcccaaggttactggaagtatcaatgattctagtgatgaatgacattgtctcttgaagtgcttccagaagcacctcatgggaagtattctcctacaaaagctatggttgttttcttccgctcgttccttctcctctggaaaaccttttctatgaaattgatgcagagggtggttacaggttggcatgcttttgatacatgaatcccttttttattgtaattctggttcctttaaactggatttatattccagtggattttgaattgaaattgaaattgaattccttggagcccatatccactaaaacaattccattttcaaagcagaattttggaattttgcatagttggaattctgcacaatcaaatgcagcttcagtatttcttgtgcacaaaatctgcccaatatgttaatactgtgtttttacatgtacttttaagtgggatgatttgctcattttcaaagaatatcaagttttggaagtatccctctgttgtccatcattatctatattgcaagtagctattttattttgccatgtggatagcatgttttccattatgatgccaatgtgttcactggtttgattcacagagcaagtggctcgtcgctgctctttttggtattgt

SEQ ID NO: 98355 - DNA, 833 bp, Vitis vinifera
  Intron number 1 from transcript GSVIVT01023535001 (locus G SVIVG01023535001) derived from phytozome v7.0 (chr-ID chr1 4; pos 10111300 to 10112132 reverse strand)
ctaagaagctcctccaggtaactgtgtatatagtctgtgtttggttactgacaaaaccgaggaaaattatagaaataggatgaaaattccgaatcttgcaagtctcttagtttttaaaagcgagggataagcttagctctactgaagattaatagtttcattagaattcctttttgataggcaatacttgtattacaaatcataattttcatttcctcttttcctatgttctctgagctaatgattgttaccctttgtttggttgctgaaagaactaaacaaaagaactgagctatggtgcttttttgtatcatattttcttaacagaaaagggaaaaaaaaattgtgcaaattaaaaaataaagtttacttgttattttccatgatttttgttaaattctcaacttaatagttgtattaggttcatttgggaggacgctgttgtttccttggaccttaaacgacggaaagtctaaatcttaatttaatttcttttctttccattaattttcccaccaaccaaaatgggtgacctccacatggtcgctgaaatgatcaggaaaatgagcataaaatcttgaatctcttggttttgatgaagattaaagaactcaactaagtcaagtacttgctgattgagagtagaagattttgtttccttgtatcctacatacaaggtttttcattttgttttatttttctcctcccacattatctaagctagcaggtagagacagttgaatgtttgactactgctgctattttactgtgattgtttttacttatctaatattctttggggatcggttctggtgaatattgtgtacaggctg

SEQ ID NO: 98356 - DNA, 520 bp, Vitis vinifera
  Intron number 1 from transcript GSVIVT01020907001 (locus G SVIVG01020907001) derived from phytozome v7.0 (chr-ID chr5 ; pos 17444016 to 17444535)
attcccttcaagaaaagcttaattctctccttcaggtattggcgttagttcttctggcgtgttccagaaaataaatgaataatttatcattttccagatactagggtttatcttgtgtagtgcgattttgaatgaataattttatcatttgaacatgtttttacaattaacaaacttttccttcctgctcaatggctggtgacactaagaaaaagacaaatatgaagaattatgttcccttattttgttaactggttttagaaaaacaaaaatgaaaaaatgatggttgtgcataatggaaaataaaaatgtcgagattttgttttgtttttcttttcaatcactttctcggttactgaatcttagtgacggaatcaagtggataaagaatttgcagaagttcaaatagtgtatctttgttgttttttttttgtctttactaggctttaattgattagcccgccaattagcgggcaataacatggtgggcaggtgaaagcagagtccttgaatcggtcaa

SEQ ID NO: 98357 - DNA, 336 bp, Vitis vinifera
  Intron number 1 from transcript GSVIVT01026525001 (locus G SVIVG01026525001) derived from phytozome v7.0 (chr-ID chr4 ; pos 22283610 to 22283945)
gtgttttggtaggttttcatttctgatatctgtttttttttcccctttcaatacaatttggtttctgggttcttaacatttctgcttgagtttcatagtttcgttctttgagatgacttaaatactattcattctcctgttttatcaatttatttccctatgtttaaatcttcctctgtttcttctttagctctttccttatgggttgttgttttttttgtcctttcttctttcatttaatgtaccatggactccataataaagacagtctgttttattccaatttcttggacctgtccaattcatgatttctgtttgtatattgtggtggatcag

SEQ ID NO: 98358 - DNA, 1037 bp, Vitis vinifera
  Intron number 1 from transcript GSVIVT01026471001 (locus G SVIVG01026471001) derived from phytozome v7.0 (chr-ID chr4 ; pos 23029807 to 23030843)
ctctgtttcagtggcaagtagcaccacacatttgggtaagatttgacctctttaggtttagaaggagggcaaatcttgtgtttaatgtcccatacattctgttaaggtatatttcatgtatttaatttgtcactatctctttgtgagatttcataatttgttggaaggtactcttgataacgtatgttttatcattcaggaattgtagctcctacattaagcggggtgtggattgtagttccttttagtactttttttttccttctttcttttggtgtacatgggctgtgccccacctttttgctaggcacctttcaataaattgctcttttctcatttaaagaaaaaaagaaaaggaaaaaatcacagttacatgtcgatgatgaaatatgaacttcttgttttatcctaaatgtttattgttatgatcaaattgtttgttgtgggtgttctttaccacttctaattgcttcattatgttctttctctcttcccattttcttttgctagcttttcttttcattttttgtaatagatatcctatgcttttgttatctccattctttacctggcctaccgacaattcagtgttgtggtttaattaggtcagcctaagtggcataacgaatttctggattcaccagatctttctttatcatgatgaaaattccttttttaagcttttggatcattgaacttttgggcccaccacatcttttcttattatgatgaaaaccccccttttctaagttttggatcatccatctaaaatatgactagcatccaaaatgatctttcattttttatatcatgtaagcagtatatgcctattattcatgtatttccaggctcttgaggataattgagttggtttccaacctccccagtccttcctattgatagcaacactgaaatttgattttgtatgtgtgcgtgtcctgatttcatgtatggtttagtgtgtatatatgtggatatatgtatttatgtatgtattattttttctcagaaagtgcaaaaggcgctgttgcaatcag

SEQ ID NO: 98359 - DNA, 882 bp, Vitis vinifera
  Intron number 1 from transcript GSVIVT01026577001 (locus G SVIVG01026577001) derived from phytozome v7.0 (chr-ID chr4 ; pos 21481930 to 21482811)
ttctgggtttcttgcagaggaggaactgaagagctgtgagtccacgcttatcccttctcttttctgtgtgtttccctctgtttggttgctgagaaaacgagagacgagaataaaattgatgatttttagccatctttgatttttgattgtttggaatcccacttcactgtggtggctaagttgggtgaagttgtttaatactctcttttaagcatgaaattgataaatttatttgcttcttttttttttttttcttttcttttcttcagtttttgtcagcatccaaactgtgcggtttttcttttttcttttttcgattttttttattggtcgtcgtgcttttctttactgattactgcgaatgcaagcctctagttttatagatttggagaaattatgctttatctgcaattcaagttccttttttttttttttgcctcctaatttagtttgattttctcttttctctttcctttttattttctgagcaatcgaccagtggacaactctatttccttttgatcgttatttaaaatatagctgtgttgattagtttataataaagctcaaattctagggatttcctgcaattcaagttcccattttttttttccttaatttagttttgattttctctttcctttttccttggttttcacagcaatcaaacagctgattgctctgttttgattcgattattatgtcatttttctgtgtaattattctaaaatgatgctcaaattctatggatgtgctcgctattcaagttgctatattttcattttcttcactgttcatattctcagtgaaaagcgtttgaattttgtatttcatatttttcttgcagttaattgctctgaactgcagagctagaattggcct

SEQ ID NO: 98360 - DNA, 776 bp, Vitis vinifera
  Intron number 1 from transcript GSVIVT01024692001 (locus G SVIVG01024692001) derived from phytozome v7.0 (chr-ID chr6 ; pos 7680884 to 7681659 reverse strand)
tcagaagaacaagggagggcaaaggagaattacatgtaaaggatgattcctttctcaaactattttcagcattttcctgttctttccttcattctttcaagatcaaaatcaagcctcaatgtcgcttcacctggattattctatcactttgttcttctactgttctggattagttctttttttcttttctttttttaatgatttggatccataattatggaaaatatgaatgagaaccagagaaaatagataaactcataataacttttagtatttggaaatgggaacaagaaaagaaccttcacatgacaaagtattgatagatttgtatatcttgtttgtggtctctttggtcaaaatctcaattttaccatcatatgagattgtgtagtgctcaaatggatccattttgcccttctaatggtatctttgcttgactaagagttgcttttttcctggtgagatcaagtatttattgtttaaaattttcatcccctggattgttgatgcctcccatcaatcattatgttgaaatattgaatttatatccttattagtctctgttttgcccctttacaagatccttgtcttcatgcattttaatcagtaattcattttagatgcaacttgggtaggtttattttatctttgtttgcttatctaaaattctccacattgttctctgattaactcattttttatggctcatttgctattttgatatggtgtcctgtttgcaaggttattgagctgttctggcttcaactgaggctctt

SEQ ID NO: 98361 - DNA, 826 bp, Vitis vinifera
  Intron number 2 from transcript GSVIVT01028722001 (locus G SVIVG01028722001) derived from phytozome v7.0 (chr-ID chr1 6; pos 19447645 to 19448470)
gcagaaaagggtgttaaacctttgggccagttgaggtatgccattcaagataatgaactttcatcattttatgattcttaaaagagagggatgccatttcccattcgttccatcgaggctggacgatggggatgcgatcaagttgatttctgtctgtttggttgtctctcttagttgacatcagtggaaaaagtccatagccaatgacccatttgctgttatggagtttaccagcagacaatagtgaatttctggtgacagacacggaaaataggatttggggcttgtgatttcctctgtacattcaaaaatcggtactccatttttgaccttccggcttgaaggggaaagttggcggaaggtcacgaaaagaccgcggctgcagtaggcatttatttgttagttgtcgccgtgaatgtatgactctgtgctccattactttatagtttatcaggttagacgcttttgtcgattagcaagagaaatattaattagtagccaaatggcagaagaaggggtggatctccaatgaatcatagtattcttttgaggcaagataaatctaaattcattgactgggacaactgttttaatggtcgttttctgttgtttgaactagcatactggtggggaatttgctttgttgaagcttgattcaatgatatatggcttttccaatttgatttactgattctgttgtaagttagcttacactgtttttttcttcaaaaatcattaagttgatgctttgatgaatctattaaagggtttcgcaatgtttttcttgtcttgttgccgatgcagagtttgaagaggaaagagtaaa

SEQ ID NO: 98362 - DNA, 891 bp, Vitis vinifera
  Intron number 1 from transcript GSVIVT01023839001 (locus G SVIVG01023839001) derived from phytozome v7.0 (chr-ID chr3 ; pos 3061299 to 3062189)
ggcgtagtgttggagtggtcggagtggcttctgaggtttgctcttgtattactttctcctagttttttatttttatttatttatttttgtaattttgaagtttgtattgtttatagttgtgttcatatgtaatgtaatcgatcccttttttgggtttattttaaatttgttgatgtgggtgagtgtgtgttgaaaatttctttaatttctgtgtgtttgttgtttactttcaatgcagtagcgatgttcttaagcttcaaatctgtatgattttattttcatgtcattcctccccttatggtttgtgttggattacggtgggatctgttcacaaggaaatttctcattagggttcttcgagaaaacgtttggagctaacatttatatatatatacaagaaaaaagaactttggggaaggagtagggggtggttttgccctttttctagcccaactgctctttctttcccatcgtcctaattatgatatttgcagcatagctcaaactcggggatgtttcttaagtgctttttctgctgaattttttgttcaatctgtaaatgtctccgcctttgttttcaatgtttagatatgggacttctatagcgcatttggtatgtgggaatcggaatggaaataggatgggaatgaagttatcccagtgagagtggggtttggtttccaatcaattttttattccatatttcctttctaaaaaacaatccaatcacatcaatgaatgggaatggtattccagcgttccaaacatggccctgtctaaatttttttgtaaattcttggtcttttactttgttttaatgttggtcatttcagcatataacccaaacttctttgttttgctttaactttaggtgaaaaacattattggcta

SEQ ID NO: 98363 - DNA, 585 bp, Vitis vinifera
  Intron number 1 from transcript GSVIVT01026056001 (locus G SVIVG01026056001) derived from phytozome v7.0 (chr-ID chr1 8; pos 25211340 to 25211924)
cgcgaagttcgtctaggaaattttcatctcagtcggtaatttgacctggtttcgttagggttttggtttatcttctgtttggttactgacaaaacgttggaagatatcaggtgtgcttgatttggggttgaaaaactgattttcggaaaaagttttctgcttccgaaaggggaaatttccgtttatatgtgttttgaagtgattttgctttgagttttggggtattctctgtttgtatgatgagaaaacgtgggaaaaacaaggaaagaaatcaaggatatgctccatttggggtttaaaaactgatttttgaaaaacgttttatttctaaaacgggaagtttccgaaaatagaaataacaaagatattattattttattttattttatattcgagagtttccctaaacccgcctcttgcatccattcaatgtttttgtttctgaaatagaaacgtaatgttgtaaattttcatttcctacattctctcatcaaccaaacagaggactaatgtttagcgaatcgatctcaattctttacctggactgcagaaaggggagcagagttctcgattaaccggtagcgt

SEQ ID NO: 98364 - DNA, 829 bp, Vitis vinifera
  Intron number 1 from transcript GSVIVT01022397001 (locus G SVIVG01022397001) derived from phytozome v7.0 (chr-ID chr7 ; pos 19647840 to 19648668 reverse strand)
cctctggaattgctggcttcactactgcctattgggtcagttttttttttttttttttttaatattagcctgcatcttaaaaattatccaccactaactcatggcttctctatctcatcttcatctaaatagttaattggaaatgaactaaatttctttatcttgtttctcctcaattgtctaacatctcatatgttttctttctattttctatttttcccatccttatcaaaggattcttcaatggtagatgtatagatgccaatttttggtgcgtgacaactagttaagacttaagagtgaccaccctattagattctttatatcaacggctagtattcaaagttcactgtatatatagataccgtaattaatttctaaattatatctttatataatactacaaggttgacttttccaaataaatcatatattaaaaaaaaagaaaaagaaactgcatgttgcttgccctagactagatcattttttttagttcattgaatgttgcctcccccaaaagaatctcccaaactctagtactttcattaggataagaaggaacaaaaatgagggttgactgacggcctatttcatcttccacagattatacatggaaacatgttatctaatggattgcatgtatccattggtataggtaaataagatcatttttatcacaacacaatgtttctcattcatcgtccttttgattcttcaaaattaatgtttgaagttgaaagattagtaagtgtgtgaacgtgaaggtgatgaaggagatggtgtgatgtgtacaggtggggccaagatcaaccaaggacagggagagatt

SEQ ID NO: 98365 - DNA, 722 bp, Vitis vinifera
  Intron number 1 from transcript GSVIVT01028841001 (locus G SVIVG01028841001) derived from phytozome v7.0 (chr-ID chr1 6; pos 18165112 to 18165833)
gattccattatcaaaagtgtatataccgtttttttgtaccaatttcttttgatacattactaattcatttggtatagatttacttcttgttaatagatagtaagagtattgtcccaataaataatttttctatagaatttattaatatttaaacttattaaaagatgttatttattttttaatttattataaaaataatttacttttaaactttgagtgatatgtttttaactttttattttacttattacttattttttaaaatatttttttattaaatagtaaaagcaaagtattttagctttttcctaatgcataagtaacttatttgttgcgtgctctgtcatgtccttacatcattgccaccacaattatcaatattccactagccaccactctcatttcactcgcactacttaaccaaatttaattttaatgatataaaataaaattaattttttcaaagatgataatgataaattatttattataaaaatttctattattttaatatttttataaatatgttaaattacctttttcttgggtggtcgaagatcaaatggacctgcattgatttggtatttgttgacgagaaggtctacataaatcctccgatagaggttgcgcacataacacagagtggaaggaggaagaaaagaaaggaaaagaaaaaagaagtaaaaggatttaaagcaatctcaaacaaacccttgaagaag

SEQ ID NO: 98366 - DNA, 296 bp, Vitis vinifera
  Intron number 1 from transcript GSVIVT01021891001 (locus G SVIVG01021891001) derived from phytozome v7.0 (chr-ID chr1 4; pos 5986771 to 5987066)
agactgctagtggtatcaagggacaggtgaaggaggtatgcatcttataaacaatacgttcttcattttttacttttgcattgttctattggaagcacaattacaattatttttctttgggtgccattgtttagcatgtaatattattggggaatttttttcccaactgaaaaaaaaagggcattccaagaagtttgtgtttttcctctgccatggaaaagtttattggtagtttgaatttaatgtcaataatcttggcagactgcaaaagaagagcttggtaaccaacccaaaaa

SEQ ID NO: 98367 - DNA, 334 bp, Vitis vinifera
  Intron number 1 from transcript GSVIVT01024062001 (locus G SVIVG01024062001) derived from phytozome v7.0 (chr-ID chr3 ; pos 1429026 to 1429359 reverse strand)
tcctctctttctctctctagcgtccacaaaaccaggtacgctttttctgcttgttgtttgtttacttaattattagttattgctttggtttttctttttcactttctgtaaaaccctaagacgaagtatagagaacatagtgaagatctgaattttttgtgcatgtttgtatgtagtataaggatccatttctgggttcacttgttttgtgattttagaaggtgggttttactttgattttgattttgatggttattagtggtttttcttgactagggtttttgttgggtgtgattggttctagggttttgaagcggtattcgaggattttgtg

SEQ ID NO: 98368 - DNA, 367 bp, Vitis vinifera
  Intron number 2 from transcript GSVIVT01022657001 (locus G SVIVG01022657001) derived from phytozome v7.0 (chr-ID chr2 ; pos 14190618 to 14190984 reverse strand)
attagacttcataagctgttgggaaacaggcaagtttatttattaatttcctattacatttagtatagccactgttagattggtaatagagatacaagtttggattgaatcctgagaaaatacgaggaaaatgaaagaaaaaaattgaagtaaaataagaaaagaagcttaatcaattaagctttttcacttgcaaagaaaaaagaattgtacctaccttcccttaatttttttccttgtctgatccttaacccaaaccaaattctggagctgatggttaaagaaacaacgcctccatgaattagaaactcaaataagatcattttaattcaacacttttaaaaaaattgtagctatgtttttccag

SEQ ID NO: 98369 - DNA, 336 bp, Vitis vinifera
  Intron number 2 from transcript GSVIVT01027477001 (locus G SVIVG01027477001) derived from phytozome v7.0 (chr-ID chr1 5; pos 16453089 to 16453424)
agtaccgcgctgctattgcttcccttcctgccaatgtatgctatccattacctccattatcgctctcttactctctgttttttgtgtgaatttcataattttctgttctaatcaagtctgtttggttaaccaaaaaaagattataaattacttgcacatattcatttaagtctctctttgaatgtactaaggcacatttacataaccagggaaattgttcactgctaagtgatttaatattgttcttcacaaggatttgatatggctggaatatgatacaacaattttatactgtgaatttatgttgttttgtccttctaattgtgcagaaggcct

SEQ ID NO: 98370 - DNA, 457 bp, Vitis vinifera
  Intron number 2 from transcript GSVIVT01028028001 (locus G SVIVG01028028001) derived from phytozome v7.0 (chr-ID chr7 ; pos 3282970 to 3283426 reverse strand)
ccgagtgaggcttttgaaggtaagatcgagatttaaacttgtcctgatgggattgtttttgagccaagcttactgcacaatttgctctgaattcaatgttaaaggtcatcttagaagaaattataccttttctttcttaaggatgaaaacccctgaaatacagttactcaacctgtttcaatccccttctatgctgactctctgaaattcttgcaattatgaataagaacaactgaaaaatggattttgacattgttgccattgtatttttattggaaagaaacattttcaaataacaaagcatgtttttgagtgttctcaaaagagtcagaagcaaaagttataacccgagataagccatgaggaattattttagtgaccattcttttaagtattactcaaagaacaagactgaaatcgaattgtatgtcaccttcaggtaagaaaaggaaaaata

SEQ ID NO: 98371 - DNA, 463 bp, Vitis vinifera
  Intron number 1 from transcript GSVIVT01028028001 (locus G SVIVG01028028001) derived from phytozome v7.0 (chr-ID chr7 ; pos 3283573 to 3284035 reverse strand)
agaacttcgagtacgagctgccggaagatttcaaggtgagtttctattcaaatttttggtgtttaattgattctgaagaatgtattttgcaagttttgtttatttgtgggtttagaaattggggaaatggatttgggtggaaaagtgaatataaaaagttataatttaggcgaaagctttggtgagaaattcatgtgatggttttagtagtctccttttcttagttgggacatgtagttttgatattcctccctggtttgttctggggttagggtctagggtttagggtttagggccaatgctattgatatgggattttctggatattgattgaattgtcaatatgacgataattttatgacttttttttgtgtgtctaataatctttgttcaatatagcatgattatggcatttttggtttttttaatgaagctatttttgttgttgtattacttgtgtagg

SEQ ID NO: 98372 - DNA, 951 bp, Vitis vinifera
  Intron number 3 from transcript GSVIVT01023883001 (locus G SVIVG01023883001) derived from phytozome v7.0 (chr-ID chr3 ; pos 2735992 to 2736942 reverse strand)
tccagagtgattgtgcaaagaatagagtcagaaaggttttaaatctcatctttctttctatcattttctaaatgtaatgttattaacttgaaacctgtgtagattgatatattcatagtgtttgacatgtgaatcttattatattatgtgcatttatggtacttacatttcaatttatgcaagctgtagctggcatgattatttagacggtttcttgtttctttgccttccatggtattacttttgctgttttccctgggaaaaaatatatatgttgggctttctgtagtgtttaatcaggcactggtttggggctatgctttttagtcatttgatgggtccgatggtctgtccctaacatagatgttgtgtttgtaaatgtttgaggacttacaaaagcaataaggtggagcatactgtgcataattgtttggatgggaaattgtttgtgaaaatatgaactatgtggggaaaaaagattcccatttatttgagttaagatgtgattttttttttcaaatatatattgctagcgtagaattatataacatctaagatgttgattgatatttaataaacgaatattttaatcatccagatgaaaaaaattgaataatatcccacaccattgaagggaaatgctaaaagtgtgagattggatgcaggggggaatgatttactgatgtatactttttgtggtcctacatagcattgcaagaggaaaatatgctttatgtggcttgtgcacccagttgctgggattgagttgagttgcgctggtaaaatggcagtggtttttccgatcttacatgctcacaacacctgaagccactcaccaaccctgaaaatgactcccttctcttgagtgtccaaccattaatcatgtatataatttgttgtattgtataattatttaccacatgggtcaaatgttggctgaccaggaccaag

SEQ ID NO: 98373 - DNA, 752 bp, Vitis vinifera
  Intron number 5 from transcript GSVIVT01022313001 (locus G SVIVG01022313001) derived from phytozome v7.0 (chr-ID chr7 ; pos 18414508 to 18415259 reverse strand)
agggcttctcttgccacacaccaccacggaccaaggtgattttgattaatttcttacgagaaatattagtataacaaaacatctttgtttggctatctaaccatgtatgcactctgccaatgttgataatacatcctaagatatatgggttaggctgtagatgcctttggcctatcctttagttgaggacactaggttttttcatggaaaataattttttagaaaccataatagttaataaacaattcgtatagcttctggaaatagagcattactggatgaatgggaaactagaaagtcttcttgggtttattgtgaaaactcatgtatggtacagaggatatttcattctaatccaattagtccttgatctaaactatataaattttgtagcaagatggcttgagtttcttttgtctgcatggtccaataaagtgccaacagtatttacttcaattttgtggttgagcatcaaattaatttagatttcatggtgtgcttattcatttagcttgcgcttcattcaaaagcagagcacctatatttattggtattctgttgatagttttggctgagcagcaaattattttacatttcatggtatgcttattcatttgattcgcacttcattcaaaagcagagcactcatatgtaatggtgttctattgatactcttgtgggatttacgtttctgttcctcgttctttttcattgtagaacttcaacacctgaggaacagcctccctgatcaa

SEQ ID NO: 98374 - DNA, 1039 bp, Vitis vinifera
  Intron number 2 from transcript GSVIVT01027862001 (locus G SVIVG01027862001) derived from phytozome v7.0 (chr-ID chr5 ; pos 8742255 to 8743293 reverse strand)
ttcaccgttggatctcaccaatacagccccttatagttttcgttaccgagatatcttttttttttttcattgttcccaaggattttttaggtaatcagctcccatgttgcaaacagtcaaatctatattgcatccaatccagtcttccataaaaggaccaaacacattgaagttgactgtcacttcattagagagaagatcgcatcaggatgtgtggcgactagttttgtcaattcaaatgatcaactagcagatatttttactaaatctcttagaggtcctagaattaaatacatttgtaacaagcttggtgcatatgacatatatgctccagcttgagggggagtgttagataatgtatagttatttaggttatttacttttccttttccttttctttcctcactgtattgtgggtcccactagcatgtatatatatacccaagtccaatgtgtattctttacagtttttcaataataataattagggattctcccttttctctctctcttcacatggtatcagagcctagggagaaaaaaaccctaattattttcggtttatccgtgaatccattctgggaaatctttcagttaccgtgttttatttcagtcacccttcccatctcctaaagcttccgatcaaccctcaccgccggcaacttttccggcgatttttcctacgaagtccttttccgacaccgaccataccatcaggtgcgcaaggaggagatcttcaacttttctcaaagcaccggaggaagaatcccagccacgcgccggccacgcgcgtctcttctccgacgacttgaatctcacgggccagcgcgtgagggcgcgtggggaactttctagccacgcgcttccacctccagcctcgcctgacgctgtctagccaccctccatctgcgcttgtgtcatttgagccctaaaagtgcattttttggggtttttcttttgggcagctgttcaccgttggatctcaccaatacaaccccttatagtttcgttatcgagatatcttttttttttcattgtt

SEQ ID NO: 98375 - DNA, 696 bp, Vitis vinifera
  Intron number 1 from transcript GSVIVT01027593001 (locus G SVIVG01027593001) derived from phytozome v7.0 (chr-ID chr1 5; pos 15225550 to 15226245)
cagtactgttttcaattcccaatttaatggtttttggtttggtgggttttgtgttttcatgacttttgaagtttttgatgtgatatttgtggtggatttagttgtttctattgaaatttgcggtttatcggggtgaatttgaggaaaagctagttcatagttttcttgtttcgtttggttttttggggatgaattagtgcattatttgaggtattgtgttttaatgaatttggactttttctgacgtgggtttagttgttgctgttgaaaatttgggttttattgtttggtgaatttggggaagacgtttgtcatggttttctcgttttgtttggtttttggggattactagttctttgatttgagagttccatacccttcagatggtttgtgtgaaaagtgtgtcagatcctgagtgtgtgctacatattatctgggttttcctttttcatctagagaaacaatttatacaggaattatctgtgttttaatatttttgtttctagttcttttaagttttggagaaggtgtcgtatccaaatgattctcaatggcattgtggtctattgtttacattcattgctcccaagttgttgccttgattgctttgtgcacatattgattgttatatagcttatactaatagtatgtttccttttaggaagtggatcccagtgtagagaacgaagaattacc

SEQ ID NO: 98376 - DNA, 891 bp, Vitis vinifera
  Intron number 1 from transcript GSVIVT01027385001 (locus G SVIVG01027385001) derived from phytozome v7.0 (chr-ID chr1 3; pos 15468345 to 15469235 reverse strand)
actgttttttgtgtggattgtggtgctctgcagtaactacactctctcttactactattattatactgcaatactttcataccaccaccttccttccattgagccttcatcaatggtgggagctcactattatgttagcttcatatgtatttgcagtaagtagtaaataacatgaaaataatttgaatgaattagattggatttggtttggaaaaaattttcaatttttttaaatgaaattttgattaaaaatattgaaaattatattaaaaaaatgaaaattaggaaaccttatttggtactaaatttttttacttgaaaatgatgaaaataataaaattgtatttgtagattaatttttattttcttttttttattaattattttaatagtaaaataaaaaatatgtatatagttaacaaaggagttcataaattgtattcttttgtttggtacccctctttttttacataaaaaaataattaaataattaaactatatttgttcattaattttttattttattttttattagttattttaacattttaataatttttttaataaatatataattaataagggtatttttagaaaatagaagatgtaaaaaaaattaaataaaaactattcttaaaaaataaaaatagaaaatgaaaaccaaaaaacttcaacctaaatatccaaatatatcctccaacttattttctaattttttaaaaataaagacagaaaattggctacacaaataggggttagatttttatttttatttttatttttttgaaattttaaactaaatgcatttcggaatttgataatttgttaggtaatggtgtttgctttccattttcagcgctgcccatatcatctctttttccgtacctttat

SEQ ID NO: 98377 - DNA, 511 bp, Vitis vinifera
  Intron number 1 from transcript GSVIVT01026200001 (locus G SVIVG01026200001) derived from phytozome v7.0 (chr-ID chr1 0; pos 13977995 to 13978505 reverse strand)
ttccagtcgtctgaacctttctgaatgagacaaaagatcctcagtttatacagtttcattggatatctctcaaaggagaccccattagtgaacccaccgcattgtccatgaggatgtttccagcatttgattatgatgataagctacttttggaagaaaacgccatgtcccttccttccatcccaatagattcaaccaaaggaacaaatgaaagatcaactgaaatagcagtcaaaccagcaatcttattacaaactgctcctttccaattgcattttggtcccaaaatcttgctggaatgcttagtcattgatatattttcaagcactgactatccaagattcttcaaggtacccatcatattctctctcaagatgtcgcccccaaatagaagaaacactaaatcagacataactattgaatcctggaggaaaacatagtttacactcttgagcattaattgaattcgaatgcaagatcacttgaccatcctccattgttttcaatgaga

SEQ ID NO: 98378 - DNA, 933 bp, Vitis vinifera
  Intron number 1 from transcript GSVIVT01028879001 (locus G SVIVG01028879001) derived from phytozome v7.0 (chr-ID chr1 6; pos 17838885 to 17839817 reverse strand)
tctctgtcattggcaccttctcttttggcttcgttggcttccttttctctctcttttttttttctttctctgcacttccagactgtcacgggtgtttcctttctgggttgtccccgtaatttatgaagtttgtcgtaacttttcgtaactgtgcctttgtttggttgccgagaaacgacggaaaagaaaaaacaaaatgggtttttagttctcttgctttgacttttgagccagccaggctctagggttacttcttcaaatgcatttgatttttaatttttttttttttactttgtataccatctaagactgtggagaaacatgcccaagaataaattattttggttgatgacttgattcttatgtttttgttattattattattatttttatattgtttctgtttcttaatcttgaaaagatcaaccccaaattttcgatcacaatcaattgctgaacctgaaaattttggaattcaggacggttgatattaatgggtttgtaggttgatattggagttctgttttcctttggagaggagagggggttaggctcttaagtaattaaatttcaaaattttccttgttttcttttccttcattttctcaacaagcaaaacagagtcatttaagaatgcctaaattcaattttttttaattttttattattattaattttaagcttaaaatgggaaagattctagaaactcattaataccatgtttgcattataagaaaaatttgtgctttgttgatgagaaattctgtaaagcttcaggagcagttaaaagaagaaatgggaactttgaataacaagttgggaatggaaaattttgcattgttttgtatcaatactgtcattttccttgatttcattttctgatgaaacaaacatattttgattttgaatctaattacaaatttgtagcttggt

SEQ ID NO: 98379 - DNA, 899 bp, Vitis vinifera
  Intron number 2 from transcript GSVIVT01024475001 (locus G SVIVG01024475001) derived from phytozome v7.0 (chr-ID chr1 6; pos 3095978 to 3096876 reverse strand)
aagggagggatcagatatcaccctgaggtttgtgattcactgattcttttgtttgttttcggattttgtcctgtttgattgctgagaaaagttgggaatgaaaaggagagatttgaatttttttgtttttgttagggtagtagagtctaggtatgttgtggggcttacttgactttgtaatttcttgtagcacagaacatgagattcgggattgtaggattgtagtttgttttttcttgtcttttccccctattttctcggcaagcaaacggattttagggggtttccttttaggttcttggaatttccggttgatttgggttttgtctaagtggtttttgggtgtaccatggaaagggagttgttcaaatgcaataatcatagtggaatgatttcatttcataatggatccaaacatgcccttattgtatcttgtacagagatgattatctcgaaatctcacgttcaagatttctatatcgaaatgttgggtgtgcatttttattttatttttttggaatcttggaaattgttttcagtgattttggcaaacatggtccaaccgaaatatgtgataaaactgataattattatacagtcgaaagtctttttgggatgagtggcatgatgaattctattttggatgttatgttaatttgtgtgttctcaatttgcataatcaaattcaatgagttgttttgttttcctttcaagaagttgttcgcggtaattttctggatatatggctctgtatttattttgttgggggactttggtgctgagttagaaggaattattttatcttcaaacttgtttgctttgatttcttgcaaataaaaacctggttgcatttagttttactgatacgtttcttcatttgttttcaaaggtggatcctg

SEQ ID NO: 98380 - DNA, 848 bp, Vitis vinifera
  Intron number 2 from transcript GSVIVT01022200001 (locus G SVIVG01022200001) derived from phytozome v7.0 (chr-ID chr7 ; pos 17405311 to 17406158)
accaagaagctactaagcctgttgataaggtaaagaaactgggtcactgggtattgatttctcttctctttaaatgatacgaatttttgttctgtcatccttttttttagatttgggtagccaatatttcttcttgaaatttgaagaaggcatagtattttattagcatgtataagaatgatcaagacattcttacacatatttgggatttggaaaaaagagtatgttctcagagataaggtgaagttagtagcaagccgggttaaggtggccatggtttgggttggggataggggacattccaggtttgactccacctatcaaaatgattatcttcatatatatatatatataaagaagttagttgcaagccatcaaaaacctggtcttaatttcattatttggtcatgcccatggacaaatgttgcgggatagtgcatgcattaagcatgcctgtaacaatgtaatcacttgtagtaagattagcatagaaaagaaactctagctgtttaaaagtgtgggggagaacaagtttgtattagagcttcacattggtaatgtttatgctagtggtattgcgcttgaatctttacaaacagcatacaattttatatttgtaggtcaatttaagttatgcactgatgcttaaaattcagaagtttgaccaaaaagtttgtcacacttcctttttccattttgagtatttttaccaaaaatatgcccccatgctttctagttctcttcgacttttgatgtttccttcattgtcaatgtataggaccttggtttactcctttacatattaatctacaggtacaaagacgtcttgcacaaaaccgtgaggctgc

SEQ ID NO: 98381 - DNA, 695 bp, Vitis vinifera
  Intron number 1 from transcript GSVIVT01028469001 (locus G SVIVG01028469001) derived from phytozome v7.0 (chr-ID chr7 ; pos 8035437 to 8036131)
cagtgaaagctcgacaagcttgggattgtgtctgtctgagctgtaatctaggcaaacctcatttttatcggaaaaataaaaataaaaataaaaataaaattgaaattgaaattaaagtaatttatggatgaaaacgctttaatttttctttaattaataaaatctaataaattaaactcgacccaagaaggttagagagaagagaaggggaggagggaaaccgaagaggaaagagaaaaacaaagaaaacaataacaaaaaaccaagggaagcaaaagggttgtggggtgtttttactttgaaaggcggaagggggggttttgttttgaatcttgttgggaatcagagcgaaaagactggagctttgaagggggggtttgagcttctgctgctcttcttgaagctctgatctcgagtgttgagtttcgtttatacagccccccctcaaaagaaggaatcaaaaagttgtagtgggggaaaagttgggtggtttttgaacagagtgggagggattgtagtgggcgtggggcaagaaaaggagggggagttgtgggataggattgggattttgctgacttgaattgggtcaatcagtttctgggttgggttggactggattggattgacttgggtgatctttgttgtggcaattgggagtagatcgcgaggcggccgcagttcctgatccgattaat

SEQ ID NO: 98382 - DNA, 870 bp, Vitis vinifera
  Intron number 1 from transcript GSVIVT01023604001 (locus G SVIVG01023604001) derived from phytozome v7.0 (chr-ID chr1 1; pos 7893619 to 7894488)
tcgaaccccctaaggtctctctctcttcttccctctttctatctctatgttaaacgttttgtgtacttatactgtcaagttttatatttcctggtttggatgaagatccatctactactgtctgtataaataaacccatttgtttattttttttttttagtagtttgattcatcggggggattgtgttgggctagaatatgtttataatcaacgagtattcttcccagtatcttaaatcacttttctctctctctctctctctccctcttgttttttttttttttaaattgggaagaaatccattacttttatgtgtttgattgattgattaatcaacattggatgaagggtctactggagattaattttttttttatttatgggtttttattattttgtatgaatgcaatttttttaagtcctttatgtcaaattaaggatttttttttttggtcctggattgcctaggaatttttatgattgattggttattaccatgggctaaaataaataaatatttgatttttctgtggttgtactggggtatcccaccatttttattttattttataattttgtgtcatgaagatcatgaattttcatctggttgattaattattctcgctagaatctataaatgatatatatattttttaataattattatgggttttgcttctttcttagagtactgatctctgtattgatttcattaatgtatcatttgtttgattgtcatgggctgattcttttattaggtgacttatacttctgggtttgatcttatatccttgagttaataaatgatgttttgtgcttttaaaatcccaaaagatctctttcactgccaaagagatcgatttggtgga

SEQ ID NO: 98383 - DNA, 720 bp, Vitis vinifera
  Intron number 1 from transcript GSVIVT01030079001 (locus G SVIVG01030079001) derived from phytozome v7.0 (chr-ID chr1 2; pos 9651371 to 9652090 reverse strand)
ggctttattgcactgttcttgactggtacgtggcttttcatcaattagttatgcgcattttttttttctttttggatttttttggtttttagtatctcaagttgaagttagggttttgtattgtacgtttcaatttctgttgtgaattggttgtttttgttgttttgtttaggttttttttttttttttttcagttatttgtttggacccttttgttgacacgtggtggccagctcagtgaataaacaatttactctgtgatgcccaattcaagttcctttcagttgggattctcagaaaatcgtggggaagaaaagaaaaatgaaattttgggacttgaagttttaggttgttttttttttttttttggaagatcaatttttttttccttctcagtgatcaagcagttgaatttgaataatgtgttataacagttaatgtttttcttttatctgggaatgtagggtttgaatttcaactttgggtttcttaattcctaaactataattcaaatgtcgatttcatagccggttatgcaccatttggttgatgctaaaagggagaaaaataaaaggattgttctagtttccaaaaattgaaaattactcatccaagcttatgtacattcattggagtggttggtttgctttctaagattctaaccttctattttttttttccctaggtttcctgccaaaaaactgagcataagggtttgga

SEQ ID NO: 98384 - DNA, 672 bp, Vitis vinifera
  Intron number 3 from transcript GSVIVT01023149001 (locus G SVIVG01023149001) derived from phytozome v7.0 (chr-ID chr1 2; pos 21947264 to 21947935 reverse strand)
gaacaggtatatcgactctaacgtgatatgttgtatggatgactactctagtatgcagcgcccaaaatggcatttttttcattgagtttgaaatgtaaattgttgtatttgattttacagtgatgtgtaccaatgactacttgaatatgcagtgtacaaaatggaattttctttgttgtatttgaaatggaaacctaatttagttaaatctcatcagattaatgtccttaatgacagtggtctatgtgttgtgctggcaaagagcatttttgtttttgttcctgtattttgttttttagcttttatgatcaggataaacctaatttagtgaatttccacctgatttatctccttaatgagcgtactacatatttgtcttgacgaagcttttacactttgttgctttattttgtattttgatttttatgatttgcatgtgtcaatctatttgcctatctcttcatttattgtgcaaaggaggttctggttaatgctttatttatttaaatatctgatatttgcttctctaataccttgaattgaatctcccaggcccctatttacatattataatgtttttgtttccttcttttttatcatattgattccatctttataaatcttatccttcttgcagcttgaagcatcaacgacacatcaagggttagacca

SEQ ID NO: 98385 - DNA, 693 bp, Vitis vinifera
  Intron number 2 from transcript GSVIVT01023149001 (locus G SVIVG01023149001) derived from phytozome v7.0 (chr-ID chr1 2; pos 21948034 to 21948726 reverse strand)
caggtttgagatctgaccctttcgaaaattttctccctttacttgtcagttgcaactcgcgagagatgctaagtagaactagaaaggggaagaatttatgactcagtggctccttttagatctagggaaaagggaagggaaatgctaagcatttctttgtgccatccaaacagagcttaaagctgtttgaacaaaatttggaaaagaattatatgcctactgttggagagggttcacaccatgatgattgtaatagcaacaagcataagttcttagaattttcataatttgagttgaataaagccggtttgtttagcatatgttctagaaaccggtgtctcaaaaaatgtaaaggtgctttttttttacaaacttgagattatgataagttgcaagcttgacagtttgatttgtgtgagcaaaaccatgtgatgctacctctattgctagttatgcatgagtatgcatgtcttggtgttattctcatattattattatttctgttttttttttaatacttatcctagtaataatataactccttttaatcaccagtagcatgttttcatgactcaatgattagcagtttgtacttgtgcttttactttttatttttttaaattttgatttttgcttccttttcgtgtttctaattttccatgacctgttgttgccttctaggagctccttgtg

SEQ ID NO: 98386 - DNA, 1067 bp, Vitis vinifera
  Intron number 2 from transcript GSVIVT01026550001 (locus G SVIVG01026550001) derived from phytozome v7.0 (chr-ID chr4 ; pos 21941542 to 21942608)
agaaacagtaaagtagttgaagccattagagatcagctttttcgccctttccctacaacagtcgaggtaaagaagaaatgagaagaatagatgagtcgaagtcactatcaaagtcaaagtatgcaaagaaaagtctttggaacgaagcgcattagcgtggtgtggctctctggtaagtccagtcctcattttctttgccctggaagaacaactgttggagattatactagatttcacagatctgaaacgttggatcttcttgatcttccccagaaagctatcttctgaaatggtggtctaaccctatttcccagaatgagtgggctgttgatttggtgaataaaaagaatgatgtaacaactagattaaagaacaataattaatcctccctccctcttgtctttttcattttatttatttattttatattttatatttgaatgtaaaccaaacttttataaggaaagggcaaaggagtgacgtctttaattctaatttgacacggcttacctatattatttctaatttgattcattgttacggcagccattttccaagagctgcatatttggttcagaaactctgtgacagtgacactaatgatgatataaaattatatatttttttaagtctagtttaactcagcagcacataagatagtgatactaataatatataaagttaagcctaactctatcagatgagttctttatatatattcacgatttactaacaaaaaaaatcaatttgacattgatttacatattttatctgaatttcattaggcaatagtaagataaaaataaaatttacacttgaattttcttaaaaaaattgaaccaatgtcatgatgactaaggaccacatcatatgaccgggaagaagggtttgaagttttgacttcttatgagagtattgaatagattttgaagttacttcttgaattttgaaaatttattttttaagaattttttatcttaatataaatgaaaataaaattagattgctttgaagtgttggagattatactagatttctctgtcttttctgtttccgccctttcccta

SEQ ID NO: 98387 - DNA, 827 bp, Vitis vinifera
  Intron number 1 from transcript GSVIVT01021772001 (locus G SVIVG01021772001) derived from phytozome v7.0 (chr-ID chr1 0; pos 10904054 to 10904880 reverse strand)
gggttcccggtctccttgaacaccaactgtgaaacgtaagtacataggatatgcccccatctgaaacatttgaatctgatacacaaacaataatcccattaaagaaaagtaatgctaaaaggatatgctattgatataaattttttggttttgcaggatccactgaaatacttgggagttccaagttgtgagtggaaggggtgacttagagaaaccaaggaatgagttaaataaaacagattacagccatgtttcatggtgcctatgtgagacccttgctttggtctcaatcatgtaatcttcatccagtttcaatggatcagttccagtttagtctttgatcatcttcatcactcatccttactaatttctaaagctgttatcagtgggatcatattcaacttttgcatgagtaggcatgattcatgaaactgagactgtggtatatcataatagtaatcgggaaaaattcaaggggctgaaaattaaatatgttgtgggcgaagaaataatttgcaaagcactgcccaactcccatgtttttacagttctttctagctatgcactctaaggctgttaaaaacaataacacatgcctgaagggttaggcaacaagtgtggtgaccttatccttcataagtaattgatgaaccataactttttttttttgataaccgtggatgtccgggtcagcttacgcgcacctcgactaatcccacggggttctgaagttaacgaccgggtaaacctctagtggccctgaggggactcgaactggtgaccattggggagcaaacccaaagccggaccaactgaactacccctca

SEQ ID NO: 98388 - DNA, 776 bp, Vitis vinifera
  Intron number 1 from transcript GSVIVT01026395001 (locus G SVIVG01026395001) derived from phytozome v7.0 (chr-ID chr4 ; pos 15584860 to 15585635)
cacctaatagatttgcccttcaggctccagtcttagtttatttccacttttttatttttttttattttgttagttttgatcagatcttgtatttttggaaggatttcttgcccttctttttataaaatagaactcttcggtgtttttaatgtgaattaggttaaactaaagcaaggactgaaaattggaatgagcatctctagtgaggggaatgggtatgtgcaagtaagcctgtaaaaccctttatgtggttttattgactgttttagttatgtttgttatatttcatgcttatcagaaagaaaaattttcttgattaagatgattatttgaatattgaattttccataggaaagccaattatgcaattgtgttaatattattatctggtgtttgtggagagattgggtttgtcatttcttttaatataaatgatctcttctcattgcatttattctgtcaggatcattagatggaacattggcctttcaagcaatttataatgcagggttatcggttatcttagtgttaatgaatgctagactagatgattctaccggttattaaccaaaaataacacccttatgcttaatttttttggttttccttgaggaaattctacaagaagagatgtttgtgctgttatttaaattgatcagaacgttgacatgcttgattatccattaattgtaggagtagggacatcagcatatatagtttactaaaaagcatgtttctttcagaattgattactgacaggtactagttttttgcat

SEQ ID NO: 98389 - DNA, 298 bp, Vitis vinifera
  Intron number 2 from transcript GSVIVT01029819001 (locus G SVIVG01029819001) derived from phytozome v7.0 (chr-ID chr1 2; pos 15314984 to 15315281)
ggactcgtcttgcacaggttagttctatgcatgtatatttttttttaatcaaaccaggcctaaaacatgtctaaaattgatcatataatttttgttacaactatatgttataatattaataagtatttaaagttttagttttaatatataatagtggtagtgatgatgaaactaatatgttaataagatgcatcttcaaatatcaagtatagactaacttctgttttttcttcttcctcttctttgtttacttctcaattcaggcacaccaaattcgctttgagcttcacaaaggggt

SEQ ID NO: 98390 - DNA, 607 bp, Vitis vinifera
  Intron number 1 from transcript GSVIVT01019730001 (locus G SVIVG01019730001) derived from phytozome v7.0 (chr-ID chr2 ; pos 2794321 to 2794927)
ggacgggtcttttgggtttgatctcctctgctcctgtgattcctcaatctcatttccatttttatcattttttttattaatctagtacactgctggtttgattgcaaagaaaaatgtagaaatgaaaatcctggggttagtaactgattgggttgaagtgtctgttgcaatattccaagaggagcatgagggttcattgcggttgccatctttgttgtggcaatagtaatatcttttgcctggttattttgaaccgggtttaaagtgctagtaatggtgtttagttttcttgttaaagctgtttcttttttccgtctctgttgtggcaatagtaatatattttgccctctgtggtggtgatatttagttttcttgttaaagctgtttcttttttcttatttgtttcttagagaatagcatattggtatattggtttaaaattttttaaatttggcatgcttctcatttctttatcttatgtttgctctgtaactgaatccttgtggccttacaaaatgcgttgagctttttccttataagtatcttgactctttccacttgtctttttgcagctccaagccccgtgttgtgttagttcccttaaaca

SEQ ID NO: 98391 - DNA, 865 bp, Vitis vinifera
  Intron number 2 from transcript GSVIVT01026455001 (locus G SVIVG01026455001) derived from phytozome v7.0 (chr-ID chr4 ; pos 23355637 to 23356501 reverse strand)
ggcaattatccggatctttggggtcaccagggaaggttagtcggaatgagtaaaggaaaattgaaattttcacagcgaacaaacagaaagtagttttcgtctctcatttaattcttattacgattggtcatattcttttctccatttcccggtagtctatcagtgttgctgggggtcttaacttatttaaattactgaatttggaactagaatttgcagttctagtgtctaatttcttcatagttcacgtaatttgtcatgattttatctgattttatcagcatacgatataccttttccatggttttttggagcctgaatttcagtatctatatagatatacagttcatccactttttacaaagcatggtcaaattttgaataaccttctctcaggatgctgattttttctcaactctctagtcgtttgtggcatggaaagtaatcaaatagttgtatcagactcagcctatggaaagttagttgttccatagggtcctcaaaagtgaaaaaactaatattcaaactagttgttccatagactcagcccatggcatttggaaactgtttgttatgatctgtacctccataaaagtacttagatgcattatggtagcattacgataaaactatcataagcttttctgataattataaatccacaacaagatatcttttgtgtatcactcttttggaggatatttaaataatgggcattgtggtactactttgtttggtatctaggagtttgaaaacaattatgccacagttattttaggaatataatgacgctcttgggactatgctccatgggaattaaagaatttctgtattgtttattggttaggacatagtgtttgctgca

SEQ ID NO: 98392 - DNA, 405 bp, Vitis vinifera
  Intron number 1 from transcript GSVIVT01024930001 (locus G SVIVG01024930001) derived from phytozome v7.0 (chr-ID chr6 ; pos 5949630 to 5950034 reverse strand)
agcgggagctttcgagtactttgaggaacttgaaggtaaaacaatggcagaccactaataattcttggagtaattttctatgtgtatttttcgtcgactcctgaactgggtttctctttaatctttttgggtatcctttgtttcttggtaatttttctttatgtttatgaaaattcaacttatttgagattgttttgacattctcaattgaagtttgaactgggtcttgcttagattcatctgagtgctctcaatttcttgattttaacgtgagatttaaaccgagtgttgcttaaaatcagccagtggtcttccttttcttttcttttttatgagacgcctaatttggccttgtcaatccaagaagtgattttggatatgtacctcttttgtttattacagttc

SEQ ID NO: 98393 - DNA, 481 bp, Vitis vinifera
  Intron number 5 from transcript GSVIVT01027583001 (locus G SVIVG01027583001) derived from phytozome v7.0 (chr-ID chr1 5; pos 15342902 to 15343382 reverse strand)
tgtctccgctttgctaatttctcagggtgtaaccagtgagttcatgatcattaatgattcttgttaatgtcattaatttcagaaaatgttttcaaaaagtacaatttttgaaagattaaatatagaaaataagttctgttgagaatcaaatgcttgtcaacaaaggaaacctaaaaatagaagtgaaacagaaaacaaaaggtgggagccattttctggtataaaaggaaccaatgatgataaaagtgtttggaagcctagaaaaacacatacacttcgcttcttctacgcgcaaaacactcgtccattttataacagtatctagaaaatttaatttggatactatgtttacgtaaaatattttgatgatttccctagtttaggtgagagttgaatagcttaacctttgccttcctttatttttggccacactgtttgtggttttaaagcaagctcataggagccaaatacttcaagctgg

SEQ ID NO: 98394 - DNA, 897 bp, Vitis vinifera
  Intron number 2 from transcript GSVIVT01019870001 (locus G SVIVG01019870001) derived from phytozome v7.0 (chr-ID chr2 ; pos 4082777 to 4083673)
gcaagggtatgcctgataagtttttataatccattatgcattgctcaggattggatatatcctaaaatgacaaaaaacctaaatctgtgctaggcattgtcttaatgaaagtcattttgccctttagtttgcatgaaaattatctgaatattagtacatgatctgtgatctggctatagtctgaattgttttagttagttaattagttcattaccaggtcctggagcctatggtaacttaaaagatttggtttgatttttaattcacaacatgttgtacacttgtaagatatgcaaggatgatttgattaattcaatgattaaggaaccatatagtttggtagagtgcaagaagattcaataaccttatttaaactgggaatattcaacttagcagcatgcaggaatacatttggagaaacctgaatagtgagagaatttactttggctagtatctaaatgagggttgaatatgctaaagaactgtaagggttaagtgtcggaataatattgtaaaagactaagaagtccctattgggtattgaagagtcatgtgaagattgaaggagatattataagtttcattggttatggtaataacaaattgatgaaattttgggttgatgaagttaatgttattcaaattttttgctgttattcttcttcttcttgtcttattattattgttattattatcataagaattattatgattacaattgttgttgatgttgttattattactattaccactactattaattttattctgttatgttattattattagtattgtcatttattgtttttttttttttttttttttgagatgttatgtgaacaccttcattgtgcttccaatctgttttcctccaggtattacatcaactacaaattg

SEQ ID NO: 98395 - DNA, 800 bp, Vitis vinifera
  Intron number 1 from transcript GSVIVT01021379001 (locus G SVIVG01021379001) derived from phytozome v7.0 (chr-ID chr1 0; pos 4660644 to 4661443)
ttggaaatgtaggatacaattgctagattgagctgtggggacgtttctgtggtcttgttttaattgccaacttttcatactttgtttttgttttgtgtccctttttggtgtaacctgatgttgcattttctggggtcgtggtcttattgacatttattttcctaaggcaattgaaatttgtttgaattataggttttacttatgtatgtctgtgttatattttggcaccaaaatattattatttcttttgatttatgctatgataaaataaatactatgcatactgaaatcaagttggcctaccaatctagtttttagggtttgtgaggtttcaacaatgttacatggagtagctcaaaatcccacaaaccctaaggactaaattggtagaccaaattaatttcattaggagtctttttttttcctttcttttttctgtttgactcccttttctaagcatttgttgcattttataacctatagcattgttcctaaagaaactcaagttaccaagcctagactccatgttactgtcaaagcctcacaaaccctaaagactaaattagtagaccaaattggtttcaatgccagtccttttttttcttttatttatttattatttatttttcttttctaaacacttctatattctctcttcctcaaattcaacagtcttgagtaataggtgaaaaataagttacttaaatttgagtgcaaatgtcattttctttgcttatttttttttttaacctattaggaatttgtcttctacttttcctgttaattttaataggaagctg

SEQ ID NO: 98396 - DNA, 886 bp, Vitis vinifera
  Intron number 1 from transcript GSVIVT01027527001 (locus G SVIVG01027527001) derived from phytozome v7.0 (chr-ID chr1 5; pos 15974170 to 15975055 reverse strand)
ttcattgtccttccccaaaaccaagccgtttgtcagtgagtatatgatggatattcgcagttccttgaattgaggttttcagacactgaatttagatgtggtatgagtgataaaggggtttaggggattaccccatcagatgtttttcttagcttctttgatgtctatttgtatgtgtaatcactcctttatatcttggttcagctgtaatggaacctaatcatgggttgaaaagattgcccccttttgtttgatattcttatgagcctctctgatgtcaagctgcatgtgggttcattattttatagggtttgagctgttatggaggaaattatccattgtccaatttgatgttctctttttatagggcatgtgaaatcactcttttgtaacttagattgaaccataagggagcatgatgacatgagaggttaccctttttttatttgatggcattgtgcacttttgtgatgtctatcccttagaaatcactttctatagtagcttaatttgagctttagtaggttcaattactcatcattgatccagtgcttgaatgagctttttgaatctttccatttactgattgatggtgggacctggttcatggctgttaggcaatgtcgagtcattaatttggttagtgagctttgcattctgttctagaaactcctgttgggactctcatgaagttgaactggaattaagctgatctgtcaggtttcaggaattttgatacctagattttgttcatcatatgggtttttagctgtatttttgtgctttacattttgattgaaggaacttctatttgaattttgtcaatatatttatataattttggtatattggcagtggcagcattgggtgaagatccaatccgtga

SEQ ID NO: 98397 - DNA, 1020 bp, Vitis vinifera
  Intron number 1 from transcript GSVIVT01027766001 (locus G SVIVG01027766001) derived from phytozome v7.0 (chr-ID chr5 ; pos 7506733 to 7507752 reverse strand)
agatttgtggattttttttttcaaaattcataagtgataaatataatctttttaatcttctaattaataatgattttatatcatatattatataaatcttttcaatttctcattttatttaataaaattaaataatttttttttacaaaattttaaaattaaaaatacaattaaaattaaatataattaaaaacaaaaaaacttaaaaattttaaaataaaaatatttactcattctatttccaactcttttttgatattcatattttttatcaaagtgttttaatgaagtaaaaattaatattttatgctgtatttttcgtattaaagtattatagttttaattttttgaatttcttattttattaatcttaaatcatttctcacaataaaaagttgttaattagtgttataaatatgtcaaatgatcattttaagaaaaaattatttaaattataaaaatacatgtattttaaaatttttttaaataggtaaagataaatatgattaataaaaatttaggttatttttctatatttttttaaattagtgaataaaaacctacttttccatgtatttcatatttataatatatgtatcccttttatacccaatataagatataattttattcttttttatttacaaaagataatttttaattgtctcaagaaattttgaaaaataaaacatcaagccttttccaaaatttttattttatttatttttaaataaataaaaaagataaagtcgaaacttattttttatcctaatttttatttttcaaaaataaaaatggaaatcactcaaatcagtaaatcgcgtattttccagttaattaaaattgagagggtcaccggacccgaatcgacgacgacagaggcgcgtgggaaaggagtaggtgcagacacacgtgttggtcaaaacaggaagcggcaactcgccgtcatacttattcaaacgtgttccacgtggtgccactttagggcctttgctgggcaattttctttcaaaatatcca

SEQ ID NO: 98398 - DNA, 880 bp, Vitis vinifera
  Intron number 1 from transcript GSVIVT01027175001 (locus G SVIVG01027175001) derived from phytozome v7.0 (chr-ID chr1 5; pos 17247460 to 17248339)
ggcgaatccgatccgagagttgcagagacttgcaggtgcgctcttcttgaatcagaataatattatatattagaaaacttaattattggttatatattatattatatttaattaaatatttatcctataaatattgctcgtatgaaattatagttttggaggttgcccacctgagttatgatttctgccattagcttctacctaaagacctaaataaataaatataccaaaatccagctagaacaagaagccgttaataaacttgggttatttggtgcactttagtttagagtgaggtcttgggctaacgtgcgcgacaatatgattctcttcacccgcgcctgcaaaatgtttacgttagtggggcccttttgctgtatttaacgtgcgcagacgggtgtccttgggtatctaacgtaggccccacgaactttttcgtccatattcggtaatcaatttctcggtagcctcctaatttgtagtaggtaacttatttatttattcaatgacgtcaaatgttttcacttcctcgaaattttaaaatcttaaaataaatttttgaaagtacaacgtcaatttccggtttttaataatttatacagaaatttttattttaaaaaaactaaaaaatagaaaaaatatatttaaaaagggaaaatgaactcatttgtaacaatcattggatgtttcttagcataggtatatggaaagagtgcaatcggtgagggaaaatgattgattttgcaatcaaactcaaggaggagattttttgtatgtcatggaggatgtgaatttttagaaaatggtcctgaagatatattaggatacgcgttttcctcataaattgattttggaaatggcaggtacttggctgaggttc

SEQ ID NO: 98399 - DNA, 963 bp, Vitis vinifera
  Intron number 2 from transcript GSVIVT01018957001 (locus G SVIVG01018957001) derived from phytozome v7.0 (chr-ID chr4 ; pos 18380522 to 18381484 reverse strand)
cttttccaaggtcccattcttatcctactcatctttctgataaaaattatttatgcatttagatgcttgttctaagatttcttgttattctatccgcgaaacctgaacaaattcatgttaggactgctttaaactccgatcagtgtgaagaagatgcataaggaactcataagattgtgtttgtttgattgaaattggagttgaagcaattctatccattgtttgcttggtttttatgtcagtgaatttgaattgaatttatccctggagtctaccaaaaggaaaaagaaaacagcaacatttcgatttgcaaattccatataattaaaattccaaatcaaatcaaattcttggcaagcaagcatgatctttgcatgtccttaaaccatttcaagattttgttttgtaggaaaactaatgaataaatttgatgaggtggtgattaacagtcattatgtattggaaatttcttatttaaggtatgttttgagaaggtcttaagaatacagggagagagggtcagtggttactcttgatcatctaagagggcttggtgataaacctttgatgcaagtagtaggatgggatccaaacacctcaagtatataaccacaagataccctcaggcattaagcacaatatcagcaatggtaccccatttaaataaaactgtactgttgcaagcctaaaactttgacaatctcatattatgaatgttttagttatttgagttctttaatttcatgtttaaatcatcctcccttcaatttttagcaaatcaaaatagtatccctagaacattagcttttcagctccttcaaagttttgaagatatcctcctcgcctccaagcctagtttatttcaattacaaatctattatctctactaatgatttttagcaccatgagtttgttatgactgatttttatttcttttcatgcattgtttttcaatttatagat

SEQ ID NO: 98400 - DNA, 624 bp, Vitis vinifera
  Intron number 3 from transcript GSVIVT01020136001 (locus G SVIVG01020136001) derived from phytozome v7.0 (chr-ID chr1 ; pos 9961250 to 9961873 reverse strand)
aaacgccctgccgtctcgtcgcgcggcggcgaagggtaagtttatctctattcttctttttctttttttctttttaaatatttttttcaaatatttttttttgggatttttttatgtgttctctttccgtgatgtttgatgcgttcttcgttttagattagtgaattttgacgattattagcaatgggattaagctcctgaatcgtatggtggaaatttgggtaactttttttggggatttgttgcgtttgttagtttagtaaattttattttccccttattttgttgtttggtttgggtgaaagtttatgaatctcttgttaaaaaaatattttgacttgctaagaaaagatctaatttttatcaaaattttctttcaaaattccctcagaagtttatcatacaatattgacatgacaattgaaagcagtaattcttcttctttgtatgcgtacattgcctatatatatctctttctttttatgttttagtagaagttttttgtttagcctgaaaaatggttatccaggcactgatccatcttttaatttatcttctttttttttttttggtaatatgtttgcttatttaatgtttgggcaatgaaggtctggccagccccaa

SEQ ID NO: 98401 - DNA, 932 bp, Vitis vinifera
  Intron number 1 from transcript GSVIVT01027730001 (locus G SVIVG01027730001) derived from phytozome v7.0 (chr-ID chr5 ; pos 7298018 to 7298949 reverse strand)
tgttttatagaagtattataaaataaaatacttcaaataaaaacacttgtactagtatcacagaccaactcttaatagatttagaaaaaatataccaattgagtcacataaaactgataaattcttatctaaaattaaaggtgacaaaatttgatcgatcaatataataataacccaacacattttttacaaatttggatttaatataaatgaatttaaattaataattttgtgttgatctatgtaatccttttaataaatagataattttttagtatatggataatacaaatttgactcattttaaaatctaattattaatttaattatagatttaaattatttaatccatatttactcattttaaatttatttttaaatgaatatgttaattgaatcataaatatttgattaaaacattaatcatataaagatatatacctaatttaacttggttataaaatagggacctaattattaaaaataacgtgttacctttttaattattaggtgatattagagtttatgtttttaacgtgattattatttatgtgggtttgaattcagctgtggaggagaaaaaccggggtttcttaactacacacaaacacgaccaatgtgaattgcaaccccaaggagacaaaaaatgttaaaaacatctcaaagggaaatctctctctgaaccaagcaacgacgtcgttttctttttcttttgccctttttcttcctttgcgctgtaccagtaccaggagacgttatcttcctcgtataaattgagggaagaaatcaggaaacggagtaaaaacaaggaaattgacaaattgtttagagagaaggaaaaccttaaaccgcagggaatagctgaataagagtgttgattaactcatcacatctgagacccaaatcgcgccttcgctgcaacactcttcatc

SEQ ID NO: 98402 - DNA, 1006 bp, Vitis vinifera
  Intron number 2 from transcript GSVIVT01023236001 (locus G SVIVG01023236001) derived from phytozome v7.0 (chr-ID chr1 2; pos 20812344 to 20813349)
agttgtcgcattttctcgcgacatcaatttctcaggtgatttctcttttttttttctttttctttttcaaaacgctgcgttttgatgggcaaacacttgtgcgctagcattttcaataacattgtatgatgtttaccaaatttctattatcaatacatagcttaaattcattctcttatattatatttgattccggaaagcactaacgaaagaaaaaaatacgatgaaaaataatatttaattataatatgcaaaaggttaaagaaaataatatataattaaaattaattaaaattttatgcacttttaaaatatttaatatctatttttcttctctattttctcttttttccattttcttttaaattttccaaagccaaacatagcccttaagcgatagagtgctagaattcaaaaccctgattaaaaatttgaaatacaaactcttaaacaattcaatttcatgcatttttcttacttaaacttcttctccttttcccattttttttcttttccgcaaatattgtttggttcttaaaattatatttaattcccataaaatattaagaaaataaataaaaaataactttaaatatcaaataaaatcaaatataattaaaacttattaaaatcttatatatttttaaatatttaatctttatattaaatgtatttaaatatattttatatttatttctttttatcctctttaattttttttcttacattttttttccaatttttgtagaaaatggtttaattccaaaaaagtatatatattaaaaaaataatttgtttatgtttgacttaccattataactaaaactaattaaatatttataagttttaaaattatttaatcttaaaattgagtgaaataaaattaaatccatatttcttttcctttcactttttctttcctaccaaacaatgggtaagggaatgttacgaactagtcttttatggttatttgcagagctcaagcaaaaagttacttctctatttg

SEQ ID NO: 98403 - DNA, 200 bp, Vitis vinifera
  Intron number 1 from transcript GSVIVT01025159001 (locus G SVIVG01025159001) derived from phytozome v7.0 (chr-ID chr6 ; pos 3880367 to 3880566)
ttcaacttctcgtgagtactgggccttttcctttttgatcgaaatgcttgtgttttttcttcctactaaattcccccatttttacctcccccacctcttcctttgtggtccataattgaatttgcttttgaaacaggataataaggagaattaatttgattttgatgcttttattctcttgaaacaggctaataaggaga

SEQ ID NO: 98404 - DNA, 411 bp, Vitis vinifera
  Intron number 2 from transcript GSVIVT01022507001 (locus G SVIVG01022507001) derived from phytozome v7.0 (chr-ID chr8 ; pos 4127502 to 4127912)
aattgaaggctatctgtcaagtactgtatctttgaatcataactttaatgtggttatattttaaatgcttgtttggttgcagagaaatggtaaaacaaataaaatatggccctaataccttttattttggaaacaagaaaagaaaattcgtcactcatctgaatctagcacaagtatttgattcgctagaggttttgatttccaagtaaaacaatagaaaaacatactatttgaatttgttttctgtcatttctgcctttttcttagtaaccaattaattggttagtttaaaactggagaactttgaaaaaatctttagctttggattttgaagttgaaagtaggatgttgttgcaagtcattaattttttttccttatcagatgggttatgatactattagttgtacagg

SEQ ID NO: 98405 - DNA, 802 bp, Vitis vinifera
  Intron number 1 from transcript GSVIVT01030367001 (locus G SVIVG01030367001) derived from phytozome v7.0 (chr-ID chr1 2; pos 5037354 to 5038155)
atctgtgaaagctgccattcttgggaagaacataggtaaatgaaattctctcctctaatctcccttttttttcccttaattggtatgcttgtctttcaatttcagacttccaagagcctgcacttggattggaaatttttaagtgactgcactttcacacttagttttttcctacaaaaagccctgcaactactataaaccacccaattctctgcacctgtgaatcagaaaactttacccaaactatattgcatccaattgtcaccattaaaaggtaatgatatcatggcacataagagcattcccatttttctggaagttggaagacctcaattatttcttgcttaattaattggtgatattcctgtgcttccatgtttgaattagtgtgtccattgtaatctccttccatggatttccttaggtgtggccacccatcaagaagagatcaggaatagtccagaaatattactgtcttattctaattacatgagtatctagcagtaaagaaatatatctgtagtagctgatttttttagatgggtcctctagtagccgatcgaccttttttctttacaagaaggcttctattgtgacttgtgaagacaatgataaattgacaatatttctaattatcatttggatttaggagcatattttaccatatattttgttctcacgcgtggcaagattttcatttaatgtgttatcatcagtcctgtgagcaccaaaaaattcgcttaaatatggttcacacttctttgtttgtttgtttccatttttttgttttgggcgacgttag

SEQ ID NO: 98406 - DNA, 956 bp, Vitis vinifera
  Intron number 3 from transcript GSVIVT01019388001 (locus G SVIVG01019388001) derived from phytozome v7.0 (chr-ID chr2 ; pos 245110 to 246065 reverse strand)
agaaggctgtgggcctcggtggttggcattggctggtattttccctgattcctttcccactttgttttttaatcccatgttcagtcatcacagaattggtatcgttttgatttattgattctatacgctactttaatacttaaaattttgtaatgatgaagaaccacataatgctaaacttcagtttcccggaagtttctgaggtggaacccctctagattcctggagtattataagctaatattcaaaatagaagagtctgtctcaactcaaattttatttcaatttattttgtatttatctgtggaagctgttctattccttggtttcttcagtctgttttacttttaccatttagtttgtggtcctgaattgttgcaaagcttacgtctttagttgttcaagtgatacaattaaaacaaaattggaaaaaataaatgtagggattttatttatttatttttgtgtcgtataagggacctgaaattggaatgtgtttgtttcccaataggagggtgacagtaccttgaaccgtttgtgttgaactatgattcgattgctttagttatcaacagtaatggatctagagtgatctgtaattttttagggctgaattatggttgttatgataccctaagaaatcggtggtgcaatattatatctagaagtttaaaaccgtattatatcttgacttttcgaagtcttgttttggaaggcttctatttaaccctatataaattggtaaactaaccctacagaaagaattttattgtggagcgaatagagcccggatgaagtagcattccttttcttctggagattattattaaatagcaatggatgtattaatttcttcaactctctgttttgtgcttcaattaattgattttcatctattaatttctttgatgcattattgagattatttttgtttttgacatacaaggttttgaaga

SEQ ID NO: 98407 - DNA, 740 bp, Vitis vinifera
  Intron number 1 from transcript GSVIVT01026758001 (locus G SVIVG01026758001) derived from phytozome v7.0 (chr-ID chr1 5; pos 6367518 to 6368257)
aaaatcagggatttaccctattatcagcgcaatcggtaatcttctctacactcctttttctgcttttctctttctttccctagaaaatttcatgatgcgcagaaaacaaaatttcaattattcgtcttcttttcggctgtcaaacatggtaaatgaattgttttgaattatgcctagagagcaactcagttggggtttctgttctctatttccggaaaaagtgccttaatggaaaggaaaggaaggaaaattttaatttgttgtattatttatttatttattttcttttccttgcagcacagtgggaaaaaaattgaattgttttgatcagtagagtggttatgcattatagtgccgtaaggcagttcaattgggattttttttttcttttttgtggactttctatgccaagcagagcattagagaactctgaagaagagtagaaaatgagggctaagagattcataattttcttgggtgaaccctataataatctctttgaaaactgtttttagagatgagaacaaatcgggtctgatgttggagtttccagaacatgaagtgaaagtagttggaaaggttcaactgaatggtggttcttataatttgttttgcaatctgctttttgtggggtttttttaaattttctgtacctgtgcatagtttatgaaatttgatcattcaggttcatgcataataaaccaacctatataagatataaatgtgcttttgtttcaggt

SEQ ID NO: 98408 - DNA, 519 bp, Vitis vinifera
  Intron number 2 from transcript GSVIVT01024957001 (locus G SVIVG01024957001) derived from phytozome v7.0 (chr-ID chr6 ; pos 5678010 to 5678528 reverse strand)
gtcggtgctatcggactattcagtacccagaatttgtaagtcttttgttttttgttttttttttttcgcttctataattataatttggtggtgtgttgtttggttctgggcattttggttttaatggtcatgggaaattgtattggtttgagcttcaaggtattgaaaaaaattactggacatgtatgaaatcaggaatagtcaaaagggttatatagaaaaattgttcaataattctgacattcggttttaatcaaattcaataatcatcctactgggtggaaaatcttttagaatgttcttaggcaacagtgttcaaactggatggttggaactcaaacaggggcaacaggccctgtggcctagtggtatgattctcctggatatcagtggagatcaaggtttgattttggggaaggggaaggaggggaggggaaaggaagaagcctagctattagggaatctgggccttcaggtaattacattcatgaagtcttatggtgatcttgaaaatgcaga

SEQ ID NO: 98409 - DNA, 712 bp, Vitis vinifera
  Intron number 1 from transcript GSVIVT01024346001 (locus G SVIVG01024346001) derived from phytozome v7.0 (chr-ID chr1 6; pos 1260032 to 1260743)
gcctccaaatcaaagtcagtgccctctgtctctacagatctgatttgggaattttgggttgtgttgtttggtgcttgatctttttccttgtgggtgttggtaatttgagtttttggttctgggttttttcttttttgggtgtgttcgatctgttggggtttcttgtttcatagttttgattcaaattgtgactgtttttctctcagtgctttctctcactttattctctttctctgggttttttctgcttttttttttttttgacttggtttacatgtgggttttacttcatttgccgtttctctcaaccattgccatagttcattagtgttttttcttgtggttgtttttgttttttgggcttggtgggttggatctgagtttggagtaatgtttttttgcactaatttcatgtttgatttgtatatactctgtaactgtaaaagttcatcacttcaaattttgttgtgtgaagactttcatctagcagtgaacttctgatgctgaatttcaatgcaaattttcagtttttggcttagatccatctccctttgtgtacccttttgctttttatttttattttaaaatgggttgtgtttgtatatcttgcattttgtgtttcctgtaataggtcttgatctgattacgtgctcataccatgttttgaacttgagcagatctactttatctgatactcccaatagcaagcctt

SEQ ID NO: 98410 - DNA, 760 bp, Vitis vinifera
  Intron number 1 from transcript GSVIVT01023918001 (locus G SVIVG01023918001) derived from phytozome v7.0 (chr-ID chr3 ; pos 2499217 to 2499976 reverse strand)
caacctggctctttccacaggtaatttcttctgggacctttcttttccttctagtttcggtttagttgttgagaaaatgtgggaaaggataggaaaatgaaaaagttggaatttttttctttttcataatttgggaattggaaaaacagagattttgattcagctgtgcttaacacgactatttggattaactgaagcggggtttcatttcttggcaagttaaaagggcatatgacctaagacccagaatttatttcgttgtattttcctgggttttcttagaaaccacacaggggttattgggaggcgcttctacttgggccgttttgcaatctattttacaacaactatggattgctgactctactagtgctgtgttgcttagattcttttcaatggaagatgtttgtccattggtcttgattatagtttaaacttgggctccaatttagtgaatttggtaaagaaacccatgtagaatctgaagtctgatgattaatttccctatttctgtacccaataatcaaattgatcacgaagtaacctactgtttagatgttaaggaatcagtttctgaaatggtgaaggttaattttggccttttatggttggattagccaagtgtagattattctatcttgcttggtacttaggactcagcttgagtttctgtattgctactttttttccatgagttttttgacacaatatgattacaagttgctgaatctttactttcaaaatataggttgccgggttt

SEQ ID NO: 98411 - DNA, 727 bp, Vitis vinifera
  Intron number 1 from transcript GSVIVT01019816001 (locus G SVIVG01019816001) derived from phytozome v7.0 (chr-ID chr2 ; pos 3567333 to 3568059 reverse strand)
gcgcttccgaggacgttgccgttaggaaactccaggtatttcactttcctcttgaggaattcctgctctgtcgttatctctgagggttcggttgaatggttggtaaattgaggttttttttttttttttcttcagctagggtttctgttgcgtcgtgttgtcaatttttttttaattaattaattatcattgtttctgttttgcgcatcatttctcagttgactctcttgatcgcgtgttgatggtggttagaacgtagatcgagtgtgttccttgattttgcgtgtgcttcgcaattgcaactcttttttattttttattttttatttttatagataatttgttgtcttcctcgttggcgtccaccctctgtaacggaaagaatgaaaaaattggtagaaaagctctgtgatcaaagtttttatgttattagtctctgttttgtacacttgaatgaaaatacaagtatgccggacctagcttgttgagaagaatcagtacatttgtaccaaagaagaaaattagtttttacacactacttaagctttgagctttctttgagaccatggagctttctgtacgcatgatgaagaagaagatcaaactttttatagatgcgttggatttgaggatactcctagttaattgttattcctactgaaaaactgagttttcggagtccatttttccgtgttatttaacgttaatcttttgggtattcaggagc

SEQ ID NO: 98412 - DNA, 951 bp, Vitis vinifera
  Intron number 3 from transcript GSVIVT01030416001 (locus G SVIVG01030416001) derived from phytozome v7.0 (chr-ID chr1 2; pos 5409287 to 5410237)
ccattggctcatattatcagacatgtatgtcatttttatttatctaacttgctccttctcaaatatcttgatagatatctggattgatggcaattgtactgggtgttagaacttggcaaattatatacttggggagagaagatactgtctaactcatttaataccaatcaggtgcctagagttgacaacctcttgaacagcacagcccttaatgaaccctgctgaatggatccctgttattatattttgcctacttgacaccagaagttactgctgtttcttacccttctaaggctgagcccttgattaagattttcttctcatttagatattctagactaggaaaaggactaagattcttacccttctaaggctgattcatgagttggtcatcctgtcaagacctcaatgggccactgagaattcagttcttctgggagatcaactttcattgttccagacatcattcttgtcatcattaaaattcccgtccccatttttttttctttttctttttcttttttgcataattgaaagcaaaaaaacaaaggaaattgtcttctttttttttttttttgtgatagatataggaaaatgtcagttctttacatgttgcaacaaaaaaaaaaaagaaggaaaaagtgaaggaacctatgcttgttcccgcaagtgagcaaggatcatattatccctcaattcccatgtcagttctttacatgtattcatcagaattcccatctgataatccactaagagccccctaggtatcctactctccgatgaggataccattttctagatggagtgataggaggttggaggggcttggggactttgcattcaaccatataagttggatacagaatgatcctttgactgaattttcttttacattactaattttcaattttggtattgtgctgttaaagtggtttggctgcctgtgtaggt

SEQ ID NO: 98413 - DNA, 183 bp, Vitis vinifera
  Intron number 2 from transcript GSVIVT01024638001 (locus G SVIVG01024638001) derived from phytozome v7.0 (chr-ID chr6 ; pos 8140905 to 8141087 reverse strand)
acattctcgggtagggtcaataatttttcttttcgttcttttgatgctttatgctatataatctaaacctcggctggggacaatagtgacaatgtgctattttggaagtatgtttttcaatttacacagggtagttgatttgagtaacgtgatgttctgttgcatgcagatttgaccttctgg

SEQ ID NO: 98414 - DNA, 845 bp, Vitis vinifera
  Intron number 1 from transcript GSVIVT01024638001 (locus G SVIVG01024638001) derived from phytozome v7.0 (chr-ID chr6 ; pos 8141146 to 8141990 reverse strand)
acaagcccacttgtgcttttctctttcctggtcaggtgagttgggtttgatgcgaaaatttccagaatttttaattcctttttgtaaattgaagtgaatttggagttttggtacagattaggtcggaaagattgtgaatttttagattttggcattaatttctcccgagctttgatacatttagtgatcaattagggaattaaagaatcagcgaaagggagataatgaagcaggtgtgcttgtccagaattgaaattcgcatgttgtttccagctttgttgctgatgaaatttgaaagtcaattttgcaaattcatctgtccatggaattgaatttcggatttcacaggcatgatcggaactgttgttgatgtactaagttccttgctagtcttgagctgttatgaagtactatctaatgtaggaggacggaacaattaacgtcttagatcgtgatattgtagcttgcatgaataaggggaaaaaaacctactgtatttttctttataaacagcataataccatctatttccctgtttaatgtctcatcttgacaaattataacttggaaatttaacttgtttgatgttttattttgcaaaatgggttttttgaaaagtgaaataggggaatcctttttgtggctactaggctattcacatagcatctgactaacaattattattgtgcatgaatttgagagttactgtatcatggtacgcaaagaattgtgtttctgttgctggattatgcaagtcatctgatttggcgatgcagggtattaatgtagatcccgcttacttatatctgtattttgcaaaattgcagggtgctcaagctgttgga

SEQ ID NO: 98415 - DNA, 888 bp, Vitis vinifera
  Intron number 1 from transcript GSVIVT01026982001 (locus G SVIVG01026982001) derived from phytozome v7.0 (chr-ID chr1 5; pos 18837980 to 18838867 reverse strand)
acgagagtggctgtgaagaacttgttgaataacaggtatttgttttgtttgcatgctaagacaatgtgagaaaacaaaggaaaatgaaaattttaatctgggtaaaactgcgtttgggtgctgagaaaatatgggaaagggaaagaaaataaagttctgagtgtcaagttttatattgttttggattcttctgccaacttaattcaacaggttgtattaggcacagtagaatagaggtttttgattgatgacagggacatcatttgctgtcatataagaaaatttaattaacgatcctgtttggttgccgagaaaatgtaggaaaaggaaggaaaaatgaaatactgggtctggtatttttggtgttgttttggttttcaaaaaatgaaaaaaaaaaaaaaaaaaggcgatccaatcaggagagaacctttttgttttgctcctgtattcatctgtaggaacttctgagattctctgttcttttattctccttcactttctcacaatccaataaggtttttttgctgggtttaagtgttatcctctgttttctttcttctctcttagctttgattcctctttttatcatgctccatattcttatcttgtttctgctggaatttgtgctgtaaagctacatactttcagagaaaagtgttctcatcctttccaaatccattgtgcttgtaatcatcttatcttaattagcaatttcagcatgataattgttagattgcctctgagtaatattcctctttctcaatagctgctcaacaataatttgcatattatttccatttttcttatatttagatcttttgtgcattaccttatgagattaatgaattaccagaggccaagctgagaaggaattcaaagtggaggttg

SEQ ID NO: 98416 - DNA, 918 bp, Vitis vinifera
  Intron number 1 from transcript GSVIVT01026772001 (locus G SVIVG01026772001) derived from phytozome v7.0 (chr-ID chr1 5; pos 6825944 to 6826861 reverse strand)
atttgttgggtccatttcaactgttgttgctacaggtccctttatctttaatgctttctaatttttgattattttgcatatctaactaacttccatcaaatattcagacaacctatggtcagaattctataaataacttacgaaacaaagcctagtaacctactaaaaaaaaattaaaaacttaggaaacaacaaagatttttcttccataattatcagtctttattctaactcttaggttttattaatgttaactaaaccttagttcatagcttgattaagttattcaatggttgacacaattgagcatgaatatgtaaattgtatacctgcttccactatctctctccctcctgtccgtgccccctcacccacatcccatcctcttgttatgtggacaatatttgaggatgcttggattcttctggcatgccatgaaatccaccagctaaaaatgctggtaattttcttttcacttggcttgcactaaagaaagagagctcaatttagcacataggatacttaacaagctgagctctcattatggttctaaagattttattgatggctcatcatttttgtgtgtgagttcaatctcttgtttccagttggatgttcttcatatttgtctatatgttgggggagaaaaaaaggccgaaatagaaaaatgaaaaaatttggggctagaatctgcaagttttgtgccatttgtgtcatactgtcaccttggtgtccacttgcatctatcattttgcaatatttgggcttcatcatacccaaaaattatttgattgcaaagactaaggtctctgatgaagagactaattatttcattcatgtgatttaatctcatgattttctgttctttgagtctctcattcacttccatgttctattttgagcagttattttcctggt

SEQ ID NO: 98417 - DNA, 822 bp, Vitis vinifera
  Intron number 1 from transcript GSVIVT01027487001 (locus G SVIVG01027487001) derived from phytozome v7.0 (chr-ID chr1 5; pos 16406167 to 16406988 reverse strand)
tcttgtttcctccccttctcctctagcagaaccaggtaagctgtttgttgctttcttcttttttcgtcttcttttcacttaatatatttctttgccttttgtgttttgattgggaaaagagtaaatgattatgttatcaaacctccatattcacataatttgaacctgcttcaagtaaagggagaagttagaggtgacttcattttaacatttgatgaaggaaagttgtttatgatggttgtatgcaaggaaggtatataaatggactagtggggcaatggggcaatggggcgatggggaaagtgatttgttttgagccctagataaagaaagagagtagcaagggagatgacatgatatccagtactaacagagaaaggggttttagatggagctgaaggggaagaaaagactctttgtagctgaatccccattccattgttgggattagggcttcattgggtagaattgatttgttaaaaaaaagagaaaagaaaaaaaaaagggttgttgcagatggagatgatggttcacaaattgcctctatcttgttgtctctttacttggttgcctttcaatttcagaactcacataaatctttgggttatttgattaaaagggatgaaatcatccccttttgtaaacctaaccgtccactttttaggggctctcatgaaagaataatggaataaatattgtttgaaaatgatacatattttctttttagacaaggtttcagaaaagctgttgttttgttttgcattgcattgacctcatgaagtttgagcttttagaacaattaccctgcccatctcttaagaa

SEQ ID NO: 98418 - DNA, 300 bp, Vitis vinifera
  Intron number 1 from transcript GSVIVT01028411001 (locus G SVIVG01028411001) derived from phytozome v7.0 (chr-ID chr7 ; pos 7313492 to 7313791 reverse strand)
aggaaactaaggtccattttgcccttttgttgcttaaaagtgtgtggtttgttttgtttttcaattattttctttttatttcttttttatttctttgattttgtcgatttcatttatcaggtggatgaacagaagaagcaatctgagatagctgatgtatgtcacccatttctcattcttgcatcacttgtgtgtttttgagatcgcattcccactcttccatttatagctgctaactaatttgctctttgacttcattgactagcaagataacattttggggggagagactcagttgca

SEQ ID NO: 98419 - DNA, 741 bp, Vitis vinifera
  Intron number 1 from transcript GSVIVT01029029001 (locus G SVIVG01029029001) derived from phytozome v7.0 (chr-ID chr5 ; pos 10933429 to 10934169)
gacaaaaggtcttccctcagcttcagtgtaagtcaatgttcttcctccaaattttgagtaaaatttcattgtaggactggatcatcttgccatctgatgaagttttcaattctcagaaagcttgaagaatcctctgtaagaaattttttttaataagaagtttattttcagatatgaatagtgagtcataagtacagcctctcactacttatctatactaccctgaattatcaatctctcatggcaaatcaaactacaagaccctgaatttgtgagagtctgaaccatggtctttgattatgaagctatctcatttctgataaggccaggatgttctgccaatagctttggtgcaattctcagaaggttgaaactatgcctgaggttcaatgaaaatgccccaaaatgcagcatttgaagcttgttatcggtattttgtgtcagcatttttatttaataggctctatttaacaataactaacaattacataatggcataactgcttcttatccaatttctgtaccagatacatttgtttggcacttttggtcctatgctttttgtgcattgtctaatgtttcttccaacttgtagcagctgagcagatacctcttatgacacttgaactctacaaagctgagacttgaaaggaatatcccatgatgctgtttggtgtttccttatgattaataatttctcttgcagatctagaatcttgtggaatcgagggacgtgattgt

SEQ ID NO: 98420 - DNA, 665 bp, Vitis vinifera
  Intron number 2 from transcript GSVIVT01026373001 (locus G SVIVG01026373001) derived from phytozome v7.0 (chr-ID chr4 ; pos 15226812 to 15227476 reverse strand)
atcccaacaggcgcccacctcctcttcattttcaggtcttttttcttcttcctttttttatttttttataaaaaaaaaattctacaatttatttatttatttatttaatcttatttcaattgcgcgaggcctttttagacttcaaatctccccctaaaatgtcaaagagggttgttggaaaagtcttcaaaaagtttgaaaaaaggatagtgaatttgacgatcagtgccatttggtcaagttttcaaaagctagaaagaaaaaaaaaacccactaaattattattattattattttaatttgcaaaaaaaaaaaaaaaaaagataattagtaattttacgtttttttttttccccaaaatttaagagtggtcggtggacattgaatttgagtagagattttgaggttgagataatgagagtcacatgttggtgatggcattgattgattcctttgattaagtcttgtcacatcaagaatgaaaactaataatttttttttccttttctttttctttttatcatttaaaaaatatttttattatgtttgccgatttaaaaaatatataattattttcaaagattttacccaacaattactcaaaaattaatattaattaagagggtgatttgtggttcttagaaggaaaacggacgagagaggag

SEQ ID NO: 98421 - DNA, 568 bp, Vitis vinifera
  Intron number 1 from transcript GSVIVT01020585001 (locus G SVIVG01020585001) derived from phytozome v7.0 (chr-ID chr1 2; pos 3998380 to 3998947 reverse strand)
cccccgccgtcggcattcttcctgccaggaggtatgagaaatggaaatgatttgaaacaacctgttttctaaaacatgctaccaaaaacatctttttgcatgtcactttcatttccattcccattcttttcttttccgggaaaataattgttttttgggtgctacatgcttcaagttttcctgacaggctctgctcaggcactaagctaacaaaaataattcaaaaatattcccaatcaagaggcatgtgtgttcccctccattcacctgtctactcattatgaagacactgcagcactttgttacagatgcatacaaaacagcgaaaccgttcctttgggccttatgctaaggacgaagtcgattcctccctggtcattgccttatgttatcatgtagtttggggtcttctattttccacttagttcatttgaaatttctctttgcaagaagttgaaatttcttattcaagaagtagttcattcatgacagaatctctgattaatcaatccagtttgatgtttatacttccatcgtgttgacagggctatagcagagcacctctctc

SEQ ID NO: 98422 - DNA, 490 bp, Vitis vinifera
  Intron number 2 from transcript GSVIVT01028930001 (locus G SVIVG01028930001) derived from phytozome v7.0 (chr-ID chr1 6; pos 17353114 to 17353603)
ttatcagtcctgcattctctccggccaacttgaaggtcagtttgtaatatccactctacaataatttcccaatatttctccaactttggcttactttgagtattcgaaaccattccattacgggctttctttttctttttctcttttctaaggagtttttgttttctccgattctcaattgttttgttttgtgaattaaaatagtctaatttccaagtcccatctttcaagtccaagtccttataaagtcatctcattcttcttttgataaaagcagtgcaacacgtcttccatgaaataacgttgaagttgataattagacactttctttgaaactcatgatcctatcaacctcatgtctttgccttttctcataaaccttaattctttcacgcaaacaattccctttttaattctttgcttttgaacaagttttttttggcaatatttctccactaaatgatactttcttcatcatcatctctaggcc

SEQ ID NO: 98423 - DNA, 562 bp, Vitis vinifera
  Intron number 1 from transcript GSVIVT01023109001 (locus G SVIVG01023109001) derived from phytozome v7.0 (chr-ID chr1 2; pos 22477429 to 22477990 reverse strand)
aagaagacgaaggatttcaagtgattacaactgtcaaatgtaatatttaacatttttttatccaaatataattgttataggaagaaatgtgatgttaaataacgattttagaattttttatgagtttattataaaattttgttatcaaattgttattaatatttttatataattttttttttgttcatagattaaatttgaagatgaagctttatatgtcttgaaggatatcaagtgattacaagtgtcaaaaggtaatatttgatttttttttttttccatttacatataactattgtaggtagaaatgtcatgttaaataacatttaaatatgtaatgatttataatatctagatctctaaatttttttctgagttatttttaatcaaattgagagtatttagtaatttgttatgaaattgtcatcaatattttgtaagagatggtacgaactttgtaagagagggcacgaactttctaagagatggtacgaactttctaagagatggtacgaactttcgaagagagggtacgaacttccccacaaacccaacttgttaa

SEQ ID NO: 98424 - DNA, 791 bp, Vitis vinifera
  Intron number 1 from transcript GSVIVT01020023001 (locus G SVIVG01020023001) derived from phytozome v7.0 (chr-ID chr1 ; pos 11464965 to 11465755)
tccaatcaactcctctttcttcttatccaatccgcgtaagtcctcttcgtattacttactactcactttgcttttctttgttttcttcttctttctccgttcatacaaataattgctcaattttttttttcttttattaataacacaaacctggacagatctaatctaatctagtttggggttttggttttcaaattagagtgttagagttctggctttgatcatttgttgttgtgccttagctggatgaaatttggagatctgggttggccaattttctgagcggtgattcattttttttttctccctcgggttttgggattgtgggctgtttttgttattgaagttttgattgttcgtggtgtttttgggggtatcggttgttctcatttttgacgaatttggtggttcaagaggggattttgaattcggaaacttacaagttgttgaaataattggtgtttctttctcttaatctggatcgttgttccttggattcagattggtgagctttgatataatagtaaaaaaggttggattttcatttaattctcctcgtttttgtttctgagttttccctatttcatgaaaccatttacgaattaggggttttagattttcaatctcttaaaaaaaaaaaaaaattcccactttccccccctatttgaataggttcgattctgtattttgaccggattttgagggactcgggtgcttcagttattgatttttggctgccgatttcattgtggtaaggaagaaagaaggctttggattggactggcttcgtg

SEQ ID NO: 98425 - DNA, 585 bp, Vitis vinifera
  Intron number 1 from transcript GSVIVT01028361001 (locus G SVIVG01028361001) derived from phytozome v7.0 (chr-ID chr7 ; pos 6588088 to 6588672)
tcttattctctttctctctccgacactaccacgcggtaatccgatttcttagccttcattttctaacttttttttttaacccaaagcttgcttgccgactctcattttctctttcttttttcactttcctgatgttgactctcatttctgtaccggtcttagattcttgatttatgtggaattcgtaattcaggtttttatttgtattcatgttttattttaattgtttgttagtgtttgattgtgttccttgtaatgtagtgcgtgttctgtggattttagcgattttcttgttgctgattttgttttcttggaaaatttgggagagagatgtgatattggaagaggttggacaaggtttaactcagtgaattgttatattgttttcgtttaccgttttccttttcctccagtttctcctgaaacaaacgagatattaattttgatttttgcgtaccttaggaaatataatttctggcaatgtggggtctggcagtatgtccttgaatagtaaattattgtttttcttcctttttctttcttctctctctctctctttttaattctgtgatatatccaggttgg

SEQ ID NO: 98426 - DNA, 225 bp, Vitis vinifera
  Intron number 3 from transcript GSVIVT01018936001 (locus G SVIVG01018936001) derived from phytozome v7.0 (chr-ID chr4 ; pos 18539608 to 18539832 reverse strand)
atagattacacgacggccatcgcttttttctcaaggttccttcagtttgatttcccagaaacctttggataacagcggaaagcaaaatatttagtttttcttctctctttccctttcccagcaaccaaaaaatggtgcttttctggttcctctttgattctctttaatggtggtgaaatgtttgttctaggcatcggctgagcttgcaagggatcgtattgtcat

SEQ ID NO: 98427 - DNA, 771 bp, Vitis vinifera
  Intron number 1 from transcript GSVIVT01021959001 (locus G SVIVG01021959001) derived from phytozome v7.0 (chr-ID chr1 4; pos 5076423 to 5077193)
ctctactttctctctctaaaaaggggtgttctgaggtgagcttcgtcttctctcttcttccgtttctagggtttgccttcttgatttttctccatcattagggtcttgcttcttcgatccgattcatgtaattttttttgctaggtttcaattttttgtagctgttctgtgagttttgggtttgattttgtgttgatctggtgttttgtcgaggatctgtttatttatttttattttttattttttatacacgatgcatttagatttttgtgttgtgttcatttcttatatgtatatattgtgatttttagtatagttgaccatagatattcggattctgttgctagattgtgtttcatttttgttgtatgaatttgtgaataaatgagtttttagcagatctcttcagttctgttggaaaactttgaattttttttcttttttttttccctcttaagggaggtttttttttttcaaaattatttctgcgttttggtgaatttgatgggtaatcttatttgttcctatgccttttagtggtggaagttatacatatatgtcattacttccttctaatattgaattgctttgtgtattacatgttatagcgtggctaaagggtgtttttattttttataatttagtttaattttttataatttcgcttcttttgttgaaattttgtgtgagcttctctttcttggtaaaatgcactgaaccctttttctacaaaaagggggaaaaaaaaaggagaagaccgaagacaaagaa

SEQ ID NO: 98428 - DNA, 985 bp, Vitis vinifera
  Intron number 1 from transcript GSVIVT01028905001 (locus G SVIVG01028905001) derived from phytozome v7.0 (chr-ID chr1 6; pos 17674687 to 17675671)
gcactggtcttactgccattgttacaggtcatatctcatctgggttgaattttcccttttcttattattattcttagaaagaaaaatgagatatgggtttctttttccttgaatttttatgactgtattatcaatcaatcgtggagaatatgacaaggaaatgggttggtttctgtgttacaagtagaggtttcagtgttctgttggtaatcatcagttgtgtttttccttttttgttgtatgcatttatttgagtttagttggattcatacttcaaaaatggtatgcggatttcaattttcatggaatgtcccaacaccccctgaagagaactttttaatcaagtccccaacttatcatcttctaagctttctggactgcaaataaattagaatgagaattttggattatagaaatttaggacaaaatcattttttgcttgagcatcaatctcaaattttatcttagactatttggtgtattctgttgcaaagtttattggcagttctgtacattctgatcaagggtgcttctgggttgccttctaaattctatatcgtaaattactgatacttacttgactgagtttatattgtgatgcttgggcaatgtggagaagacttttatgatccaacctatctctgttttctttcgatcttgtataattgccaatttacttgtcattgaatggagggctaatgtttaactagagaatgaaaagattagggtccaatgatgcttcggatagttttctgaaaatgagcatcatcgaaggcttggagaacagaaatttgcttatgcgatacttgattaaaatggcaggttgtgaaattcttgcaattggcacgaataagtaattcgtggaatgtgctgagttgtttttatcttagaagcgtttgtgatatgtactaactggcatatgccattactcatggatactgtcattacaggagcatcaagtggttttggcactgaaacaactccg

SEQ ID NO: 98429 - DNA, 577 bp, Vitis vinifera
  Intron number 2 from transcript GSVIVT01025106001 (locus G SVIVG01025106001) derived from phytozome v7.0 (chr-ID chr6 ; pos 4422005 to 4422581 reverse strand)
ccatcattgctctctgttcgtgtatctctttgctggtaattaattatgcttttatttctgttttattttttactccttttttccgtgagtttcttgctaagataaagaaagtggaacaagcttaattctttttacaagtttcactcgttgacttgctaacccgatgcctattttacttaaaatatatttaataattattttaaaaggtgtttttaatttttataacacttaaaaatatttatataaattaaaaatatttctggagcacttttttgttgataaaatttgtttcgtaaaattgaaaaaaaaaaaaaactcatttaggattatatgcaatatttagtgggcctggtatcctagggtttatagattttgaattttatgcaagtatcttttttacgtgagcgatcctttatcttttctgttttttgcgaccgagatgaaatataatataatataaattaatgttgttgataaagtgaagagacagttttttttttctttttttattcaaatcaaccacaatttatttacacttgcagggggtggtatttttagccctaaccacactagattt

SEQ ID NO: 98430 - DNA, 414 bp, Vitis vinifera
  Intron number 2 from transcript GSVIVT01021723001 (locus G SVIVG01021723001) derived from phytozome v7.0 (chr-ID chr1 0; pos 10096955 to 10097368 reverse strand)
acaattttgatagattggtgaaggtgaagactgcagtggatccgactaattttttcaggaatgagcagagcatcccacctctcaaatagagatataatccagcctcagtctcagactcttagtatgcttaatttgactagagaaataatactatagttcattacccatagatagatttatggatttatggaagaaaaaataaaaaaatcaaaggttagaaacggtgggtaggcgttaattcttttccatattgtatcatcccctattatatcttgggaacaaggaaatggacatatagtgaacaattgttttaagctcaattattattttagtcaatggaaaggatgatatattacgatcaagcattggctgattagcaataaaagtcaatcagcttcacctaattttattttt

SEQ ID NO: 98431 - DNA, 536 bp, Vitis vinifera
  Intron number 2 from transcript GSVIVT01021972001 (locus G SVIVG01021972001) derived from phytozome v7.0 (chr-ID chr1 4; pos 4886402 to 4886937)
agtcaatcactgcccttgtgattgtgagtctctgatcttattttacactgtgtgctaaaaaactctggtcaagacaagaatataaaataatgcttatattttatttaaggataacaaagaactcacctcagtcaagtctttgctattgtgaattttcattctttccttttgcttggttggttgagagagtgaggaaaagaaatgaaggaaatttgaatttcatgttctattttcttttggttcttgataaatgaaggactctcctcaactgatttgttaggcttaggcgagtggaggttgttgtttctctggtcttgagcaatgaaaatttattttagattcaaaatattaaattattttcatttcctacctcttctagcaaccaaatggggatgtcatgttattgcactgtgaaaaagttaaaatttgtttgtgagtaaaatatttcctctaagtcttatgacagcagattatagttgtctttatatggattgatggcagggtgtgtgtactggagttgttattttgctgacaag

SEQ ID NO: 98432 - DNA, 622 bp, Vitis vinifera
  Intron number 1 from transcript GSVIVT01023713001 (locus G SVIVG01023713001) derived from phytozome v7.0 (chr-ID chr1 1; pos 9866882 to 9867503)
tcagattttctttgggaatcaatccggtgaagcaggtgcgagtttgattcctttccgttcatctgttcatgcattgctgttacttttgtttttcaatttttaatttttagttttactttttgattttcggcttgagttcaaccggattggtgttgcaagaaaatgatgtgatagtactctgttttttatttgttgtttgactttctggtagattctgattctatctctctctctctctctgtctttttttttttctttttttggttattttggtttgataatctattgtttcgtttgatgcatattaaggacttttttttttttttttctaatatagggtttgaattttggttttttatgccattatcgattgaatcttcatcttacttagccacaagtatctttgaaaattttatgtgattttggatatttgagagctaattatatattgaaaatttcttattattatttactgttgcgcaatttctgttgtagaattgagaaatgttctactttgaacttttaatttcagtgcatttgatctttgtgagaatttggaccactcctgaatctctcttatttatcagggtggttttctgcaaattctcatctggttggtcta

SEQ ID NO: 98433 - DNA, 983 bp, Vitis vinifera
  Intron number 3 from transcript GSVIVT01028854001 (locus G SVIVG01028854001) derived from phytozome v7.0 (chr-ID chr1 6; pos 18060736 to 18061718 reverse strand)
gaatcggagagagatctccaagtacctcttccaaggtttgtctcactcctctacttgcgtttacttgatttgttttgttgttttttcttgtttgggtaccgagaatctgtagaaaagaggattggaaattctgggatcttatgtttttatattgatttgtttggaaaagctgagagatttggttcaattaggtcaaacagtacttttaggcatgcattagtgaggcgttgttccctggggacccgaaattttgaaaagttgtgtggctgtttggatctacggacgaagagggaaagggaaagaattagaagaaatattacggcttgttcgaccgtggagatgagctgaaaacggaaacagaaaatatgtttattagctccttgtctgaaactgtttcgataaggatttcttggaaaatggagcattttgggaaaacagtataatcttgctcttgatatttgagcactttgacaattgaaaacattttgaacatggttttcctttttaagtccttcaattgcagtcttcatgagatgtgaaataggattgaaaagagagtaggactgaagttaaggggagatggtagagaaagaaaccttatttggctaaaacttgtagtttttttttttcaattctcttttctgctcttacttttcatcattcccatttttcttgccacattttcccaaaacaaattcatcctaaacaatttgcttgttttggatggatcatttcgaggaaaaacaagatttcagttttctgtactcccaagtatggcagagatgttatattatttccctaagcatcaagaaatgctggttgagagatcaaaagagaatttatattttctgtttcaatattctattgaaaccaccgttttcattagttttcctcatctatattttattagcaacaaaacgttggatcatgtttcatctatttcttatatgtgatattttgcatgtgtgcagagggagtttgct

SEQ ID NO: 98434 - DNA, 544 bp, Vitis vinifera
  Intron number 1 from transcript GSVIVT01024082001 (locus G SVIVG01024082001) derived from phytozome v7.0 (chr-ID chr3 ; pos 1275074 to 1275617)
ggctttcctcctcctctgctctcccttccttcaaggttctcttctcttctttctcaattttcagatctagatccatttccattaatcacgccttacaacttcttgattccctggctgcctgagatcgggggcctgaatccattgcctagggttttcttttctcatcacacgaggtctctctaaatgggatctgattgtttgattctgaatgactagaatacgaggcaaaaattagttttcgctatcaaaaatgatatagaggctcttgttattgtctgttagatatgaaaactgaagtcaactgaagataatagttgaattatttgctttgattgtatttgtttttgtcttctcagcaggcaatcggggccgtaggttttgaaattcgttgactttatgggctaggtcctatactgagtcgtgttatattgaattcacttgcttagtgaatttgatttgactttgtggttgggatcttatggatgagttctgtgaggtttttttccccttgtaattaactgttcttttacttggcagttgctag

SEQ ID NO: 98435 - DNA, 682 bp, Vitis vinifera
  Intron number 1 from transcript GSVIVT01027696001 (locus G SVIVG01027696001) derived from phytozome v7.0 (chr-ID chr1 5; pos 14197207 to 14197888 reverse strand)
aaagaagtaattttttgaacatttaattttacgataatatactaaaattatgtttttaagatacattttaagaataatatactgaaattgtggcaccaattgccataattttatcatttttttaaagtaccactttttacaaatatttttttcttaatttacaataaatttgtcaaaaatccggctgataaaacctttggaatttctttttcccattcaacggtcatttcttctgaaaacactgcttaatgccctcaacctttcgccaatggaagaacgagaagactcacctgcaacagcctaactctaaacacccacctctgtgaaaaggagtgcaaattgaatctatcaaagcacacatgcccaggttgttttgtgcgttcctgtagtcttccttgtgttaaagctcacaaacaacaaactaggtgtacgggcaaggggcagcggacccagttcgttcccctctctcaatttgacgataatctcctcttatctggtaaatctgaatacaaccaaaggtaatcatgtattcatgagataactagttgtctttagttataaggaagattactacatgtccacttatgggttgtttgttagttgaatttgatatgatttatgttttacatgcagtttctattttctagctttgttttcatatcactgttatttaataaattag

SEQ ID NO: 98436 - DNA, 775 bp, Vitis vinifera
  Intron number 1 from transcript GSVIVT01025781001 (locus G SVIVG01025781001) derived from phytozome v7.0 (chr-ID chr8 ; pos 11927418 to 11928192 reverse strand)
aagacccattgttccgcagcaccatcaacccagaggtattttttctctcattctcttaatgggtttttcttggtgtcgtctgaatcttcttcttatgggttttctttgtttggcttggaacaaaattggaaggaagtaatagaagatggagtttcaattttactattgctttctgaaagttggtctgatttccgattgaggaaaactcacgttatgtagtaaggcttttgatattgaaaattggatttgttttctctttctcttttcccacccttttctcacgagagaaacggcacattattgttttgatcaatagacgcctattggtttggagggttttaaaggtttgcttaataccgatttgtttattcggaaccaaggatctgatgattcttggtgcttacttttattttaatattttctacttccttttcttgaaaaacatcggatcttgtttggttttcaggggttttttccccttgaaatatctcttgttctatggcatttctctctattttatttggtttcctttgatttgcatcatcttttgttagaaataacaataatagttgaaaaaaataatctcatctgattctatttttggctctcagaaatataaaacaaatcactgaaagctaataggtttctttcatttcttgaaaattttgtgaacatgttgctactctttaactcttctgttgatttggggattctgattttaacttttctatcatgatgtttcttcacgaatttataggtgaggcattagctgggg

SEQ ID NO: 98437 - DNA, 1000 bp, Vitis vinifera
  Intron number 2 from transcript GSVIVT01021966001 (locus G SVIVG01021966001) derived from phytozome v7.0 (chr-ID chr1 4; pos 4999856 to 5000855)
aagcagaggcgagagctaggcaacttgaaaaacaggtaatatttttgtttatgataaccaaaatagggattctttgttacgacaaccaaataacaggtattccattgtgataatttatcaaatatgtaagatcgtgttattttgttagataaaggctttgctttgtatgattggttttgtattttcttttttatttcacatctagtgtttgtagaaatgtggatgactcaattatatgcaataagttgcacatttagcactttgacaaagtattagaatttgttgcaacaatttctttattttgaatcttgagtttgctgatggcatggctaccaaaggtgtaaagaaagacgtgtatacaatggacactacaaaatcatttatgtaaaatttttaattttcaatttttatttttgaagttattgctttttaaacactggccttttctgcaaattaatgtcaatgtcttgcatgttgatgattcatttcaagctatttacatttttctacatgtttagatggataatcatttgcacttccacccattccagttcatttaccaactgtagcattagtgtgattttaaattttgcaataaataggaagcgattggtttcatcatattcttataatggccaatcatgttttcccatgtagagaagcagactgaaagccttccaatgttgaacatgttttttctaatgctaagaattaggtttctttgttcataaaaataaatattatgtttaaagcaggaatttgttgtgtcttcatgattttctcacatattatcttcccaaaattcatttccaatttttattttaattttttaaatgtggtttatatgttcctgcattgacataatgaggattcattaacatctgtgttccctttttattttattttttatttattttatttttaccttttgttgttaaatcattgtttaagttttgtgttcttaggtcgctactcttggagaaggtgtatctttagaagc

SEQ ID NO: 98438 - DNA, 558 bp, Vitis vinifera
  Intron number 1 from transcript GSVIVT01024340001 (locus G SVIVG01024340001) derived from phytozome v7.0 (chr-ID chr1 6; pos 1191477 to 1192034 reverse strand)
atttttaaaattggtaccgtaaaaattttattaatcatgaaggaaaaattgcccataaaattttttttttttaacttttacaaaagatgaacatttttttagtttctatattaaattattttttaatttataaattatttaaataaaattagtggacatgagatctcttctctggcttaaaaaatagcttttaagttgaaacagagaagcaataagccagtcgggagcctcctggctttgtcttcaaagaatgtgaactaaacggcaacgtttgaaattgaaacgacaacgtttacatagatttcaaacttgaaacggcgtcgtttgaaacaaaaaacgacgtcgttttaagtgtcacggtgcttgctctctcgagaggagaagctctctccctcccatgaaaatcgagggcttcatttgaatgtttcgatcaccgagtctcctgactctcctctcctccgcccatggatttcaccgccggtgacgccgttgacctatccggaaccgccgtccccgaccactggtccgctgccgaccagaacctctgggctaccgacg

SEQ ID NO: 98439 - DNA, 912 bp, Vitis vinifera
  Intron number 1 from transcript GSVIVT01023862001 (locus G SVIVG01023862001) derived from phytozome v7.0 (chr-ID chr3 ; pos 2917286 to 2918197 reverse strand)
attgatcttttcctcaattccatcccctctttcaggtttctcgttttcatcctcattttctttttccattttttttttctttgaattttttaggctgttgggtgtttggcatcaatgtgatcgtctctaacaaacccttttgaggaaaaatgataattttttgcctttttatttgcttgatgggttgggtggtatacccttttccagaatacgctgctactctttctagcccatttgatacttgatgccgttcttcccatttctggtgcccaaagaacagcaactttaactactcttactgcaatttattcttgatgaggcatggatttgtcatcttgttatgtaggatgattccaaaagtccctccattttctctcaaatggaaagaagaacaagcacctggtgcctttctgttaaacaaactcaagcctgtaatttgtgtgtattatatgacaataatttcacaaaacacacctatgtagcagcgccctcatgtctggatttcgggtagttgctgtttccgcctgcatctagaagcatcttaccattaccacaaccatggcaacttcactttagattatttctagaacttaatttcttacagtataagtacatgaacccagccattatcaaatcttgtttgagtccatggcttactaatcagctatgattgattccttccggacctgcttatggttggttactgaaaatcctttgtcatcttcctgcaacttaatcgaatgggagcttttgattttgtacaagttgcatgtgggaatttcataatccgtgttgtttatgctggtgctgttattagatcatgcattcttgccttctagagttagaatgtgatggaaaacatcatattcaatagttttgttatggtttggtgcaggaaacgagcagagagtg

SEQ ID NO: 98440 - DNA, 655 bp, Vitis vinifera
  Intron number 1 from transcript GSVIVT01020394001 (locus G SVIVG01020394001) derived from phytozome v7.0 (chr-ID chr1 9; pos 20170930 to 20171584)
cgacatctacaaatacgaaccctgggatcttgcgagtacgctattccatacccagtttgatttctgtcttcttttgatttttatgatagtgttttacttgcttaggttctctttcaattagggtttggaaggttcaccaacatctgaagaaactgtcttaactatctatatgtatatatacactggcatgtctcatgagattgttgctttcgcatggtaacaaacaataatagaagcagctacaggtttataattctagggcatagctttttcagtccttttacttctttactttttccttgacagaaaacaaaataggatttccatatggatccagaggccatgcatgcatggggttcctctgatttagctagccttaatattcatttgatttgaggcccttcttcttgcaaactattgacgcaaagaaaattgattaacagggacaactgcactgacatgagatttatagagaaaaaatgaaaaccctttttcatagggggaaagcaatatatacatatacttcaagcccacttttattcagtacaacaacccattttgtgtcccaaatctttgtatatatgcttgagaaatcttcttcctctgatatgtcttgtaaatatgcagaaaatattaatactcttacagacaagga

SEQ ID NO: 98441 - DNA, 825 bp, Vitis vinifera
  Intron number 1 from transcript GSVIVT01020040001 (locus G SVIVG01020040001) derived from phytozome v7.0 (chr-ID chr1 ; pos 11251187 to 11252011)
gcgtatatttatcaaggagttctgcaggaaacagtgtaagtttttttcgttttcaattcttttgattgggttgataatgtaagaagagagaaggaaaaatcggaagtttgaatctggtttgtgttgttttggttccagattttgaagggatcatctaaactaagctgtataatgacaagaaaactcaaaataatgaaaaaaaaaaaaagagaaaaaaaaaatctagtatggaaaatttaatttaattcatattaccttctttcacaaccaaacagagttggagtcgcacagatcttgttttattgatacttatgaggactggagttgtttcaagtttggatgaatttctaaatgcatttaatcgacactttgaacagttcggagggttattgggaccaagaataattgaatgtaatagattcgttttttttatttgaatatgtgtacacaatttcatggggctgctgagtgtattgagagtatgattcatgcccatgaacttataaattagtagtcatccttgtaatcaagcggcattgcttctaaggtatgtggattatcaatcttagaacctgaacttttgaaaataattttaacatgaatctgtgaaacaacggaattttttattttatggtcaaaaggatggcttaaatggaagctctttacataagagtgattggactgtaatgtccttttatatttccatgacaaacaatttttgttattcttttcgttgctcagatgatcatgtttggttttttttttttttttattattttaaaattaacaggtccaccaagcgatttggcgctgatcagaagaggt

SEQ ID NO: 98442 - DNA, 943 bp, Vitis vinifera
  Intron number 1 from transcript GSVIVT01020238001 (locus G SVIVG01020238001) derived from phytozome v7.0 (chr-ID chr1 ; pos 8694830 to 8695772 reverse strand)
ttaaggtacaatttattttttcttttgcaaaagctaatattattaacaccgcctaattaaaagaaggtgcacaaatgtacacaagaagtttagaaattagacataaatgcaattagattgagagattaacaaaagcacctctatataatcatcaagagcccaaccaatcaacacaatctaatatggacagtcatgttaaaagccagagagagcataagaaagaatttgttagagtttgttccgattattcttcattgacaaaaactctaaaatgttaaggtacaattttgaacatttcttctattgaaagaacagaatatattcgacgctactatttttgtttctccatatgagactattggtagcctatgaatcttgtgcattttgaagctggccttgatgcgatattcaagatcatggtgtattgctataagtcgttccctacataaatagtcaaaaaataatctcttgatggaatatatgtttaatttatttatctgttccatgctaacataacatgtctgctattttaatatcaactaactgatcgcccaaaagctttgtcattatgtggccattttttttccttggtatccaaatggatcaatatgacactatttctaaatggtttgacttttacttagctaattaagttgagtttttttctgttgagtcaccttgttttcacttggccatggtttattgagggtatgttttgccatccattctttgaataagtacaaaaaatagttgattggttgtagcatatcaatgaatttggcctcttctattagagcagacacttgttaatgaatgctaattgcattatcttatttgtgccctctctacatatttttcaggaaataagtatgactcgttaatctttaaatagtaattattgttgtttggaatgcctttcaggcaccgtttataaacaagtatt

SEQ ID NO: 98443 - DNA, 607 bp, Vitis vinifera
  Intron number 1 from transcript GSVIVT01027223001 (locus G SVIVG01027223001) derived from phytozome v7.0 (chr-ID chr1 3; pos 17903648 to 17904254)
tgggaaaagattgaagcttacaaactgggacacaggtaataagtaacaactaaggagctgtacttgtgtttcaactaccaacttcatgggattccaaggggttttcctccagatgctttcactaaccttttttctttttaatcacattttggtggttatagttgcctcatttatggttgaaaattttctttgctccattactcaagtttagattatggagaaagaataagaatgtttcttgattgtctttaggaggttttgtgaactactgctacctcagttgcagtttatctcatgcagcagaaccatggattaaaaatgggatagtttatatgctgttggggaaggaaaaacaagttgtaatgctttgctcttaaaagaaatttaactctgaatggcaaaatatgaaagattcatgtaaacgtttgtgccctgtaaacaggtgtcacccctctttgcaggatttgattcagaatgaaagcttgaaatctcattaatacctgtagaaacatagcataatcaggaactagtgaaggtggcatttgtgcattttttaaagacaattcaatttgtttgataacaatattttttttggttgcagctggac

SEQ ID NO: 98444 - DNA, 994 bp, Vitis vinifera
  Intron number 2 from transcript GSVIVT01022188001 (locus G SVIVG01022188001) derived from phytozome v7.0 (chr-ID chr7 ; pos 17297965 to 17298958 reverse strand)
ctagggttccaaggcggattacttctcaggcatgttttatggttttgttgattggttgtaacttcattttcagttggtgaaaattattgtgttggtgtattgttttattgaagaatgggtatttttggaatcatagaaattttctcttgctgctgttgggtttttccaatccattcaggttgtgacacaaggtgtttatacgttttattttatatacgaagattagggctaatgcaattcattcagtgtttgtgatgacgttgttgttggattttattgtacatttggaatactgatacagttaaagcaggtgacagttgaaaagttggtttctgttcaaatccaacggccaaacatttagatagttgtagactgatgacttttatgtcacctcgattcacactgctttttctgacctccattatcaagtccatgcttgtttagagcatcataggccttgtagttaatgtacataggtgtcaagttaaggcaccttagtatcaccagatggatgtgaagcttgtgtatctgctgtttgggctagggtgttcaatttaatgtcttagaagggcgaacattttcccttgcaggaggaatttaccgtttggcatgggtttaccgctcttgggacatcattagaattggggtttctgccccatggcctggtagttggcactgtcagttgtcatagtggaatgaatgttcaaaagggttagtgtcatccctaaaattgattatcctaccatttatagtttaacaaacatctaggcatttggatttcaatcaactcctagttgactgtttcatttctttgaattcaaacatatcattccaggaatggataatgtaaagagtgtatttatcatagattcctcacccttaagtagatggtgagatgttatttgtcaatattaatgctaagaattcaactcatatttccatgattatcatatttgcagcagatacctccatttttttcttccagaaaggaatt

SEQ ID NO: 98445 - DNA, 859 bp, Vitis vinifera
  Intron number 1 from transcript GSVIVT01024591001 (locus G SVIVG01024591001) derived from phytozome v7.0 (chr-ID chr6 ; pos 8591886 to 8592744)
ttgagcgccaagaggaggttacactggctgttgaggttctttttctttgcccgaatcttctcttcatgttgtttgcccaactgggttgcttctgcatttgtttaaaaaaaaacacgttattgtctttgggtttgtgaagagttctcttttgctggggtttaatattatgtttgttttttcttcaagcaattaaattttgagtttagaatttgatatatgaatgaaagttctaagctttgtttgtttcagtggaaaatagagttggggagctatgtgcgtacactgttgaatgagaattcttttaactgtggttgtggtttattcttttcttgaagtttttgttcatgttttactcatttgggttagtgaagtttttgttcatgttttacttatttgggttagtcgagttttttcagttgtcagaatttgaaggtagtgacaattttattttttttgtttgtttattttcatgtttatcctagcaataagtgttcatcataatgctgcatctccatttttagattttcagaggacatgtaagatttccctttcttcaatctttttatatctgggtctatgagttgttaattttaaagtttcagaattgggatctaaattaaaatgttatcattgcaagtgtttgtcaagcaagacagggaataaatttgtatctataattcggttttattgtgactccttcaatcacctttgtttcttgctcaatcttcaagtttgtgggcttttactattcatgcttctcctttttttctcaacttctggggttttatctgatgagccttagggaagaacttattgaatttcaggtgtttagagtgtttcaaaagcaagactggtataa

SEQ ID NO: 98446 - DNA, 530 bp, Vitis vinifera
  Intron number 1 from transcript GSVIVT01029053001 (locus G SVIVG01029053001) derived from phytozome v7.0 (chr-ID chr5 ; pos 11492599 to 11493128)
tgggtgtcttggattacaggtacttctcatgacatttccttccatgtttcgatgcaattgtcaaatgggttggtttgaatttgttttctaggaatgcccagattggtcttgagagttaattatgctgtttgtctgatgttattcatgggattgtttggtttcaaagaattgttccattcggttggcctttttatggaatccccatttggttataatgcactgattttaggagatgaccacattgattttgacgtttctgttgcttgtctaatgttcttcatgtgcatgtgtgatttgatagaggaaaatcgttgaactgaattggtttcttattggcttttaggggattcctaattgggaattgtcttgggggttgctcgtattgttctttgacaaatttgttggtttttccctgttcttgatcacgtgcctgtttggttgtatggaagcattgaattgagttgttgttgttgttgttttttatttgggttttaggggattcccagattggttccaacgtaaccccactt

SEQ ID NO: 98447 - DNA, 979 bp, Vitis vinifera
  Intron number 2 from transcript GSVIVT01029053001 (locus G SVIVG01029053001) derived from phytozome v7.0 (chr-ID chr5 ; pos 11493277 to 11494255)
tgaggcttggtacaaattaacagaaacttgtagtaatctgtggatttttatttatttatttatttctttattggtgtgtgattattatgatgaatgtttcttgcctatatgacataaacaagtgaatttgaatttataatccctggaagtcactttttgcattataaaactcatcctgcttggcagtggttaatgctttttgattcacttgtgtctattacacgatttgcctgtggaaccgttttggtcaactgcagttttaggaacgttcatatataatttagcttgttaattctaaggcaagtcaaaagaggggggaaatgcccatgtctatgggagatttcatggtccattgattgatcatggtggcatctatcatgggtaccttttcctggctatgtccctaatctgccatatggcagaatatcttttcccttctcatgggcgtacatcctgttcattattgaaaggtattcctctgtttcaagtcccagagtacagaataatggctgagagttattttttatttaaaattactttaggaatcatatggaggacttatatcacaaaatgggaaataactttaaactaactcattttgtcagcttacaaataaaaatcctctatagagcatttttgaatgctgatagatgttgaatattttcctattgcccagtttggggtaagttctcacccaagagagtgggagccctgttatggttcactgagttccaactgaaaatttgctttcaaaagtactgaagaagttgttacttgcaaaatgcaaaaataatagttttcaaagagaaccctttttttcatctgaagatggtcgtcttactaagagtttttcaaatgaaaatgagtcttactgagagtttttcaaatgaaaatgagtcatatctgttgttctgctttcactatgtttcttgattttcttgtagatcttgaacctggaacaaaatattattacaagtgt

SEQ ID NO: 98448 - DNA, 297 bp, Vitis vinifera
  Intron number 1 from transcript GSVIVT01021020001 (locus G SVIVG01021020001) derived from phytozome v7.0 (chr-ID chr5 ; pos 15201678 to 15201974)
ttcactttgtagagagacaaggtatagcaacatcacaagcccaatcatttctttttctgctaattcgctgattccctccccgcacccttctttttcgcttttgatcgatacctattcccaaatataaagcgttagattttcattttttacctcctcctttattccttcgaaattgttttttcttcgaatctttgatttctgagaattcaaattagggtttccttttctagtgcttgacgtttgtgttccttgatttttttagggtttcgtggaatcgttactgggtagttctcgatt

SEQ ID NO: 98449 - DNA, 724 bp, Vitis vinifera
  Intron number 1 from transcript GSVIVT01027739001 (locus G SVIVG01027739001) derived from phytozome v7.0 (chr-ID chr5 ; pos 7341807 to 7342530)
ctagttattgaatgagatttaaataaatgtaggtaaaattgtcaaaaattattcttaaatgcattatgtaatccaaatgtagagtatatgtacaagaaaatttattatattatttgaagatgatggatttttcatgtgattcaaaaagggatagaatgaaggcacgagaaaaagaaggataattttttgaataaacctctttattgatggatataccgagaaagatacaagagaacgtttaaatagtatcaatataagggagaatttgatataagaggaagatttgctcttctcttgattggaatgtatatttataagcttcttgatcataattttttccttttgcatgctttcatgctaagtaacaactttatgacatataattttgtattccttcttgagattgtgtcaacattttaaaagtttgtacacttttttttttttcaagtattaggttttttcttgagctgtggatgatacggttggaagatacttctatttatatgataagaataaattttttagccctttcattcctagatgaggttatttgataaattattcaaaatttttcccctgaaacctaattttctaaatatgaacaatcaaacaattgcattccccaaataccattctagaccaaaccctaaaaactgcataccatgagtgacatcctccgtcattgatgtatttgttagccgaggaactagaaaaaggaaaagac

SEQ ID NO: 98450 - DNA, 344 bp, Vitis vinifera
  Intron number 2 from transcript GSVIVT01022309001 (locus G SVIVG01022309001) derived from phytozome v7.0 (chr-ID chr7 ; pos 18392979 to 18393322 reverse strand)
ccactattgcaggtgtgttcatctcacacagagtttgtgtcgataagaatgtcggatctccgtttgatttctgagaaaatgtggacatgggatttggaatttgcttgtcttttctttttttattttcctgggtttgctttccaatcataccgacagcaacaaccccttttatgcagctttcagtgtggtttgtttgccatttgggagatgatctgtttttcatttttcaagtgtatcttttcatttttagccctttcgagaaaaggggaaaaggacaaggatccattaaaaggtctgatctttttgcaggggctgttctttacatcaaaagggagtttcatttg

SEQ ID NO: 98451 - DNA, 826 bp, Vitis vinifera
  Intron number 1 from transcript GSVIVT01019030001 (locus G SVIVG01019030001) derived from phytozome v7.0 (chr-ID chr4 ; pos 17574003 to 17574828 reverse strand)
tcctcggaaacattgtcttgctccgccctgaacaggttcacatttactcctttttttccttattaattaattaatttctatgaattatgtttccaattgcatacgtttagatttcagagagggcaagcgagttcaatttgcaagaatttgttttcaatttttttttcctcacaccaccgaaatctgatatgtttttattatgttttatgtgtttttttccacaggaaactgaacccttgtttctccaaaaacgtgttaaagggtttcaagtttgagatggatagccttaagggctttagggctttaaaacaaatctaaaataggaaggaaataaagaaagagatcaaaacaaatctagagaaaatctaattaaaaaaaatttaaggtttgtagacagttcatcaacctgttagagagacacgtgtccaaaattcctggttgagtgtacaaaccgcgtgaaacgcatctaaatttttggttcttcattgatctgctcgataggagccctagttgggatggtccccgtgagatatgaacaaatctagcttagcctccaccattcagctttatatagaggaaaggaaaaccccagattctgagatttcttgtcttttatcttgttttgttgtttgtgggttatgttgagcgaggagcataggtgagattgcagccccaagttcatattgttggcactacattttatgtaatcatgagccagaaaagcccaacattcatgtagacaaacgtgaagttgagccatgttttaaaccaaagatttcacaattttctattacaggtagcaaaagccattcaaggcctaattcct

SEQ ID NO: 98452 - DNA, 1021 bp, Vitis vinifera
  Intron number 2 from transcript GSVIVT01020928001 (locus G SVIVG01020928001) derived from phytozome v7.0 (chr-ID chr5 ; pos 16988507 to 16989527 reverse strand)
ggcgtatctggcatctcgctcgcaagaagaagcaggttcttgtctttttagattctttttctctttttctactgatctatattggtgtctgttggttttcttgcgtacaggctttgttttgattgttttcttgttcatgagggtaacggttgttctgtttttgctgtaatttcggatgatatagtgagtttttgaggagggtatggatttgagtttgtgtttggtcgatgagaaaatccgggtaacgaaaagaaaatgaaatcttcgacgtgggacttcttttaaaaccttttctgggagacccgagggaaaattcaggtgaatttgataagattgtctggtttatttggattgagttttccattgttggaactgaccagcacagagaaaagattgatgatttagtttttcctgttccaatctttaggtgtaggaaaatctttcattttctttacaaccatatatccttatgggttttcttgatgtttcttgtggaacttctttcatgattgttttcttgtcaatgaggcagaagatgttaccttccgtttttggtgcgatttaggatattgtatagtgatttggaggtgggtattaatttaaaaatgagcttggttgatggaaaatgtgggtaagtggcagaaagagaaatcttgatgatggaccttttggttttttggagtgagtttctcaaattgattttcagtgacatatattgtatctttgaggtggatattaatgaaaatgtctgttaataatctgtttggttgatgagaaaatgtggtttaaagaaaagaaatgaaaatttgaacattggaaattttttttccagattgagggagaatgaattcaatctactcagctcacttctatgtcatcttcttaatttgttatttgtcacagaaataaaatagaaacgagattaattttcccatccaaaatggaatgcttgttagtctaaaatagaacgtttatgatttgaatagctggaagtggaggatcaacagcgcttggcagttcg

SEQ ID NO: 98453 - DNA, 584 bp, Vitis vinifera
  Intron number 1 from transcript GSVIVT01030261001 (locus G SVIVG01030261001) derived from phytozome v7.0 (chr-ID chr8 ; pos 9779932 to 9780515 reverse strand)
actgtttgggaggtaactgtcattccagtttgttatcactcaaacaacaaattccagaccgattttcctttttttctcccttttttgttcaggtattcctaattttgttacaacatattcatttcttcactctcgttttcttcatctgtttttattctaatgtctgtctaatcatttgactttgtttgctagctgttactcatgggattacagtccttttcttctgtatgtgaactgatgagttctcaacatgtaaatgaataagccactggaaggctttgctttaattttttttttttttttttttatgtattttataatcgatctagtctcatgttttctgttagattttgttggttgatcttttcccaggttcctcacaatatccatttgatattatgtgtacaattttccctcattttcacttcaccactctataaggttgtctttcttctgcctaggacaaaacccttaatctggtccagtcaaattggaagcgaagagtgaatagcctttatttacattttaatgcattgtactgaagttctaattgcaatgtccaggacttttcaggtgagaaaggc

SEQ ID NO: 98454 - DNA, 838 bp, Vitis vinifera
  Intron number 1 from transcript GSVIVT01022862001 (locus G SVIVG01022862001) derived from phytozome v7.0 (chr-ID chr1 2; pos 18683740 to 18684577)
cagaaaaacttcttttctcagatctgtgagtaataattagagcaagagaaacagcttctctctcgcccctgctgccattgcccctaattatatttctctttctttttcttttctttttatttgtgtttggatttggattttatagcctgaaactctctcatttgtgggtacgccaatttctgtcttatcttcttcattgttttctcttaaatttatgttcttttgatcaattagtttgttcttttgacttgaatttgattgattttatttgggtttcttttgaatgggagctttgactattctgaattttgtttcttaatgtgagttttgtctgagtgttggactgtgcaagtcgtttgatgatacattcaaattgtaccgaatcagtttgatgaaaaacccacaaattgttgatggaaaactgtgttatggagtcttgtatccttccgtttcattttttcacccaaacaggtgaatttctcatccttggattctaaatccaaatccgtgtttgtggacaatgaccttacaatcagaaataagcaaatgtgcatgtaaacttgccccttcattcatctgcctatttgtcaggttgtgaaacctgagtaggagatcatttctggaactcatcgatgagttgggaagtgggttgagttgtggttcgctgtttgtgggttcgaccattctgtctatatctgttcctgcattgctctagtttaacactaaccttaaagatttcatggagacaatgagcgacaaataattttcaatagtgttttgtctctctaaaatttcaaaagatttgacgttccatttgtccaggtactgaatttattac

SEQ ID NO: 98455 - DNA, 958 bp, Vitis vinifera
  Intron number 2 from transcript GSVIVT01022862001 (locus G SVIVG01022862001) derived from phytozome v7.0 (chr-ID chr1 2; pos 18684696 to 18685653)
cgtcaatcaaggctgattacattacgcgccaacaggtgatgcttctttgtccaatttaatagtcaaaatttctatttcaatttgggttagtttcaatcacatatgtaggtgagtacgtgtgtgtgtgtgtgtgtgtgtgtgtgtgcacacctatccacacacatgcaaaattttgaagttatgcaggtgttgcgttaagattatactgattgaacaagagaaatttttggttttgggtgactggaatgagcaatcatcttggaactctctagatacatggaaattgaagtgtgagatcaggttgaatgagttgctagcttgttttatttatgaaagttgagttcatgtgctaggaatcagatctctcaagttttgctttcttggggctacttcactctgtttctgaagtgaaagattttaagatgctccccaacaaggaggagtccaattaggcttgtaagaggatttaaaactagtatggaactcaactattcttagcatccgatcaatagagtgctccatcaattgacatgtagaatctttattgacaattgattgagaaagaaaagccttagagctaaatttatgaaggggctcaatctatcaattctcaaatatactcctagcatgtgtggagatccaattccctatgcaatgagttagggcatttaaaagattggtggggaactaaaaactatccaagtcctatgttttctaggtcacttggtatagccaaaaaagtgtgttgactgatcctgatggtcttcaatgatgcgttcaaggattgagttcagagcatgctggatcacattggacatctgagggaactctgactaacctaactagatcttttaatggatcataaaaatgctaaattcctaatatttcttatattaaatttatgtaaaaccttcaagttgccttctgaatgttgctatatttttttaatgtcaggcaa

SEQ ID NO: 98456 - DNA, 569 bp, Vitis vinifera
  Intron number 1 from transcript GSVIVT01024815001 (locus G SVIVG01024815001) derived from phytozome v7.0 (chr-ID chr6 ; pos 6665397 to 6665965 reverse strand)
tttgaaagccctagtatgatattttttttccctttattttctgttctcttagtgtttttggggtattaatgaaaactagggtttggcattgatttggttcgagagttttttatttgagttttgatggagaaagttgtgccccattaaagtggcggaaaagtggaagaaaatgaaagaaattaacatttttagggttttttgaatgataatgatcccagaaatcaggaagagttaaaggtccctccaatttatgaagcaatataaaattatttggttaaggcttttttggcgttttcaaaacaaggccaaaggtagaatgcttgactctttacccgtcactcttttcctatgctttgttaggagctagacgatggtgggtcgtggctttcctgtaatgcaattgattttatgcgttatgatatatcatgttctttggtttttccactttatggatattgtcatatgatttttaaaactttctaatttcatttctgatgatttattgatggctttgtttgtgttgttttgatgaatgtactaaagcccaagataagattgctgattttgag

SEQ ID NO: 98457 - DNA, 659 bp, Vitis vinifera
  Intron number 1 from transcript GSVIVT01024855001 (locus G SVIVG01024855001) derived from phytozome v7.0 (chr-ID chr6 ; pos 6462435 to 6463093)
ttgagcgccaagaggaggtttctcttgctgttgaggtcctttttcttcacttgaattttctcttcatgttgtttgctccactgggtttctctcgcaactttttttttttaaaaaaaaaaaaaaagggggccttgggtttgtcaagttctagattactcataatgtgattgcgactgttctctttttttggggtttgaatactatgattgttttttcttcaagcagttgaattttggttgtagaatttgatgtttgaatgaaagtcttaaccattgtttgtttcagtggaaaataggattggagaaagtaatgtgcttgtgttgttgaatgaggattcttttcgttgggaatgtggtttttctttttttgaagtttttgtttatattttactcatttgggttagtcaagagttttgtcagtagtcagaatttgaagttagtgacaaggttctgtttaccttaatgtttatcctagcaataagtgctcagcataaggctgcatctccattttttaattttcagaggatatgtaagatttcccttgaaagttggtgagaaccttgctttctgctcaacctcaaggtttttacttggggcttatggaaaaacttgattgaattttcaggtgtttagagtgattcgaaagcaggactggtataa

SEQ ID NO: 98458 - DNA, 667 bp, Vitis vinifera
  Intron number 2 from transcript GSVIVT01021859001 (locus G SVIVG01021859001) derived from phytozome v7.0 (chr-ID chr1 4; pos 6419358 to 6420024 reverse strand)
gctgtccacactgctattttgacactcaaggaggggtatatgcatcttaaacttctattcttttaaatttcagctaacgaatgtttgaaaactatcaaaaggcacatcaagaagctttgaacttatctgttgttcattctgcatttagttgcttagtgaattttcttcttgaaagaaattcagttgagtgatttactaacgtataattttactcattctttgagtaagagggttctgcatcctggattgctagagggacttccctggccaaaaaggatgcctagtatggctgactaaatcggagtttttgagaacttcaaattgtgttcaaaatttgtatgagatattaaaatgcacaaaatgttctctgaatagaatcattaaactcatcacaactgaggctatcactggatagtctcattgccgtgctatgagctttttcctttaattagcacaatttgggctcatgattcatgcatacaccatggtgaaatgatatgtttctttcttttggattataagataatatatttcttgtttatggcctgtgccacatcagcccttgcaggtttacttatgatgttgcatttcgttctctttagttatatgctgagtttcataaatttgtgcagatttgaagggcaaatatctagcaaaaacattgaga

SEQ ID NO: 98459 - DNA, 548 bp, Vitis vinifera
  Intron number 1 from transcript GSVIVT01021859001 (locus G SVIVG01021859001) derived from phytozome v7.0 (chr-ID chr1 4; pos 6420045 to 6420592 reverse strand)
caaagacatttctcgagaagaggtatttaaatcagaatttggttgatgtgtctttttaaaatgatatcaagcagcagcctatctttattgtgtttgatacttttgcaacaacaatttttttgaggctcttcgaattgccacattgctaggattatgtggctgcatcttgaagttctattataagccttatgtttcatactcaactctctatgggaaatgaagggcaaggctcgtgttcaccttgagttttctgattttttagtttcctataaaaaattataataaattggattggtaatttatgtgtaggatgcactttcaactttgccagggcttgaacttaatccatgtgattttttttttttaatttatttctgcattttggtaataacttctgttcactattgtaactttgattcccttctttcttttccttttcctttccctttccctttcccttcttttttaacattcaatttcctttccctctctttgatcttaacttaggaggagaattgaatatgttccttttccatgtaggtacactg

SEQ ID NO: 98460 - DNA, 580 bp, Vitis vinifera
  Intron number 1 from transcript GSVIVT01023300001 (locus G SVIVG01023300001) derived from phytozome v7.0 (chr-ID chr1 2; pos 19957203 to 19957782 reverse strand)
actcgcgcgagactattatcaaggcaacagtagtatgtttttttatatctatatatctatttctatatatatacttgattgtcaggaataataattatgttgaacaaaagaattgactgctatcaccatgttcaccctagtcatgactatttagtagctagcaagtaaataggaaaacacatatacagatgctgttggtatataaatcgaatttctaggttggttcacccatgatcggttgttatgaggcatgaactactgcccatggtttcagtaggagtactccatgaactctttagtagagtgcagaaacaaggaagaccataaaagacttatatgaaaactactagacttaatcaattgatcaaccccaagtcttccaatgatgtagaaacgggcaatataatcattgaaagcaactacaaataattcacgtaatgtattcccatacttttttgaattgtcaattccctttcatatatattatgcatttggatcgatcttaggttttttcttttgataccttctctcttctaaaagcttttgttttgttattttctgaaatttaaaactatagacc

SEQ ID NO: 98461 - DNA, 661 bp, Vitis vinifera
  Intron number 3 from transcript GSVIVT01019940001 (locus G SVIVG01019940001) derived from phytozome v7.0 (chr-ID chr2 ; pos 4632164 to 4632824 reverse strand)
ccactaaaggattgttcatttcgtaaaaaaattactttttttctctgttgaataactttagcattgccatatttgtgcagaagtcatatagtgtgtgtttgatttcagtgaatcatggttatgtccttttttcaatttgaatcttcattttctggaatttgacatctatcaaaactcaataacacttcactgatctatatgacaattacagttattggtatcattaaaaaatgtttgaagtttggggagttgctattggattttttttctctcttttttgttttaatattacatctgttggtttaggtggaggttgaagtcatcaaaataatgtctccatattaaaaaaaaaatgggttagttcttgaacaacatcctagataaccccaagagcattaacctaactgaaatgatagaaatatacaaatagctagtcatctgtcagttgctttgtgatttccttgttgatattattgttattttcttttgctcttgttgtggtaggaattcattgtttgttaatccaaaaacatatgcatattatgttaagtacatggatttccatttttattatgcctgtggaatgtctttgtgtgttcttccccaaccccactttcttgcttgaataatttgctcatatctccattgcagtgacataccc

SEQ ID NO: 98462 - DNA, 440 bp, Vitis vinifera
  Intron number 2 from transcript GSVIVT01021397001 (locus G SVIVG01021397001) derived from phytozome v7.0 (chr-ID chr1 0; pos 4895279 to 4895718)
ggacagaaagctgtcaagaatagcccttttccaaggtttgtacacccaaatataactcaaagaaatatcctcaaatccttttttcatactatgcttgcttacaattattccttttgcttattcaattgatgaaataaaaataaaagaaactgggactggatgagggttgactgacccgtgaaagattccaagttttttaccctttttgtctgtaacttggtgtaatcaagcaagaagacagacaataacaaaaaaactaaagggaaaaccatcaatatgggaaggttttttaagtctccttcactcttggaaaccaattgatagagccttaattatagttattttccttggttgatactggccaatatctgagccgtacccatttgattaattataccattgcagaagctactatcggtgcactactcagaagtgcacgg

SEQ ID NO: 98463 - DNA, 756 bp, Vitis vinifera
  Intron number 2 from transcript GSVIVT01028548001 (locus G SVIVG01028548001) derived from phytozome v7.0 (chr-ID chr7 ; pos 9550176 to 9550931 reverse strand)
gcggagaggttagttcagagtagttccggtgctcgaagcttggattttagatttttatcttttgaatgacggatctagacagtccaatttcattccggtgcaataggaaccgctggatagaacattgcgacaatcttagccgttgagatcgggatctgaaaatctggatcgttaattcggttattttagtatcccgatctgtttcggtctcaagcttcgagcaaaaaagttcactgtaaaagctaactattttcttggcaacttactcaattaccatattacccttcttaagaattgagattccataattagggtagattcaaaaatcacatgaggacaagcttagtcattttacagaaatttccctactacgggcgacgactgcctcgagctctgagtacggaaaattttcgtcctttctttaaggtgaaacttcaaaattcacatgggaaacggagatgtcagatttgggacaacatctaaacgacgtcgttttatgttttctgaaaacaaacgacgttagcgttgtcttggtataacttttcctaccttttcagcccaggttgttatacatcattttgggcttatagtttacgtaaatcaccaaggagccccaagtatttatttatttcctgatgccccactgatgtaatggttttgattatgtatttatcattttccaatacgggattttcttggccctgatgtagttactgcggaattttgttttcaggttggataaaagtgaagggtgga

SEQ ID NO: 98464 - DNA, 816 bp, Vitis vinifera
  Intron number 2 from transcript GSVIVT01024225001 (locus G SVIVG01024225001) derived from phytozome v7.0 (chr-ID chr3 ; pos 26388 to 27203)
aattccagtaaactttgagccctacaagctgactggtattcgccacttttctatcttgtcatttgtccaatactcattcccatttttacattcattaaacatcttctttatttctttacattttgtttagacaattttttaatttttattttgtctatggacattgtttttgcatatgtgcatctcatgcatgtttacatgcattctgataagaaaatacatgtttgcaagcattaagaatattgtttacttaatgaagaaagaagggaaaaaataagagggccttggttattggtaagtaaggtttaagtttggatcttgatggaagtgatagggttaaaaacatagatctatggtcatatttttgtggatgtattgaatagtcaatttttcatgctagaaaattctataatactgaactgtgcactttttctttaggagcaatacctcccaaaggcaatcaattgaggtagtccacatgtaaggttgccagatactaaaaataaactgctgagacttacattttccgttagtagttatgcggaatgctcgtaatttctttttaatggaatatcttcttatgaaaaggttattttgatgctcttaaaacataatttccctacattttgttgtgcatgttttgagttacttgaagttatcctaacatggttttctgaactttatggttgtctagcctgttcagctgttttatgctttatgatttatgaatgtgattgctcatattttaaggtctgagtatgacttttcatattgaaaacagagttcaactccaccaaacataaaaggatctggaca

SEQ ID NO: 98465 - DNA, 845 bp, Vitis vinifera
  Intron number 1 from transcript GSVIVT01026868001 (locus G SVIVG01026868001) derived from phytozome v7.0 (chr-ID chr1 5; pos 19780656 to 19781500 reverse strand)
caggtttggtccttttgttccttcttgctctgttttcctgagagaaataaacaacaacgacaaaaaaagagaccatagaaaatgtaaatctctgttcaacaagctaatgctcagttgggttgagttaattttttcttctctgttttgggaacaacggcagaaagagtgtggagttcattttctttcattcttcctgcattttctcagctgccaaacgggttcactcttttaaccaactttggtactaatccattgagacaggtgactgagtttccgagttgtggtttgacttaggtgtgaactctagttttcctcttcccacttgcttatcagattcatttttatttttatttttcgcttgtttgtttgtttgtttgctcagaatcctgacttttttcagtttcattttggcttttctgagtcatatatgctttgtcctgatgtttcaatcctggtgtcatggagtggttctcacttcaatgctagttttggacttggtgatcagactagtttgacctttattatcacagaaagccgaaaattgtatacaacaataataaggctccatatttgtttggttgccgagaaaacagtgaagaaaaaaaaaaaaggatataacttttgaatatcgacctattatccaatgatacaacagtatgaacctctggtaagtggagatttcccagctccaaactaatgattatacatcatatcaactctgtttatcctcattttacttccttgaacccataatgttttcgattttgatatattatggggttcgggttcttggctttcctctttcaacaggtctcctccgctgtgggaaaagttgcagactccga

SEQ ID NO: 98466 - DNA, 646 bp, Vitis vinifera
  Intron number 2 from transcript GSVIVT01021318001 (locus G SVIVG01021318001) derived from phytozome v7.0 (chr-ID chr1 0; pos 3967349 to 3967994)
gcggctggagaattctcacgagaggctttgcagaggtccgtcggattctcctttctcttccaatactgatatatatacacaaatatatatatatttttttaaattttgctctctgtttggtcgctgagaaagcgcagggaaagtgaaagaaaactaaaagcctgaactttgctaagccaattagttgtatcaggattagttcgccggagttttctgttttatcgggttctaagtggttaacgattaattgattttcaattttggtttattttatcctcccatatttttcttgccaatcaaacagagctttttcctcttcttcttcttccttttttcttttacgttgggttgctggataaacggacgagaaataaaacaaaagtaaagggaagagagaattttgtgtcttatgctttcagttttttcggtttccaaaacacgagatactcgagctttggtcactcaggtctacagaaagtaagatcgaaaattttaaccttttcatttcccagccaaccaagaggaacattagggtttaattgttctcctgattttggcaacatttaattgattatagatggttttgttggatgtaagagaaaaaccctaatcgattgtctccgaaatccgaattattgcagcaaat

SEQ ID NO: 98467 - DNA, 971 bp, Vitis vinifera
  Intron number 2 from transcript GSVIVT01022002001 (locus G SVIVG01022002001) derived from phytozome v7.0 (chr-ID chr1 4; pos 4408316 to 4409286 reverse strand)
ctcgaggccttcatcaactattcacgcatctcgaggtggtgcctcccgtacacttcgttgtttttttctgtagccaaaccctaattcttcttttcttttcgatattgaatggtttttttttcggccacacactgggtcaaaccctaacttttgtgattttattttattttttgggttgttttattccattttgcaaatttttttctgtggatgatctttgtttcttttcttttcctcttattatttttaaaacttttgttttcatcacatatatgaatccctaatgttgtgtttggttgatgagaaagtggagtaaggaaatcgttgtcaattgaaattttctattcctatttcttggcaaaggcaaccaaaatggattgcattgtcaatataaggacacggtcaaccgatttgccctggaaattgttattccttttatcattaggaactggccaaaaaaattgtcatcgttatttttataatagtaattgcaaatgttttcttaagtgaaaacagagctcttaaaatgtgctgtgaagaatatctcacttatgaaataatccatgattttctgagatcaatttcatgaataattatgaaaattatgtgttttttgtatactggagagtgagatttttttaatgctttttggatcgtaacattttgtatcccactgttttgattcccaagggagatatattttgtagaccttggatccagctctttacaaaataaaggttagaaatgttcccacctccaagagtaagaagaccgcatggaaattggagattcaacatttaactttaaccataggcagtagtgattctagaaacatggatgggcctgttgttcacagtgtgacgattcctcttcactgtctgcctgtttgattttgttcttcaacttgtgctaatatcttttcattgatttctgcagctatctttatctggttccgggttacgtgatcgtga

SEQ ID NO: 98468 - DNA, 385 bp, Vitis vinifera
  Intron number 1 from transcript GSVIVT01020121001 (locus G SVIVG01020121001) derived from phytozome v7.0 (chr-ID chr1 ; pos 10148757 to 10149141 reverse strand)
ttgcggtatttgttgatttaactaaatttggaactctggttgaaattgaattgtagaattgtggatgggttttaattccttgcttccatttgcttttgtgtttcttttcaaatcggttttgtttttttgatagttttgtaatatcgatgaaggaaagttttcttgtagtttatgatttgaattctgtttttcgtctttagattctgatttgttgatgccgaaataaatttaatatgtgtatacaggaaattttgtttaggcggacgacgttgtatattaatttggatggatcatggagtgaatttcacctttgtataaatttatacataatataaaatgtgtttgggattcattagactaagatttctgttttcaattgaacaga

SEQ ID NO: 98469 - DNA, 867 bp, Vitis vinifera
  Intron number 1 from transcript GSVIVT01023121001 (locus G SVIVG01023121001) derived from phytozome v7.0 (chr-ID chr1 2; pos 22356802 to 22357668 reverse strand)
gcaagaagtcatcccaacaaccttctccttacaaggtgtctcctttctccctgtctcttcatcttaattttcgacttcatgctgttcatgtcctttctctttcctcattcttctctagaaatgataattctttggttttctcatagcatttcatttcatttgagctcccataattcaaatgatgccccatttttcaccgacaacagtgttttgggacccctctattactctttaagattccttttggttcttggcaaaaatgggaccatttggtaatagaaaatggttaaataaaaaaggccccctgaccattttcttttctcccatttgtattccagaaaattgcagaatgaatgaaatgttagaattatcacctgagctctgttcttgtgttgtatggagaatctgaaagcaaaagctagcaagagggatgataatcttgaactttagcatatccatagggatgccctttctttacatcaatttaccctaaagcatgctcaagatcaaagaaactggctccaatgtcatgttgggtggtttagcgtattgattaaatagcaagaagtctgcagtcttcatatgcttaatagtgtgtaatacatgattccgcaaagggtaccgacttctgaattaagaaaaaaaatgacactgcaagaatattactagtaatatttactgaaaacaacgaaccaggatgaagattagggaactttgtagtatttaactgagaacaatggttatggctagtccatcatcaataattcacttaagacttttatttgtttatccactctaggttgtttaagtttgacaagctttctgatgatagggctctgagtcaactcctccgagaataacgacaaa

SEQ ID NO: 98470 - DNA, 652 bp, Vitis vinifera
  Intron number 2 from transcript GSVIVT01026487001 (locus G SVIVG01026487001) derived from phytozome v7.0 (chr-ID chr4 ; pos 22814798 to 22815449)
atcacgctccctttggcgtatataggtgggtttctggggttttggtttgaattttttaaaattaggtcttgggttgttgttttgttgttgattttatcttgggctttggatgatcgattgattgattcttatcgattgatagactcttattgattgatagatcgatcaactatgatgtggatgatcatcaattcattaaattgctatcaatatatagcaacttgtcatttaactgttcacccaaaaaaagggactcaccatctctccaatttggtctgttttccatatctggatctttctctataaatcggtgatcaaaagtatatggagttctaagaaatttcgtatgttgattgataaacttgttagaaaatttagtgttttagttaattactcatcgttaggaatccatggttttgcatcattagcaataatgttagttatcagttctatcggttccatattgctttcttctggttttacaaagtttagtggccaattaggctattataaactttgtaagtaggaaaactttgaagatggagaaaacaagagcactggactttagttcctgcttcttttgtgctacttctaacggaaacccgtgttgatcccagaggacagggggaaaccaagtccaacacaagatcaa

SEQ ID NO: 98471 - DNA, 911 bp, Vitis vinifera
  Intron number 1 from transcript GSVIVT01029808001 (locus G SVIVG01029808001) derived from phytozome v7.0 (chr-ID chr1 2; pos 15121587 to 15122497)
gaggttagttgacactctccttttattgctatgctaattcacagatgatagtttcaatttttttcccattcaattttttgttcattgctatcaatttgacgatttctgtttgattctattgtacatcattgttaactgtatgaaagcatgcttattgtagaggcatttattaaaatattaaaatttaattttttttgtaataggatctatcatttcatccaactagaagagtttctccaattctatgcatttttctagaatacacagacaattctgacctttcaagccattaaattgaaatctggcttactgatgcaaaagaattactaatttaatcaaagtagtttttttatcacttgcattattttttcttttctagatcttatcagctcagtttttgtgctgacatatagactggttcataaattcatgtttccctagaagattgaattcagaagtctcaatttcttgagatgtgaaagcatgccagataaatggtgtcccttgttaggcaatgttagtggaaactttatcatttcattcaagagaactttatatttgttttgacttcccatgttggttgaatgcattccctggacttggttagtttattttctgttctacttcaatccataccaaaaccaaacaatagaaacaaggtgaaaatgacaggacagttagatgttacaggacaacaatgaacccttcatgcaattctggaattgttaataaaattttctatccgactaaattcttgtaatcagaaatattaagctaatattggtttttgcatgatcctgattcctttatggaattttatgtcagtagttttaattctttggtgtcaccacatttttaagatatctcaatttacagggctatactccaatcttctgtgttggtgttttgga

SEQ ID NO: 98472 - DNA, 916 bp, Vitis vinifera
  Intron number 1 from transcript GSVIVT01020540001 (locus G SVIVG01020540001) derived from phytozome v7.0 (chr-ID chr1 2; pos 4675162 to 4676077 reverse strand)
gcctaagtcatcttcgagcttgaggtgggattcaaatccttgtccccatctgagtttctcttcttctaagtattgtttggttccaagagaggaaagaaaaaaatattcagaaaagtattaagagaacaaaaaatatgttaagaaaaattatttttttatctttattttactatgaaaaatatgaaaaaagatatatatatatatatatataaaattaaaattaattaaaaaatttatatatttttaaatcagttaatttttatatagaaaaaaaaatgagtttaaaataatatatattattatttttcattttttataactttttctttttattttatttttttcaatttttaagaattaaatcttatataaatctatatgattaatttctatgatttaattgacatgtttattaaaagtaaatttaaaatgattcaaaaatgagtccaatattttatatttataattaagttaatcattaagactattacatatgtgaattcgaatcaaattcatgttatataggttaataaaaaaaacctaattattaagtaaggttatgtaaatcgacacaaatttggcctaaacatgattatactcggcccaaacccataaaatatgtgttacgtttgagtcttgggaattatattaaactttattagagcaaggcaaaagtcgaaagaaggtgtgaaattcattttaacatgggcttgggcctaggactgatccatggacttgattggacttgggctaagcccaaaatcctgtttggccctttaagtagctgtaatgcaatcaagaaaatatgacacttgccagtaggcacaacaactattaactaataacaaagattcattcatgatcatttattttcctttcagtattgggccatcggtccagctgtccaccgcgtctt

SEQ ID NO: 98473 - DNA, 967 bp, Vitis vinifera
  Intron number 1 from transcript GSVIVT01022628001 (locus G SVIVG01022628001) derived from phytozome v7.0 (chr-ID chr2 ; pos 13744085 to 13745051)
acaatcaagaacctagttgtggggttgtctctttgatgaggatgaatctccaagatatacatcaagaaaatgaattagtatcagttgcaattaaagtatgattaatattacttcgacttaaattaggattagcatttgttggaattaaattaagagtagctaattaggttattggagaataagaattatagtcataatgggttattagaatcctagtagacttggatttattagagaagcctataattaaggttaattgatgtaaatcaaagtaatggattgatgattaataataccatgttttctagcatactttgcaattttcattggtgagactctattgattttcttctacatgaggctgttagaaagtcttagtgagactttaaggtttctattccttcttcttcttatcttctttctctatattttttattttatctttctctaccatcaactttatccctcgttcctctccttaaatcctaaaaaaatgaaaaaccctagcccacctatttgagtgtaggtaagcatcctagggttgtcctacatcactcttcccccccaccccccacctttttttttttcatctgtgtttgtggtgggggtatcgttgaggaatgttttctttctacaacctaaggagaagctcttcaaatctggattatctgtcctggattttcctcttaggaagctaggctcatattggcctaatcataaaaaattttacttgaccaaactgaataagttggttctccattgaatcatacacaacttgtttaaaggatcagagtctcatcatctgttcatttttttagaatctataccacttaatctaatataaatatactgaaaaatattttttctaggtattttttatttctttgtgtgctagaatataactatgttcttgtttataaatgtctgtgtaggttgcatcagagaaaggacttttcactattgtcat

SEQ ID NO: 98474 - DNA, 841 bp, Vitis vinifera
  Intron number 1 from transcript GSVIVT01022683001 (locus G SVIVG01022683001) derived from phytozome v7.0 (chr-ID chr2 ; pos 14819790 to 14820630)
ggagaagaggaattgcagcagtagcagcagctttggtgagtcgttttcgcataataatagtttcctttgggaggaacacatatcaatgcgaggatccttattctgtctctatgtcgattcatagaacgctttcatcactcgacacgcttacacatacaccaatttcattgttaaaagcacattggtccatcagtcttccccctcttccctctcttctctcttccctttctctctctctctcccactccacaccacaccaaagagattctcttctctcttccaactgctttttggattttcttaaagaatgactcttgtatttttttttttctttaaatcaaaagaaagataaagaagcagaccattatttaatgaatccgtcagaaacttcggctattccacagtctcattctttattccccacacacgacacttcaaactccctccatttttccctcttttaaatttgttttttcccttgtcccattattgcctcaagtattataaccatttcccaatttttttttttatttttttttaatgtaatttgtttttggaagatctaagcctgctaagagggcccatgagatatggggaatgttctaatgtcctgaacctttgaccaaaactacccctggacaaaactgcactttgaggggtagaatggtcattttatcagtcaccaatgctttaggcaaagctagctttgtcccaaagaggaatgatggatgaatgaatgaaattttgtgattatcaatgaaaattaataaattattgaaataacgattttttgtttttttatttttttttatatttgtgtttgcagtgactccacatagaa

SEQ ID NO: 98475 - DNA, 814 bp, Vitis vinifera
  Intron number 4 from transcript GSVIVT01029701001 (locus G SVIVG01029701001) derived from phytozome v7.0 (chr-ID chr1 2; pos 13358227 to 13359040 reverse strand)
tcttagccctggtaatcttcttttttttgctttttcggtaaccttagtttgttaatttttggcagttttataaagttttccttgcatgttcttttctttttctttttctttttgggttaaagttaaacattcgttttagttgttttttcttaaatcatgttaatgtgtagttaattaaaggatgcattttgatgtacaattatttctaagtatctttgatgcataaatttgtttcacccttgaatgcctacttgtgcttgcctgaggtaacgttatccgactgttttatattgatatcaagatgtttattgccctcagctgtttcaatggttaattttcatccagttttcttaagttgcatgtttcttatagtatattctaaaatatttgtttgtctcagtaataaaatcattctgacaatatggatatattggcagaaatgtttatttgaaaagattgtaaaactaatagaaacacgtggaaattttggataaagttcttacagatatgtttagatccattggagatattgaatcatacgcatactgtaaatcacaaacatgctatattcaaattctttcttgcagttagttaattgtggtcattgttgacatttttccatctgaagctgttttatttaaccaattcttgtctctctgtccgcaaacttagtaccgcttttatatcttggggctttgattttaaaacactgaattaaacatgattcactattttatagttctttgctttcctgctgaatctgctgctgtgttttattttgtggttacaatttttgcagctttgctagttgaaa

SEQ ID NO: 98476 - DNA, 726 bp, Vitis vinifera
  Intron number 2 from transcript GSVIVT01029701001 (locus G SVIVG01029701001) derived from phytozome v7.0 (chr-ID chr1 2; pos 13359634 to 13360359 reverse strand)
tggtttctgattatctacgttctctttgcgggcaggtttgtcttagatgtaaagttttctcttccatgattttttgttgctttctccacaatcacatacaatttactgaagaaaaatgcgaactctataatctgggtagctttaacttgatcggcactccgaattattttattttattttatttttatttttctatctgggtttgttttgtttctttttgctttcgtttctccattattttaccaagaaatacgcagaaaattcatcctttgaccagccagttccaagtcccaaaaaatgaggccaattgcattaagtaaaccaaaacatttttaaaagattggcatagctgatccaaatggttttgatctaggccttggttgagccaaagctatatacagagagagtttcatagattttcttagttggtttggtgttttaggaaagaagattggtatgggaggaaaatagggtttatggacctaaaaaggttgtctctagcaaaagtttggtaatttaggctactttgaagcccatgtgaatctgcccttttatgcttattgtctcttttccatttcttttctttttctctttatgggtgctttttttcttgtggtttctttcctttattttattcttgctcatcaagctttatggcgggaacctgagtttctcctggctctatttgcagctaaccgctagccataagttaaatataagtcatca

SEQ ID NO: 98477 - DNA, 978 bp, Vitis vinifera
  Intron number 1 from transcript GSVIVT01021653001 (locus G SVIVG01021653001) derived from phytozome v7.0 (chr-ID chr1 0; pos 8790506 to 8791483)
aactcatcgccacattcattttcattcgttttctggtatttttcttcttttcttttcgttttttctttttttcctttctgatttgttgttgttgttgttgttttaaaataattgtttttttattttattatagaagcaatgcgttgttgtttctgtattctggatttgctctttcgttgatgataaaattgaggaaatgaattgggcttggggttttttacgattttttttctttttttttttttttggtgccggaaatctgtggctctggtgatcttggttgagtggagggatcttgttttatccgatgaattttgtgtttggtttctgagaaaacttaggaaaatgaatgaggatggggaattttgaatctttcttgttttgggctgctttgattccggaaaggtatgtgctatacgtgtgttggtctcgcatgggtggaaagctggggctttattgcatcacgggagatgcttgataaagaatccaggatgggggattttaatttgtttttgtatgttttctcagcgtccaatcaagttttgttgttcttgtacggataatttgaatagtcgcttttgatttcacgggtgttttaatttttggaatttggtgattctctgtttgaatagtggggaaacggaggaaagggaaagaaaacaaaaacaactttgtttttacctttattttaactttttttttttcccaagaaatgaactcaatttatctcagccacataaatataaggttcagttgagtactttttcttggcctaatggtagcaagtttaaaatccatatgtttgattcgatttatactttttcccggaaacgaaatataaaaattcattagaggaatgcacaaagagagtttattatttggctcttagcttcatatcttcttatttgttatttttaaatttgtcctcttcttttgcttggaggggttggttgatttttgggaagactgtctgtaaag

SEQ ID NO: 98478 - DNA, 937 bp, Vitis vinifera
  Intron number 1 from transcript GSVIVT01026647001 (locus G SVIVG01026647001) derived from phytozome v7.0 (chr-ID chr4 ; pos 20771281 to 20772217)
tacggatcgagagggtaagttcaagaaagtttctttttatttaaatcctaattccctgttttgatgtgctgcaatcttgttatgtatgcaagaaaatctttagggtttttgtatattcttgttagtcttaatgaaaatatggaagaaaactccaacatgttcatgcataaagaattaaggaaagaattttgaaatttctgatgtctttgtaacaatagtaaacgtttggcatgttcaatgataactcaagttctgcatcataggagattggaaactgtttaaattggttttgttttctggaagtattgcctttaatcagtaaagtatatattttcaaggcaaaccctaaaatggccgaacccaagtagcccgtatgcagcgtggaaaatctcttgttgaacttcattcttaatctataatggcttatatgcttattctatcaagttatttatacttatcaattctttttattcctgtaaattggtgttcttggggttgcaagttataattggtgatgttgggaaacatggcagttgttacacccttgacgcacttggaaaaatgtcattcttttgtttcactaatgttattttgtgactacatcttggaaattctttgggccagaaaaaactttttttttccccctgattatgggaggacacccaattggttgttccttcctgatagcattagtgagtcgaggttttggcattcctggccagggtgatcatttgctgtgtttcttcacttctttccactgcttctggggttcacttggtgtttaggagggttgataaaatctcaaaaatgttttgaggaaaaaaaagtataggaataaagacattaggtgtcaggaaaacgtgggttgggtttggttttattaacaggttgagtgggggattttttttctgttttgggtatggataattgaagggca

SEQ ID NO: 98479 - DNA, 1008 bp, Vitis vinifera
  Intron number 1 from transcript GSVIVT01018960001 (locus G SVIVG01018960001) derived from phytozome v7.0 (chr-ID chr4 ; pos 18330102 to 18331109)
caggcaaaagagagtctgtattttcaggcacggtaatcttttaaacttgagttttttatttttatttttatttttttgctttcagagatttgggtttatatttaccgtctgtttggttctgagaatatgaaaattggtatctttgagaggcaaagtcgggccctcaactgctttgaagttttttaaaatttctttatgctctctgtgtcttgatcccaactgaaaggggcagttattaggaacaggtagatgcccctatgtaacaagcctattgtttttcctctgccaaactagaatcgcaaccatattatctgttaagatgtttgaatggtttaaatttgagaattagaaactctacctgaaaggtgaagatgctggaaggtcgaggactgaggatgaaattcatgtggtattaatttgaaatgaagggtcaataatgctttcaacatgatcattttacatctttaaggtttgtttctgaaagctctatttgttgtggggatttgaactgatgacttacaccttaacaaggccttgggaaacaaaaagaaaaaattaatttcattattttcattttgttgttttgctttcaaaatataattaaaaacatttgtcttaaccatcaaccaagctaaacaattgcattatgcttagtcagtggaggtttttgatttttcaggcctcaaataatgaaatatttaggattagaaatttggttatctttatgtttcctatgatttcttagcaaccaagtaaagcagtggttgaatattttttccaagtttatctacggaatttccagatgttataggcaccatgcactttacatttcggtcttggtgctgaaattttttcctgaatctgactccattattgtgcatttatgtgattgactaaagaatgatggcatttccaagcattcatcaataatcttgtaattatctgttggatttggtttttccatgttgtttagggggccggggatttgtggaggttaaagaatttggt

SEQ ID NO: 98480 - DNA, 1013 bp, Vitis vinifera
  Intron number 1 from transcript GSVIVT01028052001 (locus G SVIVG01028052001) derived from phytozome v7.0 (chr-ID chr7 ; pos 3456251 to 3457263)
gccaattccagtgggttttcgctactcctttttcttcgtctgattccgatctgtttgatttgctgttgccttacgctttagacttgctttggttaccgtttgaccccgagaaatcgtgggaaattttttttaaaacttggtacttggaaatggttcacccctttgaatattcttaaagacgggaaattaggtttccattttacatgatcggtggatccatcatctgaatttgatattcgtttgaggattctcacctggtaagggtcacgactttatcgataaaccctaaatcattttcttcaattttcgatgtttggaaattaatgataaccatttcaactattatagattactggttcgttttatgcaaattaaggaaatggaattttttattcttaactgggttttgtttttctctttttcaacaataatatttaggacctactaatattcccattcattatctgaactttggcttattggaattgcgttcacagttttaaggaatcaaaaaacaactggatttgaacaacatacggatctaatttttaagtttaaaagcgtatcgtcatatgccctaatccatctcttcaattttttggccctcgccctattaaatcttctaggtttgttgtaaacttgggacttctctcgcagtattgaatatttcaagggtgcacataaaggttaggtcatcaagtgccaagtcccacaaaactagtccagctttacaaataaaaaaaccaagatacaaagaagggaaatatagcacactcaaggaggaataaagtctccaacaaaggaggcgaaatgcttagctccttgtttggctaatgggtcatattctgaaaattctacatgctattgtatgacaattactcaatatggaaatggctagttcttgctttctttgtgtttatttgttttagatttcaatcgaggttttggaagatgttgactaacatcttgtgggttactgactgcagggcaaaacattaggaagctggtcaagg

SEQ ID NO: 98481 - DNA, 860 bp, Vitis vinifera
  Intron number 2 from transcript GSVIVT01018950001 (locus G SVIVG01018950001) derived from phytozome v7.0 (chr-ID chr4 ; pos 18429256 to 18430115)
ggttcccggatcgccttcacaaggactaccttgaggtttgtactgctactactaccactcttatgctgttactgtttccatttcgattgaagcttctgcagttggttttctttctctggtcaatttaattattccacgaaaaaggaaaaaaaacaaagggtttccataaattcttacatgaaagctacatgtgcaacaaattcacccttgttcctgcccaaactacacccaacctcttcagtcttcaccttgtgttcaagtttggtaaattctatttggatctccttggtaaatgaagaatgtttgcttttttaatgatttatgggtacataattagatatatgaactcggtcaggtttcacactcttttgctttccttgggaaaataaggcaggttccacgtttcttttttatacttttccacccaacaagttactacaaattattaatccaagtattagagctactaattttgatgaaacaataaaggaagggtccaaatcgctgtcactttcaaagaagaattactgaaatggtaggtgccacacccacacccatgccatgacaccgctggtcttggttgaaccaactattcctagtctgtgttccaacagcgacaacgaggcacgagtctgcccacatcagcatgtttttagattacagcctggatactcatttattcgagcctcatctaattcatatcatcatttcttacaacaaccaaagcggccgccacaatcaagtatttacacatctggttgaacatatattcgaataagtacatccataaacatcacccttttatgtggtcttccaaggatagttttggtggttgatactgactgatgtcccaacaggtg

SEQ ID NO: 98482 - DNA, 428 bp, Vitis vinifera
  Intron number 3 from transcript GSVIVT01026613001 (locus G SVIVG01026613001) derived from phytozome v7.0 (chr-ID chr4 ; pos 21017642 to 21018069 reverse strand)
tgggattctttgtatttactggcatccctacttctgtgagttgttccaatcttctttccctctttcaattttcatacttttgtttcttgcatgcagaaaactcaggtagtgaagaaaaaagatgtctccataatcttggttcttgaatggatttactttaccttggacaatgattctaacacatttattcctttgagatttgaaaacttcaatggctatgagcagaaagggtccattatttgaacaattaagataattcaatcagcatcaggcttttataaatgaatcactctccaaattgatttcaaaacataaatatccgaagtcagaggggatactacatgttaaagtccattctattttctttttagctaaccagaattaccaatgcaggcattcctgtggttcaaatctgttcaaacagctaa

SEQ ID NO: 98483 - DNA, 308 bp, Vitis vinifera
  Intron number 2 from transcript GSVIVT01027007001 (locus G SVIVG01027007001) derived from phytozome v7.0 (chr-ID chr1 5; pos 18612311 to 18612618 reverse strand)
taatgtgagtttcttttctaacgctttattgatatgcatacacttggattttgtctaatcgaagcattgaattttggaactagatctttttcttgacggtgccccaagctgtgattgcatgtgatagaaccgttgattttttctcttaaattcacctactaggccattgtttaagttagcatactgacagtgtgaatatggggagactcgtgggggttttgtatggttttcatgcgatcccgcgttgaagagattatgtctttgtttttcatttttgaattaatttattttgtatattgtttgcagat

SEQ ID NO: 98484 - DNA, 610 bp, Vitis vinifera
  Intron number 1 from transcript GSVIVT01027007001 (locus G SVIVG01027007001) derived from phytozome v7.0 (chr-ID chr1 5; pos 18612686 to 18613295 reverse strand)
ccgtcgcgatcttgtcttcgtcgtcaacccaagaggttttttcctgcttttctgggaacatttgtactggcttttcattatcttctttgttctgtttggttgttgagaaaatgagaagaagattaaaaacgaaatttgagtcttgccactcttgcggttgttgttgctttggtgttcgaagttttgaaacttgagccgaatggttgtgctgatgcggaattttgttttatggattatggggctcgaggttttgtgacttttgttctatattttcttgggaaccaaacgaagtgttagtggaaatatggttctaatctattggttatcgggaaattctctccctcttaattttcttatttgctctgttttgttgccgagaaaaataatgaaaatgagaagatattggtgtttgaaattttaaaactgtgacaaactaatctgaatacttatatgggatgaggctcgaggctttgagttttttttttttttttttccctttttttttcatgattctggagaaccaaacagaatattaatggattcttgttatgcgatgaaaagatttttttgaatttttgctatttgatactctgaattagagcaggtgcaa

SEQ ID NO: 98485 - DNA, 606 bp, Vitis vinifera
  Intron number 4 from transcript GSVIVT01030095001 (locus G SVIVG01030095001) derived from phytozome v7.0 (chr-ID chr1 2; pos 9780795 to 9781400 reverse strand)
gcatcggtgcttttgtcatcaatagtaaaagagaggtatcccttcttcatcttttgctaacaatgaaaaataaggcttggttactttctaaaatgtttggttgttttactagtcaaatttgtcgcctcaagtcatgaatggataacgagaataattagtttctcattttacggagaaaactggaataacttcaagagagggccttttatttctttaaaagaattatattcttactctttttatttctaaagacagaagaaaacataatttttctctttgtgattttcaaagaaagagaagtcaaaatatatctctctggtttctaggagaaaattctcattgagagatttcactagagaaagaaaaaaataaataaataaattttttatttatttatttttaataatgacagtttttggatagttttaaaactctcaaaaattgggtcgggtcggatcagcccacttggggcacccaaacccaactctaacagctaaacgttctgggttttctccaacttgatggcttagcagttctgatttctgatttgaagttttatttcatttggtaggtcctggtggttcaggaaaatagtggcagattcaa

SEQ ID NO: 98486 - DNA, 525 bp, Vitis vinifera
  Intron number 1 from transcript GSVIVT01030095001 (locus G SVIVG01030095001) derived from phytozome v7.0 (chr-ID chr1 2; pos 9782102 to 9782626 reverse strand)
tcgtaagactagcactactctctcctcctccaaacgtattccctcatccttcattctccctctcatgctctctttattttattttactgtaaggatggtccatcctgtatgatcggtttatacttgaatcaaaactgtcttactatactttttaaaatacaagtattagaactcgggtttgcttctaatgattagaaatttaaaagacaggaaaaggtgaagacagaaatgggaacttaacatttatgtccctccatttgtctgtttggtttttcatagtgctttatcaagctcgaaactaggtggaaatatcttcctttgtctctttcttgttgaagtcttgtttggtagcagagagaatcctctatccattttgcactattcccggaattcgttttagaatttatttattcattttttttttgggttacattgttatcttattatcatttttctatgacacaaaatgatcaaccctgtgttcattcaggtgtcaaggctagagctgtgatcccacacttaacc

SEQ ID NO: 98487 - DNA, 965 bp, Vitis vinifera
  Intron number 2 from transcript GSVIVT01028578001 (locus G SVIVG01028578001) derived from phytozome v7.0 (chr-ID chr7 ; pos 10113993 to 10114957)
gcgaattataagccgagtgagtgttttgaagaaattttagtatgttttgcatatgttggattcattttatgctctaggttttcaaaagtctggttctttccttgaaaaatttagcgataatcatgattttaaggcaagaatagtaaaaaagaagggaaacttaggaatcttacgtttatagaattctcagtacttccttttcttttctaagtgatcaaacactattccctagatctgacttttaggaagaaaagaaagaaaataatggtagtgtgtcacatggtttaatataccacattttcaatcatggtatcttgatggtagaaaatggaatttgaagtgcactgtgggatatgtcatttcaagcaactgctactttttttctcctttctgctatttcttttagtaagcaactgttgcattacattgatatgtctctgccttttaggatagttcagaacttgaagtgtggatctttgtgagtggaggcatcttttgattgtacaactctttttttctgttctttggaagaataaaagtggcaaaaggaaaagagctcaaaaaacatggaagggaaagagcttgttaaaaaatatgtattttcttatgtcaaaagtcacatattatagagttcgattcaaactagccgaaattgaaagtaaaaacatgagatggttgtatgtgttcttggattaatgaagtttatcattggttcctataaataaatggataataaatggagaagtttctggcatgaatgaatccgtatgcggtacagtctgaactagtttttgggtcccttttctttggtttggccttgtaaaaccaagtcacacccttgacatttggtgactaaaatgatgtcttctgatatccttagagcaatattgtagttcagcttactgatttattgcctgaatgactctacaggttcgagatcttgattttgccataaaagtaatagg

SEQ ID NO: 98488 - DNA, 700 bp, Vitis vinifera
  Intron number 4 from transcript GSVIVT01024584001 (locus G SVIVG01024584001) derived from phytozome v7.0 (chr-ID chr6 ; pos 8632743 to 8633442 reverse strand)
ctacaagttcagaaagagagcggattgaagaatctgtaagtttatattcatgttgggaagcatgttatgttttattagtgttgaatatttctttctcaatataagtctaccaatttatttattgagaaactaaaatttgttggatgcttataataggtgaccagtgattatcacaagaaagcataagatattctgtaaattctactcttgagctcaatagtccctacccttgagggtgcctttgaattgtaattatcattataaagttcctatccatagtgggagacaacacactcgttcattgtgtcattatatgaacttgtttgctaatttaattctcaatttacaatcagtgaacgtggaaagagatagaactagcaataccatcaaggtcagacccatggtagtattctaatggactgggaactgtcttctggttctcacctattgagtcatgtttgcataaaatgttttcataagatgaattttagccatgtaattctcccttcatggtcccctaactaaaaaatataactggaataaaaaatggacgtataaacatgctatcttcagcattgaacatacacaatttcatatttactaagaaccgctggctcttctgttgtttatttataactaatactggtgctaactgtcttacacagatatttaggaataaattgacattttttgctgctgc

SEQ ID NO: 98489 - DNA, 542 bp, Vitis vinifera
  Intron number 1 from transcript GSVIVT01024584001 (locus G SVIVG01024584001) derived from phytozome v7.0 (chr-ID chr6 ; pos 8634799 to 8635340 reverse strand)
ggagtcaaagcattttctctaaaaaaaacaaaaaggtgttctaatcattacccatttctagggtttttttttttttccttttattattattattgttgttgttttttgtagttagcatttccctctatatcctctatttggtcgctgggaaaatggagggtttgaacggaaaacgaaaattttgagtcttatgttgtgtgttttacgttttgtcaggtgtagaaaactctgccctgcttgggcgagtagctatagctggtgaaattggttggagcttttttgggttttctccgggtttggacaggggaaagatcttagcttttcatctcttttctttcctccaactttttctcatcaaccaaacagaggattgtttctaaatggaaatgcgtttcttcttgggtcttcattaacgagttttgatttttgttcttgtatatgggttttattcattcattgtacgttgggttctgaggtttatgacttattgggtcttgaatatttcagctatttctttttgggtttgtgattctggaaccgta

SEQ ID NO: 98490 - DNA, 638 bp, Vitis vinifera
  Intron number 3 from transcript GSVIVT01028082001 (locus G SVIVG01028082001) derived from phytozome v7.0 (chr-ID chr7 ; pos 3668058 to 3668695 reverse strand)
cagtccttttcctgggcattaaaggtgagtaggtatatgagtatttgtagtatgtttgaatattgttgttgttcttattattagtattattattattatttatctcttaatattgtccatatggtcctagtagtaatcattcaagatcatttaattttttaaacccctagcttttgtttaaaaagaagattgagctttatgccttgttgtggcttggggtaatactaaatgaaaggggtgtgatgctcagagccacagtgagattcacaaatgctttgccccaaggcttccttaaaactagcacccgtttgactcataaagtaataaaggataggatttttgctacaatgggaactctacatcagctctttctgctgaagatacaagattggtctggatggaaaacatattaagatttatgacagaaaagaatttaattatggtttctaattgcaataaatttcttatatgcatgagtttgcagtagaatttatgacctgatttactcatgtaatttcagggtgatggcatggaagaccaaattaccaacaattcctcccaaattattagtttatgtctcagatttgtttcctttttttattttgtgtttctttttttgacagacattcttgggtttc

SEQ ID NO: 98491 - DNA, 825 bp, Vitis vinifera
  Intron number 2 from transcript GSVIVT01028082001 (locus G SVIVG01028082001) derived from phytozome v7.0 (chr-ID chr7 ; pos 3669661 to 3670485 reverse strand)
gagataaagcatttgtactggacttcgtcgctccagtgagtttatttgatcgatttagctttctgttaacttattggattcgcagattgtcatgttaaccaatatatgtatccacacaaagcaactatgaacacattatcgtgaagaggactggtgatacaattctcgaaaattttggttataaacaccggtgaaaagtgcttgcatatgcattatggtgaaatgtgaactccaattttatgttgctaagcttggggtttagcttgaaagatactttctgtggtaggtctctgttttttattttattaactcctcaaagagagggggccttcatctctcttacatacacgaaaaaggaaatgggatccactatcagatggggtcctttatcaccctagccacaaaaagagtttcagttggatcagtttgcctgtactttttacatgctgtttttcttctaaacactcacagaagttcatcatatgtcaaaataattttatctaaatcatggaaaatcaaatgcataaaatggataaacaaagcttcttcttcttcttcttcttcttcttcttttgatatacttgcagtttattcctatgggatggttttttcaaatctttttttggtgatatgaaaaattaaatgaggtccagtaaagtggcgaattgtgaacagaagtgaagctgagctaattgcacttcttattatggtttgtggaagatgctagtaaatttatctggcatgctaaactatgcacctcatggacattctggtttttttattgaacattttgaaattgtgggcaggtgtggcatcttcagtttc

SEQ ID NO: 98492 - DNA, 727 bp, Vitis vinifera
  Intron number 2 from transcript GSVIVT01024185001 (locus G SVIVG01024185001) derived from phytozome v7.0 (chr-ID chr3 ; pos 512472 to 513198 reverse strand)
aagcatttatttgttttctatgatggtgcttgtcatcttcaattgtttcaattgattcctcctagtatttttcattccaagtaatttttgtgaaagtgtcttttttcaaaagcgtttctagtgtttttcattcaagtaatttttttgaaagtgtttttttttcaaaagtgtttttggataattaaaggctcgatctaaacagtaattttagaaattgtttttaacttttttaatacttaaaattttttatcattcaaatattagaaaaactaaaaacgttttctaaaatcactattaaatacattttaactataaaatatctctctaaaatatattataagtggtttttcaaaatatactatgcctaatatgctactctgggttttcaactcctgtttaaaagctttaaaatcatgtattgagtttcaaatctttattgaactttacttgagctttaaaaaagagtttttaagtgcgctctgcttaaaaaatataagtgaatgtaagtgtggttgagcctaaccacttccaaattttgaatttgcatttctctttttcttatcctctttacttatttgtaatttatattattgtttatattgtcacttgcattatctatgatcagtatagtttgtatcttaatgaaatataattaaaattaacaattcacgaattaagaattctcacaacaacaaaacaaggtctactcgacatgaattaggtgtta

SEQ ID NO: 98493 - DNA, 712 bp, Vitis vinifera
  Intron number 3 from transcript GSVIVT01021036001 (locus G SVIVG01021036001) derived from phytozome v7.0 (chr-ID chr5 ; pos 14943751 to 14944462)
ggccaagggtggtcctagcctcggctcagtggaaggtgccttctggttttcaacctcaagaagttcttttgcttctaatcatgttattttcccatttatatatctttttcctttgtgattttgagaacatgtcggtgctaagtgtggtatacacaatcctgcaaataatatcatccatttacaatctatgcctggaacagtttcttcttcttcttcttcttggcaactgagtttattgccagattcctttgatgttttctaactaggatcactctcattcttgtgctaagggtggtcttagcctcggctcaatggaaggtgccttctggttttcaaactcaagaagttcttttgcttctaatcatgttctattcccattcatatatctttttcctttgtgattttgagaatctatcgatgctaagtatggtatacacaatcctgcaaattatatcatccatttacaatctatgcctggtacagtttcttcttctttttcttcttcttcgtcttcttcttcttggcaactgatggtttattgccagattcctttgatgttttctaaccgggatcactctcattcttgtgctaccttgaattgcaattcgatccgatgcaatcccaactggggtgactttttctttccgagctcacttctggttgattacaaaatgcaggctgttcaagactattatctgcagaaagtgaagaa

SEQ ID NO: 98494 - DNA, 1014 bp, Vitis vinifera
  Intron number 1 from transcript GSVIVT01025842001 (locus G SVIVG01025842001) derived from phytozome v7.0 (chr-ID chr8 ; pos 11313358 to 11314371)
ccaagaggctgtatcaagtctggaagggggccaacgtgagtgtctctcttgattcggcccttgtgatgggattgcatgatcgttaattcaattgggtgtctcttatttttcttattttcattctgcttctgatcattgaatggttcttagtggtggattgggtatataggggtgaactcatcatatatagtatgctttcaaacttttgaattgtgtatagttgtgggtgtgatgggtcttgtgtgtctttttttttttttaaaaaaatatatattatttttttcctctgcttttcatttgtgtgggatgcaatcttgaactaaaatttgtaatctctgagaacaaaaatgggttttgcatttctaggtaaagttggctttggcaatcactgggcttgtttgtttgattgatttcagagttatgagagtgaatgtttcaatcagattccctattattagataattaacttctccttgctaatgaaaatacgatatcttaagttacttcctctttgtatcagtctgatttctatggatgcaggaaggagaaaaaaaaaacagagaacatataagttttgacctagatagagcagactggcaagccagctggtatgggaaatccttaggtagctaagatgagttgatatggatttgttgaccactatatgagacctagctcatctgactagtgtgtgtgatgacattccatggaaaaaaaggtttttcatatgactaaattccatttcttggcatgattatcagcaagcgtcttcttggtgtgtttgaggagattgtttaccgtgcattactaattaagacttaaaatcaagttgtttgcttttcatatgaggatttttcattgtgttgattttatgattctgctattggatatgtttaaattggttgaaagaaaacttaaaatctggaattagtatggcatgcttgcgctgacaaagagtgtttttttaatgtattgccagagatttttctgtggtggaagattgatctttggtcc

SEQ ID NO: 98495 - DNA, 353 bp, Vitis vinifera
  Intron number 2 from transcript GSVIVT01022665001 (locus G SVIVG01022665001) derived from phytozome v7.0 (chr-ID chr2 ; pos 14313847 to 14314199 reverse strand)
attagacttcataagctgttgggaaacaggcaagtttatttattaatttcctattacatttagtatagccactgttagattggtaatagagatacaagtttggattgaatcctgagaaaatacgaggaaaatgaaagaaaaaaattgaaggaaaataatcaattaagctttttcacttgcaaagaaaaaagaattgtacctaccttcccttaatttttttccttgtctgatccttaacccaaaccaaattctggagctgatggttaaagaaacaacgcccccatgaattagaaactcaaacaagatcattttaatttaacacttttaaaaaagttgtagctatgtttttccag

SEQ ID NO: 98496 - DNA, 733 bp, Vitis vinifera
  Intron number 1 from transcript GSVIVT01027008001 (locus G SVIVG01027008001) derived from phytozome v7.0 (chr-ID chr1 5; pos 18606481 to 18607213 reverse strand)
gaagccggtccacacagttctcggcggaggaaaacgtaaggaccttccaatctctctttctctctaggatctagcgtttttggttgattagggttttggaggtatttgaggtgggtgtagatttgtagagattgtttatggatttgttaatttatgttttgatggagttgttttcattgatttagttgatgtttctgaaaattctatgggagttctttttcttttttgtaatcttatgtcttaaggctttcttaaccatatgctccgtttggtttctgagaaaatcgggggaaatgaaaggaatttgaactttaaggttcctctacaaagcataaatcttagttggggtggcttttttttcatcatttttgggaatctaaacaacctaaagctaaagcataagattcgaattgatccttctatttctttcccgtttgttttgttgttacccgtaaccgaacggatggtaaggcacaagtatctgagaaattaaaagctccaccgagatgggcttgtatgtataaacaggagatgtgagattcaatattttgtttctatccattttcctatcttctctggaaaccaatgataggatggaagtatggtgctaggttttaagttttttttttttttttttaatatatttgagggatttgtttgttccgggtctctcatgccctaactttatcctcttcgtggggtttgttgctgtgttcatttaatgcagacgctg

SEQ ID NO: 98497 - DNA, 718 bp, Vitis vinifera
  Intron number 3 from transcript GSVIVT01029689001 (locus G SVIVG01029689001) derived from phytozome v7.0 (chr-ID chr1 2; pos 13100581 to 13101298)
ctcctaaaaggcggctatcgtccgcgattgttaaggtaaattcttcttcttcttttttttttcttttttttgggtttctgttgggagaatttgtttatttgttgaggaaatcgagagaaggatgagaaaattgaattccagatcttgtctttctgtatttttcgccttttttttgtgggttttccacaatctgaaaggtttagtatccttggagctgaatgatgggagctgtatgttttcttgggttccaaaccttgaaacaaacatttaccatcacttttctctgcaaacatcagacaaagatgagaaaagaaataaaattgttgatttctggctccgtttgtcgcaatggagcaaaagagatttttcccttatgactacaatttgcaatccacccatcattactccagaaaaatctcttcgcaactaaagttatgtttttcttcggttggagcctttgtaagttatgttctgtagatttccaaaataaacaagacttcactgggctgaatcatcgccactaggtttgattgaggaaacttttcttacaatcatggaaacatgatatatctaggataggattcagattttcaattcctttatgttttgttccttcttagcaaccaaacaccattgatttattttctttacccacctattcatagaagccaagtagaacttaattacacttttcttgatttggaaatgaaggtggagg

SEQ ID NO: 98498 - DNA, 991 bp, Vitis vinifera
  Intron number 2 from transcript GSVIVT01026958001 (locus G SVIVG01026958001) derived from phytozome v7.0 (chr-ID chr1 5; pos 19031492 to 19032482)
tgcgatcttttgctgctggaggaaagttgttgcaggtaatttatactccttacaagttcttataaatcatttgtcaagttctttaacttgctaaaaaaactttgtgagctccatttggatctaggaaaggaaaagtaaaggaaagagaaatgctgaaaattacttacaatgcattcttctttcaaactatttgtcattctcctctcctttccaagattcaaacatttgcctaaacaaggttgattggctgtgggattggatatgatttggaattacatttatgtgaaatgcaatcatttttctggattgagtacacgaagatttagactttacatgcattatctaggttcattccaagaagtctaatttggagctaaaaaatatatttataataggtcattgatgtttgtttcctcctggaggatgtgaattataaattttttattttgcttatttaccctctctctctcttcccccccctcccccctctggggtcagtaagtggaggggaccattgacattttagcattagcacttctggttgaaatctgggagtttatgcacaaaatgtggattctaactcatgatccatgcaataacagttgtttgacaaccagttcttggtccacatgatggcagttgtttgacaatgagttctgggcagtatttctggtaacaaattaacagtttgcttttgccaattctctatttggtaaaagaggtcaaagaaaaatgaaagcaaaatacatttggatccttttgagtttgaaagtgttttatattttcactctcaaagtttatacttctattttgccattatgtacttggttattaccacaacaaaagtgatctaatgcatatgatgggttttaatatttgaacaataattttcataagatgctgcatgtaaattatatgtagtcatactgatgtttatattctttagggaatatagtataattatattttgatgatgcagataaatagaaga

SEQ ID NO: 98499 - DNA, 785 bp, Vitis vinifera
  Intron number 1 from transcript GSVIVT01020649001 (locus G SVIVG01020649001) derived from phytozome v7.0 (chr-ID chr1 2; pos 3470102 to 3470886 reverse strand)
ctcaaacccccatctccaatttcttcaatttgctggtatttttcatcttcttgatttttattcatttttattatggattctgggggttgcctttttatttttatttttattttttaatttttttttttggagtaaatcaatagggtatgtatatagagagaggattcggaattttcggttcgggttctccgttgtcctctgtttggctgctgagaaatctggggagattgcaattgtttgcttattattatgattatttttttttcttttaattttggttgggttccaaaaatggaaaatttgccccgattgagacgagattgggggcagtgagttatgttcccgacagtgaaaagaaaaggatgatgttcgatgctttatagtccttttggttcctgagaaaatgcaggaaacaagaaatttaaatattgaatcctggggtgttcagaattttggactggaggaaactaagagctccaatcagcagaatctgacacgattgatttgcttgattttgtttatttcatcttatctagaaacaggattcttgttttcttcttcttcttcttttgtttttggtttttttttttttcctgtttctcagcaatccgtgggtaatttatttaattttgtttacccacatttttctcctaaacaaatttgagtcttactcactcttcatgctgtgctagtcatacgtgtgttgtacttttcatgttttcagccaatatttgggttcataggaatttttcattctgctttttagggttttgaggaggggatca

SEQ ID NO: 98500 - DNA, 495 bp, Vitis vinifera
  Intron number 4 from transcript GSVIVT01027040001 (locus G SVIVG01027040001) derived from phytozome v7.0 (chr-ID chr1 5; pos 18419648 to 18420142 reverse strand)
ctggaggtgtttatccacatcctgcagttcctcttgtaagtccaacatttttattaactatagggcatttactttgcttttctacttagagggaattggtctctatgtgttcaaagtttaagtttgatggttgtttaagcctcctttagtgccttggtataagtgattggctttgtgaacttatgtgcagttttgatgggaaggatacatgacatccacttgcctgaaattctaattgtgtaatgatagcagttttttgttcttggtgcacatcttccttggcttggattcccccattttcgggtgacttgaatcaaacagaagaatgcatttttattttaatttttaatttttaaatttgtttatggtagatatagctttcatttaccatctaggcaaagtagtttctgaatgaaactcagtgtgcaatctaacaggaataggtctaatatatctatattgattgctttccatgcatccaggggtcacattcac

SEQ ID NO: 98501 - DNA, 1061 bp, Vitis vinifera
  Intron number 1 from transcript GSVIVT01021395001 (locus G SVIVG01021395001) derived from phytozome v7.0 (chr-ID chr1 0; pos 4872019 to 4873079)
tcacctctctccttactccatctcttggaaaagtaatccattttgattttttgactttgcctactccgtcttgtttccgaaaaattacggaaaaacagaagataattttaaattttgtgtctgtcaattttctttgtttaggaccattccgactactcagattgggtgacgtcgggttatccttttaaaattgtttcagattttaattgtcttggcttactcaggtttcttggctacaaaataggattagggttttagcttcagttgttactggtttctgttctggatttcacattttctgttgctttcgattttacgatgttgacgatctatgaagtaaatgtttcacctgtattatacaatttcgtattttgcactgattcttttgtttgtgatgctttttgtaaaattgaattatagagtggatggatattgaagtgagattttgttttgcgcagcatttaaaatgttaattttgattttgtttagatgactctgtttgaaaaactaaggcactgttttggtgggcatatggcaagttttcaggagagaaattgaaaggaaacatttaaataaaagcaaggaaggacttcagaacgagataatctttcagttgggtattttagatatttgcatttgtaggtgaaattggttgttcaatcactgttccaactcaatgcccatgctctctctttaggaatgttcggattgccagggtgttgcatgattgtgatctgaagagagggattttttgttttttgccttttgtttttcttattgtgagttatgaaattttgtttgtttataattactttatatgtataaatattaatgaagcaatactgaagttcatgatctcagatctagtttacttgattccatacagccgatatcattttgcttcagctgggaaataaattcagacttttaactttaatttgatgctgggtttcggaaatcatactaataatcttttgtttttcctcttcttttgtcttttttacccctcttttcttttgaatttaggctgatcctgaattagaagctatcagacaaagaag

SEQ ID NO: 98502 - DNA, 687 bp, Vitis vinifera
  Intron number 1 from transcript GSVIVT01022285001 (locus G SVIVG01022285001) derived from phytozome v7.0 (chr-ID chr7 ; pos 18221333 to 18222019 reverse strand)
acattgctcgtgtaaggatctttcaagtttcaaagttcctgttcgattcatattttcttttttgagaatacctattttcctgttctgttaattttttccaagaaaatttggttgttgatggtagattgatgcggtttatgtgtctttgcttttggtctcaagtggtggactgggatttttgatggatagatttttgtcggttttggttttcctgactgaatgatggtttttaggctatgcaatatgataatcaaatacaaccatactagatagctgaacagaaaacctgaaagaagaacagagagaagttttcataactaagattttttaattatttattgaacatgggaactaagttttggttaaaatactggagttttggtcctgtttgaaaattcaataatttaaaagttggaatactagatatagatttttttatttttcagaccctgtctgaatgatattttattaacaaattcagtgcactgatattttttttatggggttggggtgtgtgcttggtggttggcctataaggattgggatgtattctggattaaactgaccctgaaccttagttttgttttagttctcatccttccataatcaaaagttcataacattgttattatggttcgtgggtttttttcagatcaagtctgtgcgagaattgagtgggcaaatttg

SEQ ID NO: 98503 - DNA, 696 bp, Vitis vinifera
  Intron number 2 from transcript GSVIVT01027031001 (locus G SVIVG01027031001) derived from phytozome v7.0 (chr-ID chr1 5; pos 18480996 to 18481691 reverse strand)
gaggtaaacaatgattctcttcccttcctctccattttcctgccgatatttctttaaaacccattttgcttttctcagactaaaaaaggggaaggggatgtatcctttgaattgaatatggcaagttttcacaaagtcctctctatgtagctcgctcatagattcactgctgttggagcacaagtaggctattccattagaaattgtgttcgtgatgctctcattttgtattttaattaacatgaaaatgactgtcaaacacagcatattgtccagtaagatttaggttctagagacgtacaagcaggattctgaaaatataatgaggaaggtctgtcacagaagaggttcacaacaaaagtgcctcgaaaagggcagttcaactgttttgaagaacggttgaagaaaatttaatatttcaagaaatgctgtttttaggtttctagttccatcagaaaagtgagagctagaaaaactcatgatgcgattatggttacagctgcaaggacactgcttatcttaatctttaccatggattccttaacatactgccgtctttcatatttataatgctttctgtcaaatggctcattcttctaaaggttatttcgctatgattatgctagttaaattgatccagatgttcttttgttcttcacaggtggcacattacaatcctgcagtcactccaactag

SEQ ID NO: 98504 - DNA, 999 bp, Vitis vinifera
  Intron number 2 from transcript GSVIVT01019768001 (locus G SVIVG01019768001) derived from phytozome v7.0 (chr-ID chr2 ; pos 3157130 to 3158128)
ggcaaagcgtcagcatctttcccctgattttaaaggtgagaatttcaggatttggatcacaactctgcgttaaggattgttggaaaaagtgatggttgttgaaaaattatgcctcttaatctatccctaaaaagcgtattaacaaatttgggatttgagtatagggaattgaggagttattcagaaattcattaagaaaaaaataaatgaaggaaatttgaggtaaaggtgatgatatctaatttaagaaagtaagaagaatgtctcacctttccttatttttctggaataatgtttgagaatagtttagtaatcattgcaatgggtgtgatatacttaggtttgattcccttgattaacagatcggtgtaaatttgggaatttggaaatgtttccagaattttgtggggtcgttgagagagtagagcaaaaagggagagagatgtagatgtgttaggcagttccttgaatgaagtaaagctactaatttagttgaaaccatgaactgatggggaatattccagcattttgttagtggaaaaggaagggggagagaaaattggtcccttgcttgaggattagtatagaactatagacattgcatgatcttcaatgattgcccgtgaataataattgcgttgattaatttgtatgccaagatgttaagttggattctgttgcaaatcactgaaagaaaaaaaacttcttggagtgtttttctttttccccccattttaaaggctcaagctgtcttagcagttcattaaccgtaaatcttcaagattggatgttctctaaactgtctttttatttttttattttttatttatcatggacctgtctatactttatcatgcatatcgagctaccaagaccgaattgcatgtgtctttctgtggaaagtgtaactcttaaaaaaaagttttcaatagcatgtttatttctgtaactgacaacgtgaagtttttattacaatttgtacttacagtggtaaaccct

SEQ ID NO: 98505 - DNA, 880 bp, Vitis vinifera
  Intron number 1 from transcript GSVIVT01021956001 (locus G SVIVG01021956001) derived from phytozome v7.0 (chr-ID chr1 4; pos 5093479 to 5094358 reverse strand)
tcttttgtctaaggttagttttttcccatattttttgtttgttcttatactacttgaaatatttagggagatatattataaaaatatttttaaaaagaaagtatgagaagaatacattaatcttgaataataattttattaatttgattttaaataataaaaattgtgaataataagtaaattacaaatgagttgaaaaaaataaaattttaatgtgaaaaattaatttaaaaaggataaatgttaatagaaataatataaaaatgaggagaactagtgaaaatttaattcaaataataatattttatttaaattttagaagagttaaaattaatgacttttgggaaaattgggttaaaatgttagatgaaaataaaaaagagcaaaacatattttatttcatataagaagactaattaatcttgatttaaaataaccatcaaagttaataattttattatttagtttcaaaaaataaaaaaataactagtggatcataaataaaatgtaaaagaaattgaaaacaagaataaagttaaaaaaggaatttttaattttaaaaacattaaatattaatatgaaaaaacataataaaaaggaaacatagtaaatttcattttaatttaaataaaaaaaagttaatttgttagtagaaataaatataacaatgaatttaaaagtgaaattattgaaattcttaatataaaaaataaatttgaaaaggaaataattaaaatttgcatatgatttgagagtgaatgaattatattgacttattatttttgtatttatcacatttttaccattaatgatatcatgtattatatattgtgtttttcatgtaggtttcattccctcttaatttggacgagttggttct

SEQ ID NO: 98506 - DNA, 810 bp, Vitis vinifera
  Intron number 1 from transcript GSVIVT01023726001 (locus G SVIVG01023726001) derived from phytozome v7.0 (chr-ID chr1 1; pos 10203602 to 10204411)
cggagcagttgtctcccattcaggtatggcgtttgtttcagatctgggttttgtgttcgtttcattcttcacaaaattctttttttttgattctgtagcatgtatttttttcggatcgatccgattccacttttcaatttctgttttttctgtttcctccgtagttttgatttaggtttattgcaagaaatctcccacactggtttgagatttggaagttttgaaatttctttttgggtcaagaaagaagaaagattctcgtaggggcaaaattgattattaaacctttagttgatttatttattttccttttggtattatttaattcaatgcatgtgctgtattctgtgagtgagttttctttatcttttgcttgtgagattttctcggaaagataagagcctttttgaaattgaaaaattcaaaattggagtgaaattcaaactagatttgaacttttcacgggttctaattcaagtctgtatgtagtcttttgttgaatttctgtgaaccctaaattgttgttctgggtttcttgcacgactcttgagaatttttgaaactggttccagtttagcactatgcagaactgccttaccaattaaccctccaagaaacgatcttcccatattaattctctccagaggctttatgtccctattcatagaaataaatcatctgttcatagaactaaatgccttgataaaattttgtcctttttcagatgttgctgttcttgttgtcattaaactacaatctgtttctgattggtatttgtttatttgcagtctggttgctgtaagccatcaa

SEQ ID NO: 98507 - DNA, 862 bp, Vitis vinifera
  Intron number 1 from transcript GSVIVT01028183001 (locus G SVIVG01028183001) derived from phytozome v7.0 (chr-ID chr7 ; pos 4468264 to 4469125)
gaagattgatcattgatttcctctgtgagttcactctctttccattcaattcagttatgcatttcttttaccagctgaaataagggaaaaaaaattatcatgtactgtttatttttttgtttgatactttattggtattattgtatcaattttcattgaaatttagacaaatttaaacgtatttagaggtcaaataaattaataaataccacccaaataaatgtgggaaaaaacacataaaatgatggaagtggaaaatggagtgagatgtatgacttactagaaaacagagatcggataattggtttatttcagcatgaaaatgaaaatgaaatgatagattgttttttttaaaaaaagcaagttgtgatattttatgttagatagggcagaaaagtcttaacactatataaatataaattcttcttaatcttgtatatgcattttaaaagtcatgaaaatctcttaaatttagaacaaataatatctatacagttgaaagtgaatcattataaatgatatcaaagttaatatttgattttaatgtggagatttctttgtatttgaccccgtaatctcatgagatagaatgaagatgttatatttgcatagtaagtaattgtgatatcccacattggataaagaagaaagttcttgatattgtataagtatgaaattctcttttaactttgtaaaaaaattttaaaatcgtaaaaaccttttaaatttaaagtaaacaatatttatatagttagaagcgaatcgttacacagattatatatcttataataatttgcgtttgacattttcttttcaattttttacaggtgagaatttaacgactagttacttgactccatac

SEQ ID NO: 98508 - DNA, 197 bp, Vitis vinifera
  Intron number 1 from transcript GSVIVT01025083001 (locus G SVIVG01025083001) derived from phytozome v7.0 (chr-ID chr6 ; pos 4652854 to 4653050 reverse strand)
gctgtcacgtaaaacaaaaaaaattctcttgaattattattgttattattgttgttgttgttgttgtttttttttttttgatcttctaatgggtttttcctttctgacatttgtttgaatcgcatttcctgtctgggtcttctttgttttggtgcgcagaagtgctgaagaggttcttcccccttctctcgattcca

SEQ ID NO: 98509 - DNA, 438 bp, Vitis vinifera
  Intron number 3 from transcript GSVIVT01027643001 (locus G SVIVG01027643001) derived from phytozome v7.0 (chr-ID chr1 5; pos 14749610 to 14750047)
ttacgggtaagctctcgatcttttcttattgttctaaggggagggagtagttttttgtttttctctttttgttctttgctttctgggcccttgcataccacctatgtagtttggtgtgcccttttgctaggcactgttaatagatttctttgcttgcctatcaaacaaggaattattttcttattgtaaacattagtcattcttcactgtaattcttgttgtttttacctttatttttttaaaatagatcttgagttgcatttgatggttattttgaatcttcttttttcagctattaatccatgtaaatttttttaaaaaaaatttaaatccttgttgatgtgctgtatgaatttcatctctttagcaattgtttcatttatttttatttaattttgattaacatactttcactatgaattggccttggcagttaca

SEQ ID NO: 98510 - DNA, 1027 bp, Vitis vinifera
  Intron number 2 from transcript GSVIVT01028738001 (locus G SVIVG01028738001) derived from phytozome v7.0 (chr-ID chr1 6; pos 19257905 to 19258931 reverse strand)
aaaacttttacaagagacaggtttggatttcatttccctttcaattgttattagcaatttgattataaccctttttgggatatttatgaatagaattttgcttgctctggcacacacaatccacaacaatatcatagatagggttgattgttcctagaatcatcttatatttgaagctgagaaatacaccagggaaagattccttctatgatcatcctcctgtctacttgaggttctgaatcatatttgaaaagatcaaatatgtttttaatgtaattttgggtagagatgcttgcatgtagtggttttatcaattagagaaggaagtgtttctgtttaacaatggaaaatttggggcttagagttgtgctttcatgcccttttctgatcaatgtaccatctggtttaagagagaatcttatgaattctgctaggattttcttgtttgcagattatggaatctgtaggggtcttgtggcatggaagccaataattctctgatgtatttggggttcaataaaatgcatatgggttacactcaattgaccaggaaatggaagttgaatattgtctagctgctctacttttaggtcacgtttggtacgctgaatagagcatgggaaggggaaatcaattcttttctcattcatttatgtgcttggattgttttttagtatgcgaacatgaataaaaattcattagtatggaaaccaaatctcactcttactagaatttcaattcctctcttctacatggtcttgtgatcaccttcattctcatcctatttctgtacctatttctacatatcaaacacacccttaatgtaaaccatgacaggaattcatatttcagtttcatttcttctgtgtacatacaattataagctcaatgcagatttgtagttggtttatcatttcttttcctcacaagcattgtcctcatgaacttctattttacttgctcacttagtattcaaacttcaacccttcactctggatatgttctataacaggtgggaaagatacca

SEQ ID NO: 98511 - DNA, 817 bp, Vitis vinifera
  Intron number 1 from transcript GSVIVT01024105001 (locus G SVIVG01024105001) derived from phytozome v7.0 (chr-ID chr3 ; pos 1019023 to 1019839 reverse strand)
cactgttgaagttgaagaatcaaggtaaatgggattttttttttttttttaattgttggtgttttttttttttgaatgatgttgcattttatgggtttgtttaatggtggtgattcatgttcggttgatgagaaaatcctggaatatgaagtgggaatggttttagagaaagcaaagaagcttaattttgctaaatatttgcactgggttggttgggttttttgtttttgaagattatgcattaatgtttttgttcagcttccatccagctgtttcatgtttggttcccgaggaattttggaaaagaaaatgggctgaatttatggttttataattctgggaatgggttggaagagaaaagcaaaagagctcgattgagttggttttcttagtttttcgcgagatccttcgttaacgtttctgttcaattctgcggattcatgtttgggtcctgggaaaaatctggaaatcaaaacgagtggaatttgaagttctgctcttctaaagtaaggtttttaaagagggctaaaaaggaaaaacctcactgcgggccagcacaggggctgattgggtagtattgttttgttgattttgtttctggctgttggaaggatgaggaaaaggatagcgaaaggtttggatttggtttcttttccagagtgttttctagcattttcttttcagttttaccactaattctgaaacccaagtagaggcatgaggttaaattatcatttgttttgttctctaattttcttcctggttcttggagaccaaacataggacttatgtaatgcctgtatctctcaaatttcag

SEQ ID NO: 98512 - DNA, 716 bp, Vitis vinifera
  Intron number 1 from transcript GSVIVT01027160001 (locus G SVIVG01027160001) derived from phytozome v7.0 (chr-ID chr1 5; pos 17349163 to 17349878)
ctgaagaccagagcaaatccggttctagaatatctgtgagttgttttttttattctttttgtcagaaaattcatttagggttttactgtagaagtcttttcacattcatattttccttttgaaaaaggaaaattaaaattgaactgtttgaatttgcatctgattgtgaaaatttggtgcttctatagtatactttcaattggctttgcattgttgcaattgagtacattaaaatttagatgatcatgagtaagtgattgaggttgcagaggcatttgcttgatgaagcaggaattagagggttaggagacagtggcttgaagatttgagggtgataatatgaaatatgaatatggttttgagattatttgattgatgccacattggctaacttgaggaaataatgagatgaatataagaaagtagcgacttttggtaacataaaagaaatttttacaggaaaatggggttcttggtgataataagaagaatagtggcagtaattgtaagggtgtaaggaattctggtcaggtaaggaggagctaaactttgacccttgttctttcccagaagttaaattagatagcatcttttatttgagtcattctgtagttctatctttttgttgacagtttcatctaatgttcaataatgaatctcggactttgttctaataagctttgcttttcaggacaaactcaataagaacaaagagc

SEQ ID NO: 98513 - DNA, 619 bp, Vitis vinifera
  Intron number 1 from transcript GSVIVT01023220001 (locus G SVIVG01023220001) derived from phytozome v7.0 (chr-ID chr1 2; pos 20979493 to 20980111 reverse strand)
cccgaaaggctgactcatttgagaggttggacaaggtcagttttgtatccttatgattgtttgcttatctggattctgattcctctgtactatgacttgatttcaggaaaaagaagaattatagttcccttgataagtcttcacattgcacataatttggatttttaattattgcttttgtcaggatgcatatacttgtgattctcatctctttctttatgtgtacttcaggcaaagattgtgtatagtctattattgtgtaaagttagttaacaaacactactatgtctgagcctgagcatacgatttcacccaaatctttatctagaagattttcgaacctattgctttggcatatagttcttccctagattctttgcctgtttgtgggatcattaactggacaactgccaactaaatccacacttaaagaagaacgggaaacttagtttaaatttggttagcaccgtctttcagatttgattgtcagtccatttagaagtaggatttaagtttaatctaggatttggtgttaattctattgattttcctctattatttcatggaccttgctggtgatgcagattggacaaggaacttacagcagtgtgtacaaggc

SEQ ID NO: 98514 - DNA, 941 bp, Vitis vinifera
  Intron number 2 from transcript GSVIVT01022995001 (locus G SVIVG01022995001) derived from phytozome v7.0 (chr-ID chr1 2; pos 17172171 to 17173111 reverse strand)
ccactcttgaggatcaacaaagggttgatcaggttgggatttcttctcttttcttttctttttttactcttttatttagtgtttggttaatgttttgcaagtaattctgttgattttgggtgtgaagttcagaggcaagaaaattcttatatttgattttggtatttgcactttaaactgtttgttgattttaagggctaaaagcaatgctcttgctttgatgtccaaggagagaaattgaagcaacataaggaggcccaaatttacttgtttcacctttcaaaagggctatttcgtaggagaagataatattcattcttcactaatattgaagattgacccaaaactcttgtgtttgagacatagggaaattacactttccagtctgccagtttttgaagtttcattcccctagccagatgaatttgtcaggtggctttatgatctaattattcccatttaaaatataatataaaattaagaagtatgggtattacctaaaagggagtcctgagaacaattttgattctagacagatgaaggacagggcaattgacctttttgggctatttattaatgatatccttgattctcagagaaactttccatgttttcctccctgtgttccccttctctttctatatcccatggtgagagtgtgatacatctcctactcgaagtaacaatgtttaaagcctttgctgttagaatgttgaagtctaggaaatcccattttgaataggttcagattgttactacagcccacacctggcattgcttttcttggacattgcagaactgattgtattatgtcatgctaatttaaaaccagatggataaatatagttattattgttaattaacactgttatttttttcctttccttgaatttttttatcaattagattgccagtgagcttgaagcagtcaattcaataaa

SEQ ID NO: 98515 - DNA, 452 bp, Vitis vinifera
  Intron number 1 from transcript GSVIVT01019046001 (locus G SVIVG01019046001) derived from phytozome v7.0 (chr-ID chr4 ; pos 17398680 to 17399131)
cgtgcaaaatccacctctcctgcccatctttaaaggtacattaccaccattctccggttctatttggtgtctctgtatctaagcgtaggccatggcatatatgtgacatgtttgtgaccttatatatttttattatatattaggtacagcccatgcgacaaatcagaatagggaagaacccttacttgatttcatgggttaattaaaatcaatcaagggattttggggacattgattgtggtttttcttatacacggttagatgattttgatttttgatttggacccaccttttggattgctgatctgtatatgggttttggatgttgttgattattgtagggttttttttggtaattgtattatcaataagggaaaataatgctagggttttaatgcaagattattgttgggtttctgtaatttggtcttctctgattagggttttagtca

SEQ ID NO: 98516 - DNA, 835 bp, Vitis vinifera
  Intron number 3 from transcript GSVIVT01019046001 (locus G SVIVG01019046001) derived from phytozome v7.0 (chr-ID chr4 ; pos 17401219 to 17402053)
ggtcaaggtactaatattatcttcattctgtcaactttttcttcctttgtggatcatatgattttgttcatgctcacatcatggatatataattttggtggcttgtttggtttgagtttaatctgttcaaattttcatagataatctatcctagtctctttaaagtacagcattgctatctttagacagagtgaaagtgttccctttttaaggaacagttggttctcttccttgtaaagaactgtccttttgattcaccatgatttctttctagttttcatattcttccctcttttgtggtcctgtggatataccctggaaacattgttgctggaagctccattaaatggacatttttaaagtatgtgaaacaaccattttggacatcacatgacaaggacttgggtgtggtatatatgtccaatatgcttattaatatggtatgtacccaacatgtagaccaaaaatggaaaaggaataaaagattcctagttggttacaggtgactctatacgcacatttgacattctatacacctcaatctggctgtatagaatgtgaaaagagaggaaaataggttattatgccatgctctactatcatttaatttggggagtaagcaaatatgacacttaagatgcacaccattttctagcatttgtactgggttccatgaacacaccctttaagtgtcttggtcccaggtatcaggtaaaagatttggtatgatggaaattttactaatataatatgtgccatgaaaaaagataaccatgagctgactttattttcatatttctgtctctctgtttttccaagtatagtggcgagggaa

SEQ ID NO: 98517 - DNA, 973 bp, Vitis vinifera
  Intron number 3 from transcript GSVIVT01027624001 (locus G SVIVG01027624001) derived from phytozome v7.0 (chr-ID chr1 5; pos 14953838 to 14954810 reverse strand)
gcctgttgctgctgctagaaccgttcttcagcaagtcagggtcttggacaagttccatcgatgcaagcgaagacagcataagagattgttttcgggttttgatttgttaacctcgtctttcactgctatggaagtatccaaccagctgaaacaagtattcaggctccttgacacaaatggggatggcaaaatatcctccttcgagctcagtgaagtactcctgtggctaggacaggagaagtccacagccgtcgaggaagctgaaggcatggtcagagaagtggactgcaacggggatgggttcatcgacttggacgagttcatgcgcgtcatgaatactgacttcacagttggtagcagcagcacctgtgatgatggtctgatggatgcttttctgattttcgattctgacaagaatggagtgatatccgcggaagagttgcagcgtgttctaatcagccttggatgcgttaagtgcagcctccaagagtgtaaacgtatgattaagggagtcgacaaagatggcgatgggtttgttgattttgaagaatttagatcaatgatgacaggatgtgctagtactaaagctatatgaggctgaccctggatttcgattattcaacaagctttgtagggaagaagaagaagaagaagcatttaagtaccagaagttcttctttgcttcttggagataagttttcatcaagctaggcaaggaagctatgtgggattcatgcaggaagaaactagaaagactgattctagacattttttcccctttcaattaggtttagttgaattgttttttcaataaactcagtgcctgcaatgcttctgattttgaaatatgtcactaaatcccttgagaagcaattaagaaaaatttgtaatgttttaagaaggatactactctgtcctcacaaggctagccttctcttgtcttcttgctttaaacgaattttattataagtaa

SEQ ID NO: 98518 - DNA, 971 bp, Vitis vinifera
  Intron number 1 from transcript GSVIVT01021049001 (locus G SVIVG01021049001) derived from phytozome v7.0 (chr-ID chr5 ; pos 14610471 to 14611441)
tcacttgcatctatacaggtatatgccattcctcctcctcctcctgcatcttcttctttatatcacatatttaatgggatttcaattcatcctttcttcataataatggtaattttatttatttttatttttatttttaaattgttttgcgtcgctcctctagatgttctgcttgatgctgagattcgatttcggggttgcgagaaaaacaaatggtttctcaaaagttctttccagtatttctctctgctttctgctcttaaatctcaatttattgccattttgattttatctggcgacgctggtttttaatttgtagattgatgagtaaattttgttcggcgatgactgaatttatacagcactaggcctgaacatgaaaagatttttattttttattttaagatttatggttctattggcgtttccaaatttctggcttaattttgaatgagagatgctgagatgaatgattcatatagagtacagatgctaacaattgaaacaccataggcatgccgaagagaaatacttgtctgcaatcactctgtggtacacagctttattatgatgataattccattaggttttgccatttctggttacggatgtgtagcatatgaaaatgatcagggccttgtttcattcattcatccactgtttgtttgggacctgaaagcacaaaccagttgaagcctagtatgattttccttttagaacatgaggatgtgggcctccaattcatgggttttttttttttatatatatagcttgttgcttcattccaaaatataagggtattccagtataacatcctttcctcattgtttagcaaattaactaacgcccatgtgcttctccatcaggtcatgctccttcttagctgtcctcacaattttgggccacttcccttctaatggttcaattcttatgcaggatcaggaaaagggaagcctgactaccttgctaca

SEQ ID NO: 98519 - DNA, 886 bp, Vitis vinifera
  Intron number 1 from transcript GSVIVT01022257001 (locus G SVIVG01022257001) derived from phytozome v7.0 (chr-ID chr7 ; pos 17939442 to 17940327 reverse strand)
ctcgattgaagctcgattggagccttaatttccaggtttttgtttttgtttttttcttctctctctcttttttttttttgttgcattttgtagatttgaattgagcgcgtattttgtattagggttttcgttctgttctttttcatttttgatctgagttggccttaattttcgaccatttatcgagaataacattgattacgcgcgtttacttctgtttgttcataaattctatgtttggttgccgagaaaattgaagaaaattgtttgtgtttgtagtaaagctagctcaaatttgttttttgttttttgttttttatttatttatgcgggcgtctcttgcaaatcaaagcaaaggaaaatgcgaggttcaagttctcatttcttttttactggttcttcagtaacatcttctattggattctcagtaatcaaacggagtgggggatcaaaacagagaaaaatgcgaggcttaagttctcattttcttttgtattgttttctcagtaaacttttttttattggattatcagtaatcaaacagagtggaattaaagtgaaccgtgtgattgttagttcgttttcttttccatgtgggatccatattgttggtggatcatattgggcaagtattgaagagtttcctgtcctcttattactttaactacatcaaatttggttctttttatccatttattattattattattattattattattaaaatattgtttatttttttattttttattttttgaatttgaggtttgctcgattttcatttccggatttgttgattttgaaatgcctataggaacttgatgcttccacaagtttatcattctaatatgaagtgttattccctttttatgctttttaagatcaa

SEQ ID NO: 98520 - DNA, 826 bp, Vitis vinifera
  Intron number 1 from transcript GSVIVT01028199001 (locus G SVIVG01028199001) derived from phytozome v7.0 (chr-ID chr7 ; pos 4561895 to 4562720 reverse strand)
ctacaatctttgtttattacacagagtaagctcttctcttttatttatattttgttcaatttctcttgatgttcttgttcatgttgtgctctgttcctgtatatttgtgcccattggagtactaattttctagatatagaagataatagaaaaattcactacaatcggtacgattgtactagtcaaatgtttcattaaccgaaaccctcatgatttaagagataagattcagttgattgaatgccaattcactcatttacagaactctttagcataattttccctcatattgacgaagaaaatttttaatataatttgggaaaattgaacttttctaagggttgtggaagaatgcatatcagttaggaataacaaaatgcataaaaatcatctgttgtttgaagcccttgctattgtcataggaaaaatgagatgggaacaacagattatgcaactttttgtagaattaagagcaaatgataatcgagtctaaagaacccaacaacactcctgttctctcctaatgaatcattagtgaacattttgtatagaagacaactgtttttattgtgaggagtggatgataaaaaggacttcatatcaaactacttattttgagaagcgtttccaccatctatggtttgaattcaactaatcttgaatgctgagtttcacattcaaattctgcatgcaactgcccagctgctacattgctgagaatcttagagattttatctgagttttgtttcttaatctgatgatgtactcttgtgatatgatttgatctgcaggtggactttttcattagtcatagtatactttgcgg

SEQ ID NO: 98521 - DNA, 1033 bp, Vitis vinifera
  Intron number 2 from transcript GSVIVT01030114001 (locus G SVIVG01030114001) derived from phytozome v7.0 (chr-ID chr1 2; pos 9981486 to 9982518 reverse strand)
gtgtcgatctcgtcgtaagtcttttcttttcttttgctgctgtcatttttgtttggatagaaagtaatttgtggaaaagttttcagtttttttccaatggggaaaggtattttcctggaaatgatgcttcttgtatgtttgggtattgcgaatttttctgaatctggtgacgggtttgccttggacttgaattttgcagcttcatgagctggttatttgcagctatatttggacatagttatggttttgtgtattgatctcagccactatatgaagaattcttgctagaactcagttatcaatattgatattatgaattgtaatacccaaaaatagaattttgtttctcaagaaaaggaggaaggtaagatgttatcaaaattctcgctgaagcaatgaaatggggaagagaaatagcttattgcatagtgtgtatgatcaaaaccttcgctttggtatgtcaaactacagtttggaatagccacttagtagagaaacatgaacactaagttacatttatatcttttccatgagaagcctcagtcttataccacggattgtggcttcttgaaaattcaaacactaagccaaaaaaaggaaccattttaattcagaatgtgaatgtatagataagatcttatgaggctaggcgacaaaaaaggactccaagccatgttttaaatcttaaatgaatttgatccacttcttgagttatctgtgtcagtttcctatatctcggtaggacgcataacgctgatggtatgttacctgtattagtgtcagggtccaagttcaacaggggtgtgattttttcctttttagatagatttaaagtaactggtttataactcgagattgaagtctaaacaccctgtttattttattttgaatcagaaggcagcagaaagcatactagccttctttttgcaaattcattttcttgttctgcttctttcttgactgtgtgatctaatgttgatcccacaataatgttgtggtgatcagataaagggaccttcaggcgaccagattc

SEQ ID NO: 98522 - DNA, 630 bp, Vitis vinifera
  Intron number 1 from transcript GSVIVT01025419001 (locus G SVIVG01025419001) derived from phytozome v7.0 (chr-ID chr6 ; pos 957199 to 957828)
gcagggtttcctcctcgtcctcggtcacagtacaggtgtatttgaatgtcttatcttgccttctgttttttcctttttttttttttttttttctttctcattatgtttggacggtgggaaaatggagggaagggaaaggagaaaagatgaaaaggaaagggaaatgttgagtgcgtgatgttttatcttttattttgtttttggtttttttttgttgattttttatatttttggtttgtttgggcaaattggaggagtcagctgaggggaatggccgggatagtcgagtatttttttccttcgggattcaaaattgtgggttggtttgtttttttgttttgttattcctttgtgctttatcggggatcaaatgaagatttaagtgggcaagaccattttgcctttagtttgttgtttgacattctgtattttctgaatggatcggtttctttctttctatagcagatcggtttttttttttaaatgtttggttgtgttattatttatttgcattgtttgtattttgttaattatgattgttttgattttgagttatgagatcgagttgtttgataatttttttctccctgaaaagggttttgatttgtaggttgaagagaagttttggga

SEQ ID NO: 98523 - DNA, 710 bp, Vitis vinifera
  Intron number 1 from transcript GSVIVT01027347001 (locus G SVIVG01027347001) derived from phytozome v7.0 (chr-ID chr1 3; pos 16080562 to 16081271)
gtcttttaacataaaagcagctccatttcgctcaggtacaaactccacctttttggcccatcttttaaatcctattatcaatcattcaagattctttctgtttttgtttttctgttttattccatatgagtttgtcacttcaattgaatggaaaaagatgttttgggtgtctggagctgttttcttttagaggaatctatatagtgatccccttgtctttgttctatcaattcagctttgttttgtctctattcacgcatttccaattgacttaatgctgatttgggagctgttttttttttttttctgggttttaagaaaaaatatttggggctgatttatcaatggagtcagctgattcagttgattatttcatatatattttcgaagttagtttggcatggagttggctgacccggagatttcctattggaaaaacttgattttgagtctaatttgaaaataaaaataaaaattatagggtaagtatttgcaggcttcacttgttggggttgttttgttgtcttcattttactatttttttttttttttggttttatgggcctttgtagtttaattttgtttctgtgtttggctaaaagtcttatatttgtggttcatcacaccatctcttcagttaattaaaatgttcaaaattgtaaaggagtagtaattgatgtattgtttgttgtgtaacagtgagaagaaag

SEQ ID NO: 98524 - DNA, 708 bp, Vitis vinifera
  Intron number 2 from transcript GSVIVT01028099001 (locus G SVIVG01028099001) derived from phytozome v7.0 (chr-ID chr7 ; pos 3789636 to 3790343)
ttgggaacttggcttataccatacccagaatcaaggtaacccaatcaaaacaactttcccctctttcttattttttcaacccaatcaaaatcttttccatctctgtgaaaatcaatcgataaaggatggttttttctgtttgaatcgtgggttgaaattctaaacttctgttcttggatttttcatctggaggatcttctaatctgaattagtttctctgtgatatttgccttaaacggaaatttaggatttcaaggtgtttacataaataaataatatagtgtcagaaaattcaaaattgtgaatttttcctggagtctttcttggaggaaactattgggatgaatcttccctggagtctgtgatgtttatgaagctttatttaaatgcccgttggctctgttcttgaatctgatgacttctttgtgtatcaaagaattgctaaaaaatattatatttgggaatagccctcactgaatctttctgtttgtttttgatttgtgtgattttcattttgatttggggtcgatgctctgttttccatgcttcaattgaatcaattattagaaatttatctgaaaatttttcccggttggggattggtaatctgcatcgtgtgaaggctacattatattgagtttataattatgtgagtggagatttattttcattttccattgattcagccaggaattctcttgaagaatc

SEQ ID NO: 98525 - DNA, 475 bp, Vitis vinifera
  Intron number 1 from transcript GSVIVT01022445001 (locus G SVIVG01022445001) derived from phytozome v7.0 (chr-ID chr8 ; pos 3123841 to 3124315)
tttgattcccaaaaagtattaaaaaaagaaaaaaatgttaaaggaaaatgatttttttaatgattggtcttaatataaaaaataagaaagaaaatcaaatataattaaaattagttacgaatttatagatttttaaattattaatctttatatataagagaaaaaaataagtgaaatgagtttgaattagcatataaaaataatttattgattttaactctattttttatttcctttcactttttctttccttttttttttttcttgcatttttcctcacatttttcgagaactaaacataaccttaaaagtttgaattgtggctgaatggaaagaacatttcttttattttatttgttgagctatccctatatattcagtttctagtcaagtcagcaaagaaaactgattctatatcatctttaccctctctcaattagttctcaggccctttcttctcattactcttgctgct

SEQ ID NO: 98526 - DNA, 770 bp, Vitis vinifera
  Intron number 2 from transcript GSVIVT01025815001 (locus G SVIVG01025815001) derived from phytozome v7.0 (chr-ID chr8 ; pos 11559027 to 11559796 reverse strand)
acgaggacgaagagggtgcgagtttcattattgtttcacgcgattaattttttgtgccttctgattttttatttttttttaatgtttggggattttgatggatcggtcgtgtttaggttttctggagtttgaatgattcgaccagggttttttgtgcttgcgctagggctctgattgattcgatggggaatgaaattgttttagctacctttttttttttgttaactgctgtgtgaaggtaaaaaaagtagagaactgcaaatgttggattttggaaattgattttttggctcctgaaaaagaagtatgcttggctgtgcttattgcaacaactgcttggcaattgttagagttttgaagagttccattttatgagaccgaaactatgcgtttcttttcctctgttttctctgtgaccgaatagaaatataaggttctaaacacggtactttagattgcacccggaacacatagtctcatttgactttttgactggtttttttgcaaccagatgatgtgggtatggttacgcaggttatgtctgtacatgttatgctctgtaaataactcttatcctgtcaatactcttgcttcacggaggtgcttttgaaagccattgtattattttctcgtttgtatttttcacactcttcgatttagatttttaaggaactcgctatatttttagctttgagagtatttatcttttcagatgggtaggtatggaatatttaattaccttatctgttgctgagcagacgaagggcagg

SEQ ID NO: 98527 - DNA, 822 bp, Vitis vinifera
  Intron number 1 from transcript GSVIVT01023689001 (locus G SVIVG01023689001) derived from phytozome v7.0 (chr-ID chr1 1; pos 9374996 to 9375817 reverse strand)
tcaacaagcgatctaagccctctacctcttaccaggtctgatttttcttctatcctatttttcctctgtttggctgccgagaaaaagtaggacaagaaagggattttggggttttcgatctgtttgggagctggcttactttcgggtgatcctaatacagctgtttagtttaattgttgcgggggttttcttttgtttccttgttttatcggtaaccaattggagcgttagggtttggaaaaatggtttatcttgatttaagaatttttttatcgtgagtgatttttgtgcattagtttcgttgaagttctacatgatcaggtagagggtttttttttgaagatttttgagctctgtttggttgcgataaaaccaaggaaaagaaaagcagaggaaaattttctgtattctatttaagttactggtcttccaaaaattgaaaatggtagtccaattgggctaaatggttgtacgggatcagttgagtggatgtttctttcttttggacgtcaaatactggaaatctgaaattgaagatctgaatttagttttcttccccaaaattttcttgcgaaccaaacataggattttccgagtaaatttttattgcgttaaaattttaatctggtctgcattttggattgccgtggaaaatttggaagagcttttgtttcgtggcttattgagctttcctgaaactttggtttactgggttccgtagggttgatttttaagacatccgttttgtcgttttgactttttctatggggtggattttgtctcactgattttttatgacatggttttgttgactaattagca

SEQ ID NO: 98528 - DNA, 649 bp, Vitis vinifera
  Intron number 1 from transcript GSVIVT01026969001 (locus G SVIVG01026969001) derived from phytozome v7.0 (chr-ID chr1 5; pos 18941347 to 18941995)
gggcagaaagctgtgaagaacagcatctatcccaggttcgatactgatatttattctcatttccttctcctctgcatggtattatttttttattgcccccatattacagtaatacaatttatatcagaacttcaatccaatatgtttttcacgggtttggatagagtggttcaaattcttgtccacctgcaaatcttgtttaataaatattaggtagtttttggattaacctccataacacgtacgtgatccgaattaacccatgtaataatgatactaactaacccaattataacgttaaactatatgactcggtttcaaatctaatcgagacattaatcatatggacttatacataacttaacttaatctaattactaaatatgaggatcttattattaaacagattaaatgaattacatgtttaattattaagtaatatttaggtttaactcgattattattcttattatatttaggttaacttatttactagaatgcttagactttgatacgatacgaacataatttaccaacacggattattattcgattcctttgttcgaaactctaaaatatcaactcaaaagttcacaattttttcttactttttattttttaggagctactatcgctgtacacatcacac

SEQ ID NO: 98529 - DNA, 929 bp, Vitis vinifera
  Intron number 1 from transcript GSVIVT01022299001 (locus G SVIVG01022299001) derived from phytozome v7.0 (chr-ID chr7 ; pos 18325988 to 18326916 reverse strand)
cgacccacgagacgatctttgctgtctcttcccaagtgagtacctttttttcattctttttctgttttagattgtcggtgggttatctatcttttagttcagatgatcgaatcatctggttttctttcaagtttcatgaggttagggactgtgtagagtcaaaccaaaaatgaattgtgtggcgaacttcagttagctgggtgagttgtcgtattgccttttcagatccgtggacagtcccattttcttggatacacctgtcggtcttgatcggtcgatgggttgcaattggacattttagatgattttatattcagtcaacggtttatgtgctgtactcaatctgtaatgttttgaatcatggaaagtttttgaggtgaagtattaaggaaaaagatggggaaaaggggtagggaagaaaatacgaaggaaaagagaaaatttgtttttaactcaacagttcttttttgtaccatgattatttattgagaatgaagaattttcaaaatatgtaacttataaaattttcattgtgtttcattttcgtttgtattctttattgaaaacaaagcaagcgaatttgagtttcctttctttttttttttgttcaagatagttttgaagatccaaacagacccttaatttattctaatactaagagggcctttggaaaacttaatacttaatgcttaataacttaagatgacgttaagttatgcttaagttatcaaatcatattaagtcattaagtaaatttatcaaaatcattttaaaatttaagttgcaatattaagttattttaacaaatatattcattatgtttaataacttaaattaagtcatattaagtcattatgctgatttaccaaacaccctctaactcttctctaattgtcttttgtcttctatttctctccaaaacagtaaaa

SEQ ID NO: 98530 - DNA, 928 bp, Vitis vinifera
  Intron number 1 from transcript GSVIVT01019201001 (locus G SVIVG01019201001) derived from phytozome v7.0 (chr-ID chr1 5; pos 3651666 to 3652593 reverse strand)
ttcgcagccaccaaccaacccaaccatcgctcctggtaattactttttcttctctcttattatctttttttatcgttatatagaaatgtagaagaaaaaaaaatacattattaaattaaaaatgtattttttaaaataaaaaaatcttagaaaatcttttaatattttaatatttttcccattttttaatatattgatataatttaataaagtatgagatttatttttttatttgaaatctaaataattaattatttaatgcaatataatcaatgttctttaaagttgttgcaataaataattaatagaaaaacaaacgtaaaagaaaagtttatcatgccagatttgactccttgtgagtgactatagtaaagaaaagtttctttcaaatatgctctatcaaggatgaggtggaataagctttattaacaagctatatattaacaagctatatatatagtaaagaaatttgactcctctacatttcattctcaaagccaatgctatatattaacaagcttaatgttgtatactcttttaaaattcaaaaaattaataaaaattcttttaaaaaattaagttggttgatgattttacttgcttacaatagtcatatggcataaacaagacatgaattttatgatatcaacactcttgttttaaagtttcctttaggagtgctgttaaaaggtcagtgttctaaatttatcaaggcaatgaatacatatgtgcccaagtttttgctgcctgcactatacaatatcttgaactccatccactatttgatcaggaatttaggataaaagcagcaaggagggactgctattaatgcatcgtcgtgactacggcggaattaaattttaatcaacaaaacaattgtgaaattcgtgcaggaaagaggagtaagatatccaaaattgtcctgact

SEQ ID NO: 98531 - DNA, 931 bp, Vitis vinifera
  Intron number 3 from transcript GSVIVT01029655001 (locus G SVIVG01029655001) derived from phytozome v7.0 (chr-ID chr9 ; pos 20163764 to 20164694)
cgagaaagattttgcagctcttgcgtttgagacaggttagatgtcaaaccattgcatctggaaatgagaaatatatggctgttataaatctaataccatgctttgtgcttgacagcgttaagtttcttctcatatcttatatagatattcctcttcaaaggatatagcggggtagggaattggggttgaacaccagggtgccctttttaggagtagtattgctagttcttgcattgttaatcagaattgttttcttactttatcagatcatatatatatatgtatgtatgtatattggtttcacctcagaatctgatgcttataccttagcactgcagctgtgatgaaaactttgggcagatagaaattggtattatccgtattttttctacgcttttgatagtagactctgacagtagtggcagtatttaccacctagctatgcccaggtacaatgcatgatactgtaccatattgcttctgagataggttatggaactgtggcccattagcattcatatcatgtccataaaacacgcttgacactcaaatggtgaagacaaactacaattttcattaaccaaaataaattgtctagtgagagcaaataatctagattgaaacgttgaaaatcaatgccttactatagtactcaagaagctgaattaaatgtatagaggatcaaatatcccaaacttgtattcttgatgctattgtggatggtgaatcattagttcatctaacaaactgcttccttagtgattgaacattctttgttttatgtcaaatggattggttatgcatcatcaaggaggatataatgtctcttatcatgagcttactaatctaagcaagctatcccattagaaaaatggagtgttctttgatgatataaggtcttctcattcacttctttgaatacagatattca

SEQ ID NO: 98532 - DNA, 794 bp, Vitis vinifera
  Intron number 1 from transcript GSVIVT01019444001 (locus G SVIVG01019444001) derived from phytozome v7.0 (chr-ID chr2 ; pos 725757 to 726550 reverse strand)
ggatctctgaatctcattccaagtttccgaagagcgtaagcacttcttaaatttgagtcctttttgcttctctctctttttgtctttcgtttggttctaatttgtttgttatcggtttgtgtttggtgaatgtgaattggaattaaggttggaattgtgggcttcagttgatttttcgtgttagctttcggttccgctgggaaaattttgttgtattagtctgtgttgagatgaggaaaaagagggaaattaattgaattggtggttggttatctattattttaaggcagaaatttaattggttttagttcgcaagaatggatattttcatgagttagggatgaagggttttctttatctatttgtgcttggtttttcagaatgtttggtgtaattaaggttggaattgtgggtttcaattatttttcctgttagcttcctgtttagttgatgagaaaatagttgtattcttctttgttgagatgaggcgtgtcattgaagtagtgcctacctattattttaaggcagaaattttattcccttatctttgctggaatagaaaactcagtaaagcttttccttaaccattcgtgtttggctttcgagaatatgacttgagttgtggatttgagttattttttcatgttagtttcccatttggctgctgagaaagtagctgtattagtctttgttgaatataaaaaacagaggaaaattattgaatttgcagtgctttgtttgaatactctttcatgtcaagaacattgcaattttattggtgtatcttcgcagaa

SEQ ID NO: 98533 - DNA, 534 bp, Vitis vinifera
  Intron number 1 from transcript GSVIVT01019865001 (locus G SVIVG01019865001) derived from phytozome v7.0 (chr-ID chr2 ; pos 3979820 to 3980353)
gcatttgcgaggtctgtttggtgtcttttcttccgtagactggttttatcttccatttagtatatttgaattggtgtctgcgtggagaattgtggttgtttggagcttggttttgatgggtttgtgttaatttctgttggctggtaattttacctctttggtttcttagcattccctgtttggttgctggtaaaatgtgggaaaagagaagaaaattgtttcttttgttaatgagaattttatgatgcacaattctctgttcttgtcctttcccacattttcccagcaaccaaacggatgcgggcttgaaaattttactctattgggtgtttttcttaactgattggtaaagagggatatttcagagccatgtccgagttgtagctttcaattcatttctactttgatttgttttcactgttctattggcataggatccttttcctaggccttttaatcaagaatttgtttgattttgagtttagagtgaaaagggttattaattatagaatcttttgattcgatttcaggaat

SEQ ID NO: 98534 - DNA, 317 bp, Vitis vinifera
  Intron number 3 from transcript GSVIVT01019865001 (locus G SVIVG01019865001) derived from phytozome v7.0 (chr-ID chr2 ; pos 3980679 to 3980995)
tttaaatccacaaaggtaaacaccctgaaagcactcaactggctggctttctgtttttggtatttacctttcttaaaagtaaagttggatcaatgcttgcaatgatgtaggtttggctttgattaattgtttgctttggggaaattattcaattgaaaaacttgggttaatccatgatctcctttttgaagaagccgtataatcgcaaatttgtagcttttgttgtgaataatggaggaacccatttggagatttagaaaatttaattctacaaggtttctattttttcttatacgagaattcaggtactaccagtc

SEQ ID NO: 98535 - DNA, 721 bp, Vitis vinifera
  Intron number 1 from transcript GSVIVT01027049001 (locus G SVIVG01027049001) derived from phytozome v7.0 (chr-ID chr1 5; pos 18367467 to 18368187)
gtcgtcggctcctgctccggctcccaccagcggtatgacttctcttctgtttggatctgatggttcttatttgttttgatggaaactagtttccaggatttttttttttttggacgtttcagactccatttgtttgttctttcagtatatatctctccaagaaaacagagtttcgaatgtgaatttcgattcgggatgtggatgcattgggagcctttttcttctttttttttctcgtgtttgttttaaggaaattattctcgagggattctattcttcttcttcaagagaaatttcgatttaggatttggatacattgtccgaacacttgattctagtgtttattgattatttcgcttcgtttgttttgatggaaaattgtttgaaagtttatctttatctgatgaaagaagcttgatacgggatatggatgcattctatatgctttcattaatatttttctcgcactttttcagatcctttagtttcgatggaaaacagtttcccggaaaatttccaataactccatcttattcttttttcaataaatagaacagagttgacatgtaaacagtagagaacgcttagattactgtttttttttttctagtgtttattcatagaaaattcaacggttttgttccaattgtattggagttttgatgtcagtaagttaattattgcagggactgcaattgatcaggggatcgcatacgtgcta

SEQ ID NO: 98536 - DNA, 856 bp, Vitis vinifera
  Intron number 2 from transcript GSVIVT01021970001 (locus G SVIVG01021970001) derived from phytozome v7.0 (chr-ID chr1 4; pos 4945423 to 4946278 reverse strand)
tgtggacattcaacctcgagaactcaaattcacatgtgagtacatgattcaaacatgggttatatttcattaatgttcttgatccctgatatacgatcatagtgttctcttccattttttgaacgtgttgaatgcagtgaattgcatacctggtgtttgattttcaacaaacagcatcaaagtgatacattttctcttttgttcaatagtacaatggcaaataaagttcaaaaattgtttattttcctttctattgtatcctcggtatggctaccaagcaaatgggaactaatttctattatcttgcaaattagatgttaaatttttcctatatgcttattttttggttatatattttcctgtttttttttttttccctacaactggttgggcttggcttgaggaggatattagcaattgaattcagataatattattacttagtgtccatttggataaacttcctattttctgtttttaaaataaaaaacggtagtaacttttagtaacttttatttaagatatgagaacttttgtttgcttaccttggaaaagtaatagttttaaaaactgttcaaaaaaattaaggtatcaaaaaagttttaccacctcaaattttaaaaaatctggaagtgacttctaaagatataagataaatttatacttattgtacaagatattctacttttatcttgaagtttctgattttgaagactaaaaacaggaagtgtatcccaaaagacactcaaatagtttttattttaattttctggactgatatattttatgcctttggtttttcttttttccttttttttggttaaatcttaatagttgaagtgaagaagcaaagctc

SEQ ID NO: 98537 - DNA, 773 bp, Vitis vinifera
  Intron number 1 from transcript GSVIVT01021970001 (locus G SVIVG01021970001) derived from phytozome v7.0 (chr-ID chr1 4; pos 4946309 to 4947081 reverse strand)
ctgcgtttcgtcgccaagccccaccgggccacagtgtaagcacttctacctttttcagtttttctcattccgaacgaagtcgtttcgtggcccgtgttgtcgttttgtgatgtcgtgcgatctgggtttggaaatgggtgtgaggatgagctggtgctgactgtgggatgcgggcttgaacatttggggttgtggaactcggtattttctgtttggttgtcaagaaaatggaagaaaatttggagttttgaattttgaattttaaaatttgaatggggttgaattgagaaagcttgaattaggctcgtccgtggaggttttcttgtcggtgggtcccggataatgtaagtgtgggactcaaattttcgatttctttcttttccctgtacttcttcagcgtacaaacagagcattttgtggatggtagttgcatcagtctcttctctgtaggttttcctgtccatgggtcccaaataatgggaagctggcgctcaaaagtttttgtgtcttcatgtattttctcggcaatcaaacatcacattttgtgggaaagagtcgcattaggctcgtgtgcggaggtttttttctacacggatcccacatagggaaaagtctgggacccaaattttgatttctttttttttttttttttgcctatattgtatcagcagccaaacagaggtttttgttgatggcgaggttgctttggagattttaaaaatgggttttgtttctcttttattgagattgcaggttaatacagctagctttgg

SEQ ID NO: 98538 - DNA, 752 bp, Vitis vinifera
  Intron number 2 from transcript GSVIVT01021827001 (locus G SVIVG01021827001) derived from phytozome v7.0 (chr-ID chr1 4; pos 6802408 to 6803159)
ctctcaagcaggtaccttttccattttgttttttctcgtttcatttacactcatctctttgatgatatgccactcgaagattcatttaataaggatttcgcctttttatgtggaattaattgagatttacatataaacaagcctgggattaatattattttgtttcttttttctttcttctttcttctttccgttgtcttacaattgcaatacgaaattagggtttttttctttttctttttacttttttccatattttttaaagatctaatctggtttcttgttccaatattattcttgaatacttcactatttttttctttttatgtggaaatattcatgatttctcccaaaagcaagcctaagttttgtttattttccttccttcctgcttgtatttttctctcgttactattacaaggaaaactaaggaatttgatttaaaaaattagggtttcttttttttttttttcctttggataaaattatacaatatttcctttgattcttgtttttgtttttgggttgtatcgctctcctcatgtttggttgtattactatattatcctatgcattccttaatctatatataacttatattaggaggtttttgttttcttggttactaaataatacgaaataaaaattcaaaaatcattattttttcttttcctgtacttcctcggaaaccaattggagaactaaggttttgtttaattaatttgtttgtttgagttagggttacagagaag

SEQ ID NO: 98539 - DNA, 508 bp, Vitis vinifera
  Intron number 1 from transcript GSVIVT01025055001 (locus G SVIVG01025055001) derived from phytozome v7.0 (chr-ID chr6 ; pos 4918728 to 4919235 reverse strand)
tgggggttttgttcgttcacacccaggtgagtggttatgttttctttgttttgtctgtttggttgctgagaaattgtaggaaacagaaaggagtcgaggtcttgaataagttctgttttggtcgtgagaggacaaaatgtttatatgatcagtggggttgattgagtttgggttttccaacttttgaaaatgtgaacatagcagaaatctcgaagacttcctttcctttccttttccttttccttttccgtttcacttctttcctttcgttgtttcctatgtattcaaagaaggcgttagtttcatccatatattgagaaaagcctggaaacccataagatttttgaggttttgctggcaaaattcttaaatttctgatcgagaaccagagctatatcatatgatattaatagaggaaatgaaaagcaaacaatttgggtgtgtgtattaagatttatatgagctttgttcattgttgtgaagaagcctttggtttgggatgcaggat

SEQ ID NO: 98540 - DNA, 872 bp, Vitis vinifera
  Intron number 1 from transcript GSVIVT01026446001 (locus G SVIVG01026446001) derived from phytozome v7.0 (chr-ID chr4 ; pos 23588482 to 23589353 reverse strand)
tcgaaaaccttaagtaccgcctctttccttactttattcaactgcttcattcttagtaaaactcgagagacgcggtttcgttttgactatttcaagagtttgcttggcaattcaattcgataagggcaaatcaattatatcactttcttgtcaggttggtttgtttcaaagggccggaaatattttgcctttctaataagctgattattcagatgatcgtcagagacttgaacagacagttttttcgttttgcttccagattgttgaaattgctagagggccatatagacattctttgagaaaatttgtgatttggcagcttctttttagcatcccattaactgaaataccaaaattacaatggtcttatgggttcttagcagagggtgtcattgcaaggtggtcaatcgtgcgagattgacttgccattttgatattgcttctgatattttctaaggttcgttaaagcccctgtggctgtggttgttaggcaaaaaatgaatgataaataaataaaatttgagtggttgttaagaattttctttaaattttcttaaaagaacaaaaaaataaattaaaaaattaggtggtaggatcatcttttttcacaatcacttcactgaaggtacgacaagaccttggtttctataatataaacctctatatattgctcctgtctaagtcttttaagtctgtcatgttcatatttgaagaattatgtttctgattctaatgctgatgttttatatagttgaagtatgactgagtagagtcgtttcaattgttaaatgctcatatggatgatcctttatattctggttgtctgaatgtgggcagagctgttgttcgtgcaaggaacatcaaattggttc

SEQ ID NO: 98541 - DNA, 530 bp, Vitis vinifera
  Intron number 2 from transcript GSVIVT01028100001 (locus G SVIVG01028100001) derived from phytozome v7.0 (chr-ID chr7 ; pos 3799206 to 3799735 reverse strand)
acaattgaggtatcgattttctagctatattgggcatttaggtgactagtttgacttatatgtttctgaattttgttgttttccaccattttcccataaagtgttcattgttgcctccattttttttgtttttattttgcctatgtttggttgctgagaaaaatgtaggaaaaaacatagaaattcgcacagcataagtgccaattttgggccctgacaagtatttggtatagttggcttgaaaatttccttcttttgggacgaaaaggaccgtaagcactgggtactagaatttgcttctctattctttcacatgtttgctcggtgactaaccttgacatatgataagtatattcatcaaatatctaatattaattgcaggcagtaatttttgggtagaagatgattcccaaagaaatgcagtgctcttttttttttttttgttgatacctagaatgggagtgctatgtgctggtgctaaaatgattttgttgctgatgtataattttttggggcccctttttggacag

SEQ ID NO: 98542 - DNA, 745 bp, Vitis vinifera
  Intron number 2 from transcript GSVIVT01024035001 (locus G SVIVG01024035001) derived from phytozome v7.0 (chr-ID chr3 ; pos 1593186 to 1593930 reverse strand)
gcttgaaaatagctattgatttttgcggtgagttttgtttttggaattttgcgagtggtgtgtgttagtgttctgtttggctgctgagaaaaatgtgggaatatggaagaaattcgatggttatggtgagaattttattcagtttctggcctataatttactctgaagctatcgctaataaggaaaaaggcagggtttgatatctaatccggaaggaacttgatacgggcttgatcaaaacacttgccttatcccaccgctttatggttttctaaatatatcccttgtcaaggatatcaagaaattaccaaattatataggcagctacctggcagacggaattcattgaattttgattatttggcagtttgaatcatcttatttaactcatattagatattctgcggattgataaattatgtgctaattactttctcgtgaaatttttttgaagagtcaatagaaggtcctatggttgctgcttgttcagtctgttctattatttatcaaataattgttactagctatttcatgtttggattctaatctttgttgagatttttggttgttttgaatttgtgagcttctgaagaatccaattatgccattttgtgtctgtttggattcttgcccatatttctttcttatgaagtggattgatgttaggttttgtgattattttaaatgggcattttcctttctgatttcagaggaagtgaagtccaaatacccaaagatcacttat

SEQ ID NO: 98543 - DNA, 651 bp, Vitis vinifera
  Intron number 4 from transcript GSVIVT01029412001 (locus G SVIVG01029412001) derived from phytozome v7.0 (chr-ID chr1 7; pos 16798527 to 16799177 reverse strand)
gtcagtatagaaacacgattagatctggtctatgttttggatctaatgcttatgattcatgaacaaatgggcatagttggttggttgttggtaacaaatataaacccaggggacgagacgttggtttctttggttatggtaacgagaacatggatggtttgaatgagctaaacaacgggccaagagccaagagctctaaaaaccaaaaggggcttgcaccgtcacaaccaagggccagaatgttcaatccaatggatctaatgatgaggagaagatagaccttgaatcagatgaggagatcccttttagcacatcacaagacacaacagcatgcattcttgaaggtaagtacttttttttaaaattgtattttagcttaattttaatttatttcattagtttagatgtttttttataattagtttaattaattctacgtgataaatttcttattttttattttattttattttattttcattatgatttagtttagtgtggatttttcttttagtttagatgtgtttgtgagtttctaattttctggtttaattaattttatatggaaaaaaaaaacaagtttttagtctactttgattaaatttaattcatctatttagtttaaatatttttgtagttttagatcattga

SEQ ID NO: 98544 - DNA, 265 bp, Vitis vinifera
  Intron number 3 from transcript GSVIVT01027296001 (locus G SVIVG01027296001) derived from phytozome v7.0 (chr-ID chr1 3; pos 16985519 to 16985783 reverse strand)
cctcgattttcaggtgggacaaataatcatttcttttaatattgtcctgtctgtgaccttatccttctattttgccatctatttttgtttaatccatgaaaatcttgtttcatatttcatttgcatttgttacatgcataaatctctttattagatagttgatgtacttgtttctgtgccaattttgatgttgtcttcttcttgttttttggcttgtcttaggtcttgagcccaaacaacatccactgtctcttaagaccataaa

SEQ ID NO: 98545 - DNA, 445 bp, Vitis vinifera
  Intron number 1 from transcript GSVIVT01025418001 (locus G SVIVG01025418001) derived from phytozome v7.0 (chr-ID chr6 ; pos 969401 to 969845)
tgctgttcagtgccacctttccaaaagagatacaggtatttttaactgtttgtggtaattcccaattttgtgatgcttctaatgcgatgcttatactttctggagaagaagaaatttttgtacaatattaagatgaatggattcttagctctttactgcattaaacttgataaaagccacaaactgccatgactccatggaattcaactctgttcgtttttataaatcaaaaactatttttgtgtaactattctatgttgcatgtattaccttttggcatgcactggaaagtggttttgaatgctgttttcatgcacaatgaaagcaatttggagttggaacagcctgcttaatttatgtttataataatttaaattgcatttttgatgcatttgctacttttggattgacatgcagaaactagcctctgatttcctttcaaatt

SEQ ID NO: 98546 - DNA, 561 bp, Vitis vinifera
  Intron number 1 from transcript GSVIVT01025611001 (locus G SVIVG01025611001) derived from phytozome v7.0 (chr-ID chr8 ; pos 13605405 to 13605965)
gccctgggtacctcttgatcttctagagtcctgacctctcatcgattgaacagtctctctcaactcccttcttacttcttggagtagttcttctcttagttcttctcttaccgactccaactcctcatttctctcagatctttctcttctggtccttcctgccatttcaaatttaacaatccctaattcaaccacattaccaaggtgagcaaaataaattcacatgtacccatttaacaacctcaacaactatcaaaactttcactttcctacaatcacaatacataactcaacataattaacatcatcatgttcttattatcatctacaagaaccatcacaaggcttttcaaacatcaagaatcaacaattaactaatttatttgataataaactcattaactaacacatacagaaaatcataacattacaatacacacaacacccacaaacattgaccccaaagtattattgcaaccttggctctgataccacactgtcacgacccaaattttgggtcgcccagaatttgggtcgtgacagtgctggtctaatttttcc

SEQ ID NO: 98547 - DNA, 964 bp, Vitis vinifera
  Intron number 1 from transcript GSVIVT01026946001 (locus G SVIVG01026946001) derived from phytozome v7.0 (chr-ID chr1 5; pos 19181528 to 19182491 reverse strand)
ttcgaaccgaaatttcggctcctttataggctctggtatatcggttcactgtctctatactatctgcttttaatgtgtttgctttcaccttttcttcttgcgcgagcaggaatttctttttgctgcatttgtgcatttcttcgttttcttttggcaattcaatgcatgcatgtccagatttcgcactattggggtggttcattttgtttcctccttgattttctcacatccaggggacggttcatgtatgtgtctgcgtttttatttttattttttcctttttggtaattggatattattttgagtgttaagcagcggtgaaattgagctgaaagttttagttatctttgagttgatttcatccgtctgttatggacagcattattgaattttgagttttctactgaaattcctgaagttcacataatttcataattttccattaagttttatttatttatctatttatttctaaaaatctgttcgaataataaatatttatatttgttattaatttcttatttctatttttgtggccttggatttggttactgagaaaactgaatggaaaaagaaaataaaacattgaatcttatttttcaagctattttgtttacttacctgccaaatatcatggtgacttgggaattgggaactaccctttgcttgagaaaattttgatctgggattattagaggaaaatcaatacatggtattgaacgatgccttcatcagggttttgataaaataagtagaagggctacaaaatcagtgacttattcaagaaatttagggaattttctcatattgcaacatggttttttagtatcttaaaatgcttgtcatctataattagaatggacaatagttttgtgtctgcattttgacacctaagctgaatttatttttttaatttctgatattggcaggaaaagggtatcaaacagagccagctactgcacaa

SEQ ID NO: 98548 - DNA, 640 bp, Vitis vinifera
  Intron number 4 from transcript GSVIVT01028210001 (locus G SVIVG01028210001) derived from phytozome v7.0 (chr-ID chr7 ; pos 4651608 to 4652247)
acattcttcgtaagttatgttcaagatcaatggtacaaattgaaaacctaataatacgtttgatatttctagctgagtgattatgattcatacaggggcattttcatgtgccttgagtaagaataattactgtttataccaaattagatatcaaatatttctcagtttccattaatgcattttcatgttgagacttacttgaagagctctctttacatggacgagcaggcagcttattactattgctttcttctgattaggatgcttgaatggccatgtgaaactatgttatactgttttggttttgtactttaggtgacttaatccagcagaaatccatttgcatgacatcaggttattgtttgtgttattcttgtcaagcaataaagtccatgtatagctggagttcacattgcctgctttattcagtcaaatatcatttcttcagttgatcaacagccttgtctaggagattattactaggcaaaaacatagttaaccaatcttttataggactctggagatatttatttgttcactttaatgcgaacaatatgtttcttattgtttgtgtatgatttaagtggtttgatttctaaatgcagggaggaagggagttaaaggagcacaacctgggccc

SEQ ID NO: 98549 - DNA, 787 bp, Vitis vinifera
  Intron number 2 from transcript GSVIVT01021046001 (locus G SVIVG01021046001) derived from phytozome v7.0 (chr-ID chr5 ; pos 14758015 to 14758801 reverse strand)
gcccacattagtggccttgttgctgctcaggtccgttcctcttgtttcttgtcatccttgtttatattcaatatttcatttttatatattcaattgttggatctgaagttcttataattcagcctaatttttaagtttttggatctattattaatttccatgatctttttctttttttctttttctttttcttttgttccttgtttctgacgctacgactgttttttgttgcaatggttgtggagatttgcattgggttttaagcatttggtgtgatgtggagatcatttaactattttattatcttgtgcatgtttaatatatagatccttttgaacgaattgataggtagatccctttttttttggttgatgaatttggtggccagagcagtgtcctgttctggttctggtcatgtgggcaattgagatctgtagggaagagaagagggaatggaatataagtctttatgagcctgcttttatcattttataaataattatggtaattgtttcatctccattcattgtaattgaggctttttatttttttggttttcgagtctaaaaggcatttcttggtttcaatctcaaatttgaagcatggggaaataaaaaggagcattaatattgggtttctttgtgatattatcattgatatgcaaaagtgcaggactggatcagaataccactgcttccatttactcaatcttgatctggatagtgttagtctaatttactatttgggtgtaggaagccgcaaacccctttgagtattgtgacatagt

SEQ ID NO: 98550 - DNA, 527 bp, Vitis vinifera
  Intron number 2 from transcript GSVIVT01019421001 (locus G SVIVG01019421001) derived from phytozome v7.0 (chr-ID chr2 ; pos 532986 to 533512 reverse strand)
tctggtggaatctatccggcaccgattccgacccggtaattgtttggccattcgagttaactcgattgcggacttatcatttgggcttactgccatttgttaattactctaggttccgtttgattggtgagaaaatgtaggcaaagagaaggattctaactttgaatcttctatctcttgaaaattttctttcatgaacgtgaaaagcttggctccagagagctttacggttgtattaggctccgtagagtggatttctttttctcaggtcttttcctacatttctcagcgaccaaacaaagccttaacgactgtttctcagagcttgtgttcactcattgggagtttaatgaagttattaattaggtggagtttttctcccctggtccttaactatgaaaatgtgacactcaaaacacacacacataaactcatatgaatatgaattcattgtttgtttctcaatttatttagacagtatcagcctaatggaagtctgaatgttataggaaattaaaccaattgct

SEQ ID NO: 98551 - DNA, 746 bp, Vitis vinifera
  Intron number 1 from transcript GSVIVT01028717001 (locus G SVIVG01028717001) derived from phytozome v7.0 (chr-ID chr1 6; pos 19488979 to 19489724)
cggttctgagttccttttcttttgcttctttagaggtatgattctctgcattgatttccatgttggcttttctgtttggttctcgggaaaggaggaaaggaaaattcagtgtggtgtttgtagtttaggttggaagttgaaagctttgcttagaattatttaatatccatcataactctttttgagatgggtttatttgaatttgaattctattgatggaaatatttgcttgtgagcttaatttatgatgattccacaatcaaggttagcggaaggggatttttataatttcaatcaaatgggttattataattctaaaatgcatttaatttataggtttgattcaatcaatttttagtttacttttgcagatgaagtgaatatatctgattatgttgaagaaatggcgctttcttctttgggttggtagtggtatatgatgtgaaagagtgaacagcttgagaggaaaaaaaaaaaaaaaagggcttaatccacttgccataaaaatttaaaagatttgaggtggacaaatcctagaaaaagatagaaagagatgagaaagagctaaagtgattgagcacatagtgtgttccaatggggttttcttgttttttttttttttcttttttctaaatttttgtaattcttttcccttaaaatttcaggtatagaatctatgttaaatcatatatgtgcctcttgctcttgcaggaattgtacagtttggaaagctttcattcatcact

SEQ ID NO: 98552 - DNA, 826 bp, Vitis vinifera
  Intron number 2 from transcript GSVIVT01019239001 (locus G SVIVG01019239001) derived from phytozome v7.0 (chr-ID chr1 5; pos 2904690 to 2905515)
aaatagagaggacgaccaaggtgattatcgattctttgataaacgcaaagttatttgtccatttgattttatgttagtatatatgccagaatctacaagaagtttctatgttcaagatgagttcactgctaggccttttgatgtggttccatcttagctctgtgaataaaagagctggaaattaggttcacatttggaagggagtgtttcttgttggctgggttctaggtttgtttctcatgaagttccttttcttatccacattaatggaaaatagagcctgagtagagttcaaacctgaatatgtggtaataaagtagaactgaaatattaatacttagaacaaaggtcccattatcaaaatctctatgaaatttgtttgcatgaaggggataaaataacaaaccaatcaatgataaacattgcttaatttttggattctcatgtcatcaaagaattgagggttaatttatattttccaatattcatctttaaggcttttttagtgtgtgtagtgcttcttgcttttgaggagctgaagtatcaaagcgtaacggacacatatacttataattgatattgcaggcattgtctgtatcatgcaaaacacactgcagaaaatggctacactgttgaaacttactgttcaagaatttaaagatctttgttttttgcctgttaatatgggaggttccatgttagattcctagcaggaaaaaaatgttttatatatacagaaatgtatttgctagttctgttatggtgccttatagctgaattttctgttgcagtcttgggtggggaaattgcccgaattccctcatcc

SEQ ID NO: 98553 - DNA, 558 bp, Vitis vinifera
  Intron number 2 from transcript GSVIVT01026898001 (locus G SVIVG01026898001) derived from phytozome v7.0 (chr-ID chr1 5; pos 19577177 to 19577734)
tataccctagacccatcaagacgtaagtaactgaattttcattagctactttcctcaactatgataggttaaaaatgcacaaaaattagccacaatgttgtataggtgagtaacccatgtactggaatataggactgtttggaaattgttcttgaaaatagttttctattctaaagaatagaaaacggttttttaacttagaaaatgggtttgtcaaaaaacaattttgtgtgaatttgttaagaaaataagtcattttttagaacaaatttaaattgttttcagttgttttttataaaacattttaaacaattgggagaatacttgggaacttttttattgtaaaggtgttcagtaccttaaatggataaaaaggtgaaaaattttgtttttgaaaataattatgaactgtttttgaaaacagtagtcaaaaactgttttcttagaactgtcttccaaagtattgtcaaacatgccctgattcttctttcatgtaagagtaaccgtgatttatgtgatttaggcttctcagaaactgctggcacaagaatccagaag

SEQ ID NO: 98554 - DNA, 892 bp, Vitis vinifera
  Intron number 1 from transcript GSVIVT01024444001 (locus G SVIVG01024444001) derived from phytozome v7.0 (chr-ID chr1 6; pos 2628944 to 2629835 reverse strand)
ctctcaaggctctgcaaaatgtaatcttctctttgaatccctcaaatcccatattttatttttggtgattttgtttggatgttgatttcttttgccccgcaatctgtttggttgcttagagaagaaaagggaaattttggattttatggtttttgtggtgatattttcattgaacccttcaaaccccattttttgatttttggttatccttctggagccttgattttttttccctaggactgtttggcggctgggaaaatggagcaaagagaagaaaaagaaattttcagttttgtattttgctgttgttttttcggtgattgctttgaatccttcaaaacccctttttcaattattggccactatcgtttggatctagatattgttatcctctggattgtttggttgctgagacaagagaggaaaagaatacaaaattttgagttttggatttcttcttgtttttctttttagtggtggactcaaatggctgcatcggacccaaatttgattttctctagaatcatagaaaacccagtttttatttctccctggttgtgtcttgaatcttgattttacccttccatactgtttggctgttgagaaaacggaggacaagaaaagaacagtgtaactttgagttttcatattttctgctgtttctgattctcaaacaatgaagccaaataactgtattggtggatgcaatattttgctttcatggtttctaaatcaaatcaaattcatcattttcctttctgttcttttcctgcaatttctcagcaaccaaatgggcattcccgtctgcttccattcttaggaatctaattttctcaaaaaaccatgtattatttcaggttgacggacttgaagagctcctcaacccatctga

SEQ ID NO: 98555 - DNA, 600 bp, Vitis vinifera
  Intron number 1 from transcript GSVIVT01023302001 (locus G SVIVG01023302001) derived from phytozome v7.0 (chr-ID chr1 2; pos 19948102 to 19948701 reverse strand)
actcgcgcgagactatcatcaaagcaacagtagtatgttttttttatatctacatgtctatttctacatatatatatatataggtgtggacgggggtctacaatagggcatcatcttgattttcaggaataataattagtttgaacgaaagaattgactgccatcaccatgttcaccctagtgatgactatttagtagctagcaattaaataggaaaacacatactgatgctgtcggtatataaattgaatttctaggttggttcacctatgatcagttgttatcgagcatgaactaccgcccataggttgagcagcagtccatgaactcaatagagtgcagaaacaaggaagaccagaaaagccttgtatgaaaactcctagacttgatcaattgatcaaccccaggtcttccaatgatgtagaaacgggcaatataatcattgaaagcaactaccaaataattcaagtaatatattcccaaatttttttgaactggtcaagcaatagtatcatttggatcgatcctaggttctttcttttgataccatctctcttctaaaccttttgttttgttattttttgaaacttaaaactacag

SEQ ID NO: 98556 - DNA, 659 bp, Vitis vinifera
  Intron number 1 from transcript GSVIVT01021660001 (locus G SVIVG01021660001) derived from phytozome v7.0 (chr-ID chr1 0; pos 8847303 to 8847961)
actcttcagtgccacctcagctcattgctttgcatgtaagttttgtattttggcgtttgaattgtttcaatatctttgggtatttgttaattttatttttcttttattttcattttttatttatgggttttgaatttgaagtattgggtggagcttagaattaatggtgttgaaggtataaggtagaatattcacttcattttgctctttgagcttctgggtctgtttggctgctgagaaaatgtgggaaaattgaagaatttgaaggttcggagcttttgaggttttattccttttacggttttctaaagcccaaaaggaagaaaaaaaaaaactcaactcaatgagcctaaaactagtttttgtctcagttgggttccgtttttgtttttatttcttttggggccgggtttgttaatttaacagaagatttcagtggtttgctttgatttgttcttctgttccttcgttttcttagcactcaagcagacccttttgtgttttagttcaattttttaacaaactttaccccagaggagtttaataattgagaatttgattagatatttgtcaacatttgtggatgtttttaattaacaatttgcttgattttactctggttttttttagcagattagaaagcttctgtgggatctgat

SEQ ID NO: 98557 - DNA, 966 bp, Vitis vinifera
  Intron number 2 from transcript GSVIVT01024951001 (locus G SVIVG01024951001) derived from phytozome v7.0 (chr-ID chr6 ; pos 5731320 to 5732285)
ccacacaggtattactcaaatttgtcggctctttcctggtagctaacaacaatactgtagtgtatttattgatttttgttggtctggccgttaaattttgatttgggttaactgaatatttttgggtggtttttgttaccctaattggagattctattttgaggtttggtttttctctgtgctgctaccttttcctaaaattccttgttttccactttgaactttgctttttttatatgggtacgagctttacactgtgtttggacccatagtctcaagagaaagtaattcaatcaatagtgatgaaatgaaaggaatcagatttcttgatatgttagaaaatttgcctattggcctcttttgtaggttgataactatttcatggagtgagtgaccacaacatgttattccactctttctatttccttttgctccttttgttgctgaggaacaggaggagaagaaaagcaaagtgaaaccttacgaattctgtggtgttggatcttgtaaccagataaaaaaactcacttatgtattgtattggctaaattgacatttcctcctcttaggaaataagcagcagaaactatagaacttcatatatgtatactttttttcctctggtttttgtaacaaccaaacaggttaatatttattgatgcagagacacttaacccaaatgttgtttgttaaggtgaatcatagaagagtggtattttgattgaacttttgcaacttatggaagctatattcctccagacgagaggaagtgggggttactggaagatatagatttggtttagagttttttgagttaattgtttctggacctcaatggcttttgttgaaaaaaataatggatgatcaagctctataggacaggatttatttagactagtaaaatgtgtgtaaaaactaacttttatagatgttgtccattgtcttgtgcaggggggagttcaaaat

SEQ ID NO: 98558 - DNA, 811 bp, Vitis vinifera
  Intron number 1 from transcript GSVIVT01019932001 (locus G SVIVG01019932001) derived from phytozome v7.0 (chr-ID chr2 ; pos 4564737 to 4565547 reverse strand)
aaggtggggacccatccaccgcccatacgcacgcagtcttaccgaaaccaaacccatcaccgatctattttcctccatctaaccctaacccaactctctaaccctcctctccgcagctcagaagaacctattctcccttctctcttccctcccaaatcctcaaccacaataccatcgattactaactaaaaccctccactatcaccttatatcccacaatttagcatgtttaattcagctcagagtttggtgggtgacaccaaaaacccactccttttctcctctctcttttgaacccctatgcttacagtactttgatttcattaaactaggaaagcagcaaagcaagaccttcaaatcctactgtttttctctttttttcttccactatcttccttttctttttgaaccaatacgacctttactcctttctatttcattccttggtctctctcactgttcagcttctgtgtatgtgaagaggtgagagggttaattttgatagataaaaagagaacaagattgagaagacaagagaaaaatggatccagtaacagcacatggccattctctcccacctcctttccatactagagatctccatcttcatcaccagcagcagcatcaatttcaccctcaacagcagaattcagaagatgaacaaagcggcagcagcggcctcaaccgagggcagaagcgagatcgagacgacaacaatgagaatacaaacggaggcagcgaggggaatgaaatggtaggactctctggggatggagagatcagtagaagaccccggggaagacccgctgga

SEQ ID NO: 98559 - DNA, 1032 bp, Vitis vinifera
  Intron number 4 from transcript GSVIVT01020310001 (locus G SVIVG01020310001) derived from phytozome v7.0 (chr-ID chr1 9; pos 21588523 to 21589554)
tgttcgtgtcttctttccaggtgattgggagcgttcaaagtcgcggtatcggtcattgactcggagggtcatgaagcatatcggtctcaattcggtatcggacgatacgtaaaataagataattagaaatttcaaaaaattataaaaatattatataaattaaaaaatagatataattgaataagttgaaaattttaagaaaacaattttttttttttcacatgtagctcaaaattatttgtgataatattcaaaattgaggatttaattcttaccttgccatataaacactttaatttatcattaaacctcattcatacctttcatatcattttactttagcaaatcgggacccaattctcctaatatgttactattaaatcatatctcataaatccatataaaatgcattttttactttactaattttagcttctcccaccctcgcacgccaccattgctatcaagagtcaagacccacaacaccacatgcaattgcaaatttgcaaccgtgcaagacccaacacaggagggggagcaatttgattgtgagggggttgtcttgtcgatgtcgctggtgaaagattcaatccactttatgagtcaccaccgttgacaccaaagctccaccctccggtaatgctcgattttgaggaaaatcaggtaagtaaatcctaaatcatgccctcatccttcaatggtttctctgcttatttccgaacgggtcacgggttggttttttcttcttcgtcttctttgatcttctcattgatggtttaaaatttcataataggtgtttgcttttgaaagggcaatctttgatttttttattctctataacctaactgagtcaaccgagttaactcggaaaatcagattagtcaatcgagtcttaccgattcccagtcgagttcatgcataataccgtatctggtatcggtctcgtcgtggcaggtgtcgaggccgatacgacttggctgagttgtatcagactcggccgatactttgaaccctgattgggagacatctgga

SEQ ID NO: 98560 - DNA, 999 bp, Vitis vinifera
  Intron number 1 from transcript GSVIVT01026596001 (locus G SVIVG01026596001) derived from phytozome v7.0 (chr-ID chr4 ; pos 21238689 to 21239687 reverse strand)
aaaaaaaaaaaagggggtctataataatctatccagagagaagggcaggagcttccgggatgcgtttctcctttgtagggagccctatcgaggattgagccttcatcacaggcgtgcttccatgttttgggcctccagtatttcctttcctttgttacctgccttcattaaattttttgtggtaggttgtgacggtcttacagacgtagaggatttgtatttgtaggaattctattttttttatttttttttttaatattaagctccttttcaacgtgagatgaaaaggtggaacgtcaaacagattttatgtggatggtccacgtctcaaaagccattcataattgatcccattatgatacacaagggaccaaaatttcctcagtagattctcttactgcttgttggaaccatctggtcataatgttttaactggtttcatcaatgggttctctcagtgagattctcacattggttgctgatggttgttgaacttcatatttttaccttttgtctttgttgagcattgtgtggttataatgaaaacggagcttccaattcttgggctcagattatggcatttggccgtatctgtagaatcgaggttagtcaaatattgctttatgaacataattgagtaagatttcattagtctgatcatgagaattgttcaatctggtacaactgatttaatgatgaagaattgtagaatgattgatgtcttttttcaatctctcaatggcattctgttctgttcttgtgtttgaattttgaactgctttgtgcacataatgaagagggggaggattcaaataaagaagaagataaggcaccatctgaggtaataaaacaagaacaagagtcacttattgaaaaggccactgaggaatgtgaaaagaaactgccagaagttgaaaaatctgaaactgctgttgaggaagccctggtctcatctactgaacagacactcccagaagtagaaaaatccaaaatcccagt

SEQ ID NO: 98561 - DNA, 982 bp, Vitis vinifera
  Intron number 1 from transcript GSVIVT01019903001 (locus G SVIVG01019903001) derived from phytozome v7.0 (chr-ID chr2 ; pos 4368320 to 4369301 reverse strand)
cagcccctggaatttctgcttccgagttcaggcgagtctcacttttctgttaggtttctgagaaatcgaaggaaaaaattatagatttatttattttctatagtttctgaggaaacaaacaccactctacattttaaaggattttattgtggaagaaggctatatcattgggaccgttcttggcctgttttcatgtctttcaagtgaaaatgtattgtattgcagctcaataaatagatctagtttagtttgttgatgctaaggggaaaattttcagtttttccataagtggtggaaatggtaaattccgttttggtttctgaaacagcttgaggggaaaaatggtgtttgatgcttgaaagggttcttaaaagcagttttttgatcgtagaaaacacttcggcaaacctatgatagaaacaggttttttggaacaaatttcagttgttttcaattattattgtagagcgttctcagccataattgaaaatatggagaatatttgggaacttttgcattggacataagtagacggtgctttcattgagaataagctgagaaaactattttagaattgtttttcaagaactcttctcaaagactgctttttgacaattgtttgcaaacatgccctaagttttatttctccatggtatcttaggaaaaacactattttagagattaagaaatttgtcctagaagaaggcgatattgttggcatgttatgattaaagctcttacatcaacactggttttaatttcttggaacgagaatctagtccattgtagattggtaaatagatctaggttagttgattgctgcaaataagaaactttgctattgtgcaaaggcagatattgttttgtttttatcaagttagtggctgttaggagggaatttttggaattgctctacaatttgggttgtttgagattgtgcttggtgtggcaggaaagctattgattcctcgttgttcaagca

SEQ ID NO: 98562 - DNA, 336 bp, Vitis vinifera
  Intron number 2 from transcript GSVIVT01021169001 (locus G SVIVG01021169001) derived from phytozome v7.0 (chr-ID chr1 0; pos 2131358 to 2131693 reverse strand)
ttgccactgaaatcaatcctgctgaaaaggtatggtttttttttttttttctaatctgggtttcttaggttatgacttacgaattacgatatagtgagatcaaagttctttattagtatttctgctatcgttagggtttgaggcacgtttgagaagattgggatgaaatttatttcttattttaaatttataggaaaaactatatccgtggaataattacttgggagacaatgatatagtgaaatattgaagaatttgtttcgggcatgtttgtataaatttttctttaatgaatttccaggcccaaaagcttgccgctgaagaaagccagaggcc

SEQ ID NO: 98563 - DNA, 713 bp, Vitis vinifera
  Intron number 1 from transcript GSVIVT01019284001 (locus G SVIVG01019284001) derived from phytozome v7.0 (chr-ID chr1 5; pos 2011945 to 2012657 reverse strand)
ccaaccgtcttctcgccgggactggagcaatagttactctctctttctccatttctatcatccatcaattaatgtatcagaaacatccaagagtgggtctgtttcgtccctgctgtgatagaaatttcagatttcattctatacgtttagagcttgtgaacaatcatttggaggctctacatgcaaaaaaaaaattgataaataatactggtttactgaaattattatgaatatgaaacgacagccaatgtttatacaaaaccaccatttagcttcaagaattggggataaggaggaggtggttcttgtcctcctctgaaatagttagcagtttggaactactttttctttctttggaaattagcattttcattgattttagccacgaaaagcaagaaaatttcttataaaatgatagccaaacagcaccttagatagtggcaggggctttgattggtcatttactttcccctttgttcctcaaagagttttaggggaaaaggggaaaatgcttaagaaggaagccaatttcccaaccttctcattttccccccttttaagaaaatgtgggaaatgttgtatacccaacaaaaattagaacaaagaagagctagtccatttcatttttatttcattgtttctttaatttttactccaagcaaatgttcttctgttctttgatcaggacagtggggagtacagccctaaaagca

SEQ ID NO: 98564 - DNA, 433 bp, Vitis vinifera
  Intron number 1 from transcript GSVIVT01027757001 (locus G SVIVG01027757001) derived from phytozome v7.0 (chr-ID chr5 ; pos 7455913 to 7456345)
caggtatgtgaacacctgcttctatggattccaaacttttgatgttattaggccagtaaactgaagtcatgaaactaatcataaggctcaaagaactaccataaaaaactaaacataaggctcaaagaactaccataaaaagaaaacttagggttcaggggaaatatgtctgaggtcgaatgtggttttaaacgtcaatctgatttctgtggtaaatgatttctttccttttcttttcttatcaaaagttatgccccatttttttattttatggttctgctattatgctataccatactggggatccttttgttttgattgccttttggtataatggttgcccaagggcataaaattgctctcaaggtaacaacctgtccaatcgtagctttctgtcgttatttgtggctgatcatcttgcagagatatagtg

SEQ ID NO: 98565 - DNA, 1041 bp, Vitis vinifera
  Intron number 1 from transcript GSVIVT01027061001 (locus G SVIVG01027061001) derived from phytozome v7.0 (chr-ID chr1 5; pos 18244374 to 18245414)
ctgtcactattatcaactacatcatcgttaaagacgtgagcatttctcattcccaacaaaattcaaaaccctagatttctttttattgcgttaatatattttttctttttttcttttccttcgggagattttttggtgggtcagtatggatctggtttggaattgggttggttaaaaaaattagggtttggaaatttgggccatttcaatttgtggatctgtttcgttgctgggaaaactaaggaaaagaaaagaaaacagattttcgatcttgtgtttagttattacaagttttgttcactgtagttcgattgggtttattcgaatggaggggagtaaaaggatgtcgtaaatttaggattataagattctttatttcttttattttccagcattttcttggctaccgaacggaggaggattagggtgttggagtttacccgcctaggttctgatcgagactgtaatttaagttggtgattcaacaacaagtatactatttggtcccaaattctagaatttgatgattgcttcattaattgaattgattttgcaataccctaaaaaaatgtagctataattgattcaaaactgagtcttgaacattcgatttggtttatttctgtgtacttgaggtcatttgcataaattctcgactgtttaagaaaatccaatccaagttcttggtctcccataggcctaatacttgcccattcccaacattcggaggattggtttatggtgaccactttataccgtgttcaagtttggtggcatttatgaaacaacgcaggaaaacatcttttaggctccttctggtgtttttggaaatttagctcttggaaatgatagtaacagaagaataataagtcctttggtgataagatctaacctttcttcaatgtcatggcaatgtatttgtagcttcggctactgaactcggagtactattgcacaggttgtttcaggagtgacacttggactaacatcatgtaatctttggtttgcaggatttgttccctagcccggagaaggtgaaga

SEQ ID NO: 98566 - DNA, 637 bp, Vitis vinifera
  Intron number 1 from transcript GSVIVT01027541001 (locus G SVIVG01027541001) derived from phytozome v7.0 (chr-ID chr1 5; pos 15893993 to 15894629 reverse strand)
gcaaggtaaaggttctcaatcaaaactcatttcttattattacttgtttcttgaagaaatttgcaggaatatcagggttttggctgtatgggttttaatggactgaagaaataagaaataaagaactaagttgacttcaagagggttctttctttggttttttttttttttttttgtgtatgcctatttatagatagacaggggaaacaactattgagagtgattttgatcaaactttggaaattatcaggaaaaggaaaaggagggaatttcaagttatcttccacccatccagcataggataaaaccggggaaacgataatcaattcatgccaaagctcaattcttacatcaagtgtcaactaatttttggatttttctatttcatcttgatttgccttgggaaaaaatggaattgttgtgaaagtgcctatgattttccaaccactggggatcttccactatgattaatttcagggtttatcctttgaaccccaaatttggaggtttagtttgttaatttatttatttttgaatcgggaatggagttcaaaacctgaggttggagctcaaaattttggttctttgaaaactttgtgcagggctcctataactataacattctgagggatctact

SEQ ID NO: 98567 - DNA, 544 bp, Vitis vinifera
  Intron number 1 from transcript GSVIVT01024734001 (locus G SVIVG01024734001) derived from phytozome v7.0 (chr-ID chr6 ; pos 7365605 to 7366148)
gccccattgggtctcaggttggtgggctgtgtttggttgcctagaaaactgaggaaaggagagaaaaaaacgctttgaatctttatatgctttgtttttggttactaaaggtgaaaagatgggaagacccttctctatgaagctaagagttgtctagttcactggtcaccgataatatttaagtttatgattttaattatttctttccctcattttcttggtgggcaaacagatttatatttctttccagaagttgaatgaattagaagttaagataaaagagaaaaataggtttattttaagtaattgagaagtgggtgtgcttctatcctttccccccccccccccctcatgcaattataccactagtcaattccagacctttattctcctcgatttcttgtacttctcttaattaattagtcgattttaatctagatagaacttggagagatagagatgcagaccaagctggatttacatttttttttcaggactcttgatttgatactgaatgtatatgccatttcaggtccatcaagac

SEQ ID NO: 98568 - DNA, 603 bp, Vitis vinifera
  Intron number 3 from transcript GSVIVT01024551001 (locus G SVIVG01024551001) derived from phytozome v7.0 (chr-ID chr6 ; pos 8922511 to 8923113 reverse strand)
acatttttcaatctgctatcaacaaaagtatcaatgtaagttttgcctctggaaccgactcgttgttctaagttttccattctttttcatgatggttttattatcaatttcagtttttgtttataatgtttattttttttcaataacttataataagttgatgattcgataatattaaacttcttgttcaggcctttctttgatgatttttaatcactcttttttattgtagattgacagttctgaaaatagtaggatgctagatggtaccatgccaggcttttcatatagtttgtgggaatagtaattgtgaactcacgtgcattgtgcttaaactgaaattaaagttctgtagttcagttaagtatgaaataatcatttagggttaggttcttcctagcacatcaaagatgaaaaagttatgttatacaagcccattctgaattatgtggccatcatttatgaaccttccatttgaaatcattttccagtttaaacttataatctcaatatagatgttctgatgttgcatattagcctctgattgagtattgttattgaagcctagctgcagatacattgcaaaataaagctctgagagtc

SEQ ID NO: 98569 - DNA, 717 bp, Vitis vinifera
  Intron number 2 from transcript GSVIVT01028861001 (locus G SVIVG01028861001) derived from phytozome v7.0 (chr-ID chr1 6; pos 18027172 to 18027888)
ctgttattcttggagcccaggtctggttctttcttctgattattgggtttctttggatagaatttgtgaacatttttttcaatgattttgccttcacaatcttgccaattccgcaagttttttcttctaaattaaaaattggtcaattgggcagtattttccagatcccaattggttttaaaaattggcaggaggaagagaaacttttgtggtcaaacttgattttcccacactcttctttctttttcttgctgttcttgacaagcaaatattgctttgaagcaaaaccatatatatctctgtctatttattctatgatcaatttcctcttgttaatctgttaagttaggtgaactaaagaggtattttgaaccatactgtcttcttcacatggagtcatgtgtttgtaataaaaccatctactctattggtcaactaaaaatctgcattgaagtctaaaatcccagcagggttttcatttaaaaacaatgaaacacaccaccaactcctctttgaactactccaaaagtttttgactgattcagaagccggcaagtgtggcaccatatgggggtctgaccacataattcaaaatattcctgctgaccttatgaccaattttgtttattcaccagtcataatcgtactgtcgtcttattgtttatatatttttgtcgctattgcttgtgtactgtgcttacttgatccaataacagg

SEQ ID NO: 98570 - DNA, 394 bp, Vitis vinifera
  Intron number 2 from transcript GSVIVT01019699001 (locus G SVIVG01019699001) derived from phytozome v7.0 (chr-ID chr2 ; pos 2549253 to 2549646)
tcacgcatatactgcttagctctatatctctgaaggtcaacaagaataacaatcaactcccactgctttgcgtcttccatggccttccctctctccttccctcctcccactcttcttggtcaaacggcaaccctcattcttatccctcctttttcctacttctcttctctgtctaacctacagaccacaagcttaacggcttgttgaaggagtagtggtggtgtcgttttttccttttgcttttctactattattagtttcaatcaggctaaggagggggttgggagttgccttaccccgaatacaaacacacccacttgccattttccatacatttttgtattgcttgattttgatttgtcatttggtgtagatccagctaaaatcagagatc

SEQ ID NO: 98571 - DNA, 651 bp, Vitis vinifera
  Intron number 1 from transcript GSVIVT01022153001 (locus G SVIVG01022153001) derived from phytozome v7.0 (chr-ID chr7 ; pos 17025947 to 17026597)
gcagaagatctctgtttcttcaacaaggtacatcccctgactttgactgaagaaatggattgagttgttctgaggaactcatcctttttctcttttcaatgggtttgctttctgttgttgatttgtggatatggtgaatattcaggcgattttgggggatgtatgattttttaaaacatttcccatgctttttttttttttgtaatttttttcagtttttttgagggttcttttttccaagaaatgtggattgaagatatacccaggtgggattgaagaaataatgctggaaatcttatgatgaaagtgttgtaattattaacacatcttgtattcatagtttgtgggcttattttgaatactcatattccattctctctgttctttactgctgttgttcttttagtagtaatacttctgtttccagtttcaactcatgtttttctttaattccccttgctcaaatctaactggaatgcgaattaggaacttcattttttatttttttggtttctgaaatacccatctcactctgcttcttgttttgttttatttggttttttgttttttggtaaagttagggcgttaaatgtctgttttctttttctgatcacaggacactctcatcataaagcctcctaagaaatctcc

SEQ ID NO: 98572 - DNA, 741 bp, Vitis vinifera
  Intron number 1 from transcript GSVIVT01027840001 (locus G SVIVG01027840001) derived from phytozome v7.0 (chr-ID chr5 ; pos 8511087 to 8511827)
tcggctgttttccagctaacaccgactcggaccaggtaaagtttctgttgtcagtggcggctgcgcttcccagtgattatttgattggataattgcttggttactgtagcgatctgataagtgttttgtacatttttctttttcgggatcgggtggtttggacgttgttgttgtttgtgaatcttggtggtgaacgtttcagttgtcaattttttttagggtccgttcgggtgtacttttgggaggatttttcctattttgagtagaaaagtatataggcctttgggggaggagttttggtgaacactgaagaggaattttgagaaaaaaaatccaaatgaaaatgaggacaaaataatcagaaatcaacgtatgaataggaaaggaggctttagaaacaagaaaaaaggatggaacgctgccaaatgagctaccagtagtgggatgtttggttgttgggttgtgtgtgtgaatgggttttgctaatttgcaatcttgctctaattgccctggatggagatgggtagaggagaagtgttttaactttcctcaaggcttcaaaatgaaaaatgacaatgttaatgggaaaattaattggcctctgaggttctgtccgcttttggcagttgtcaggagctatggattttggtggagaatatagttttctagcactcattcggcaattttcaaatggaaatctgactgctttctttgtcaggtgtgatttgattataactgcga

SEQ ID NO: 98573 - DNA, 413 bp, Vitis vinifera
  Intron number 1 from transcript GSVIVT01026818001 (locus G SVIVG01026818001) derived from phytozome v7.0 (chr-ID chr1 5; pos 20263928 to 20264340)
tctccgtgcatccgttatcatccacaatttcaacggtactattcatcaccttttctctataattcaccgtataatcacctgattttccgtttacttaacatctttcgtatcaactatcaaatttctgtttttataattcaataagtttctggattacgaggtttgatttttaaatttgaaatcatggggatctttttaatctagtttgttgtttaatcttctgattttttttctggggttcattttgtagttcatttatttattttccgactgagattatgttttcatgattatctaaattgttgtgttatattgttggatttcgaattatagggaattttttggggtagatgattgattattgtcctgccatttcagtgcttgaaccaccagagctgtgtcgatttttcatc

SEQ ID NO: 98574 - DNA, 644 bp, Vitis vinifera
  Intron number 3 from transcript GSVIVT01026818001 (locus G SVIVG01026818001) derived from phytozome v7.0 (chr-ID chr1 5; pos 20264973 to 20265616)
tgatttcagtataaaattttatcctggaaaggtaaacactgatgcgatttatctttcttggaactttaattaagcgtgaatatggtttcttttggacaccatggtggtcagcttctaaaagttcatgtatcggttaaaaacatattttaaatgatgaaaagttgtaggacagctttgaaatagatagataattgatttatttcggtttaatctgattttgggaactgaatatatgtatgatctggtacctaacgggttttacagttaggcatgcattttgtgtaatatattttttcttgcttttgtatctactgtgaatcgtagttcacaagagtttatattagaaacctttaaatttttcctttccattttctttttgtttattttgttttatttaactgtagtgttatttcctagcttttcttccttttattttatgaagaaaattaatgccattgaattgacaatcctcaaagatttgggcctgaaactatataacctggtgttgtagtcatcttggtcaaagacatgattgtgttagtgactctttgctttctttctatatgtgtgtttgtacgatactaactcctggtatcacttgaactgcagttttccagagataaaaggagcattcttgtggttgg

SEQ ID NO: 98575 - DNA, 1013 bp, Vitis vinifera
  Intron number 1 from transcript GSVIVT01027078001 (locus G SVIVG01027078001) derived from phytozome v7.0 (chr-ID chr1 5; pos 18133600 to 18134612)
ttcttgttaggcacgtcaaagctcctgctaatctggtaagttcatttctgggccgttggatgggttgactgagcttatctgggtgttctttgctgtagtcgccgttgatctgtctgactttggttttgtgacgattttgacccggttttttcgtgtagatctgagcttttctcgaactttttcctggcaattatttttctctagaaaattgggttttggatgggaaattttattctcttaatgaagtgtcagggaaaatggtgtgctgggaattttattttttttccctttttttgatggattgggttggaggatttggattacgtgaagggcgtggatgtttacagtctgtttggttcttgagaaaatttgagggaaatgagaaggaatgctagaaagtgggttgactttttcttagttttgcttctttctacgggaccgggtgttagagagaattcgcaataaattaaagaaaaaaaagggaattgtgattttgaaatggaatgattgagctgtttgaaaattgatttgatttaaaaaaagtttgtatcttctttgtttggcagctgagaaaaaaaaggggggccaaggggcctaaacaagcatttcactgaaaccccccaacaacataaatcatgtgattcaaaattttattttctttccttttccatcattttctcagccaccagtcaggccagctcattgtgtattggttatgattaattatagttaattgtgttggcataaagaaaaaaaaatgctttgcttgcccaaatgcttagccggtttgcttcaatgaatctctgatgctcaaaatggcatctgatgtaaatttttacaaaattgagggcatttattgttctttatgtccatccagatgcaaagaagcaaactgcaaagctgttcactgtatatagcattatacaaacttgaattgttgattttcaggttggatgaattttttgtttaatgaatcaggtttggtcactggtaaggagatttgatcaacccca

SEQ ID NO: 98576 - DNA, 693 bp, Vitis vinifera
  Intron number 2 from transcript GSVIVT01023855001 (locus G SVIVG01023855001) derived from phytozome v7.0 (chr-ID chr3 ; pos 2938306 to 2938998)
aggtaaatatgttcaaactttagaactcattcttttagtaactcttaaccgacctgaattacaaggagagctgagcgtttaatcatcctgaggtgtaaactgaacaaaaattcttatgatttctgaattcaaagtttgttgcttagagttagcttaaggagatgtccctaaacttggaactaaaaacttctagcttttggtagatgagtacctgtagttgtagtttagtgttcttttatagtgctatttgtgttgctatctctgtttgtattcggatttgtagggtattggagtttatatccatatcatggtataccaattaacctatatgatgacatactgttatgccacggatggacatggtgggagcatggtgtcttgcctatgaaacatagtcttgcattcttggataatgaacttgtttcaagggtgatcccaccttgtggaccgtgtgatcactgtgaaccttgttatttggttcggggtttgcccatcttttgccttgaccacaattgctcatctactcaattatttgattttatgattactcttttcacagttcattaattctatcttctctttttattttttgttttagttctttttctttaatcttatttcacttgcattggtgtggatatgccttgtatttaagaatgcctatgttataatcctttccaggaattagaaaag

SEQ ID NO: 98577 - DNA, 996 bp, Vitis vinifera
  Intron number 4 from transcript GSVIVT01028017001 (locus G SVIVG01028017001) derived from phytozome v7.0 (chr-ID chr7 ; pos 3217977 to 3218972 reverse strand)
ggcaaagtcagtaggcaaaatcagctttcagtgcggtaattataagcacatctttgattgagtttgtggtttttcaatttcgttgaaaattatataaaccctctagaggtcttttctgtcatgatcaaaacttgcacatttgtgtttacatttgctatacatgttgttgcaagccaagtaatcaaattgataagagcatttggcaggaattgaatgcatcaaatgtgcatggagttttaggccttcttgatattgatattcctgtctgtttatggcatctttaactgcttcacatgggaactgaacggttgagctttattatcataaaagcttagaaaggctttgtttggctatccgtgatgattttgatttgtctgcggatgtcaatggattgttgatgtcaggggaaaccgtgtggtgtttgtgacatgtaaaaatatcctgtaagctaaggaaatcttatagatagcttactgtagctctatcttaggtatgcatttaggatattctgtaccatgctactaaggaagatgttgagtgtgtgactttgcaattggaatttgttcttccaagttggcagtgctgtcattgggaaatgattaatttaaagataaaagtgattaacttgatttattatactgcaccacatgaccatctgatctgtaaacacgtttttgcaattagtaatggcaaatttgttttcttcaaagtgcattgcaaagttttctttaacccatgtggcatctgtggtaatgtttttcctgttaattctctttattgtttttacttgtttttggtcattcccatctcaggttctctcattaattgtgctttatttttatctattctatgtctaagtgcccctctcatcacctgttttggtgcttcttggagcatttgctagttattccaacttatttcaatctcatggcatgcatttctattttctcttaatcattaggacttgttgctggagttttttccggtactcgctgt

SEQ ID NO: 98578 - DNA, 225 bp, Vitis vinifera
  Intron number 1 from transcript GSVIVT01030434001 (locus G SVIVG01030434001) derived from phytozome v7.0 (chr-ID chr1 2; pos 5529192 to 5529416 reverse strand)
gctgctcaggtttgataattattctcttttcttcttctgtttgtgttttcattttcctcctctcaccatacctgttcagattttgatgtttccatctctcttttggttttttctttggttttttttatgacccatctggacttttcctctctatttatcctctgttgattcttcttttctttgtcttcagttaccaggtcgaacagacaacgaaatcaagaacta

SEQ ID NO: 98579 - DNA, 453 bp, Vitis vinifera
  Intron number 5 from transcript GSVIVT01024375001 (locus G SVIVG01024375001) derived from phytozome v7.0 (chr-ID chr1 6; pos 1731954 to 1732406 reverse strand)
aaagtgaggtgagccttctgtgaggagcacaatatgacttgcatccaacactcttaattaattgtgtgggttctcaagcactactgatgggtaaatcatgttttaacctaccacaaattatacccaaactaagtagatcactgatgccaaacttatattgtttgtgtaattttagccatctgaacttgacctttacttatgattcccatcttcactgtctaaactttcattgataaaactaggctgagcattctttgatcatttgaacttctagagtagcaccattggtccatttttatttgtgagtccatgtagaatagacaggatgactctggagattccatttctcattctagattttcttttatttgaaagaataaaaggtacaaatagtttgtgtttgttgagttcttttaatttgtctaactgttgttggctttgaagataggggat

SEQ ID NO: 98580 - DNA, 487 bp, Vitis vinifera
  Intron number 1 from transcript GSVIVT01025731001 (locus G SVIVG01025731001) derived from phytozome v7.0 (chr-ID chr8 ; pos 12527287 to 12527773 reverse strand)
cgcgctcaccctcggcctatctctcacctttacaggtctttataatgctttattgcttcgttcctatttttacgatgatctctatctctacagattctgctcatagcggttgaatttgtttcatttgcatattggttctgcatttttaacttggaattctgggggtctgtcattttaaggttgggaatcaaacacaagtcatgggggccctctggattagattagacgtttgctgtgtttgggcatatgaagaaatatggcgtttgaaatgaataatgtcatactcttgaatataaagatggtgctgtaattgcagttcacttgttgtaatttggcccctccatttgtcccttttcatttttgcaacctatatttagtttttttgaactatatttcttttgagttatgcaagatgttggaaaattcttttttcttcgatcagacagaagactcaaaagagaaaaaaaccaaactttgtaggagttga

SEQ ID NO: 98581 - DNA, 630 bp, Vitis vinifera
  Intron number 1 from transcript GSVIVT01022608001 (locus G SVIVG01022608001) derived from phytozome v7.0 (chr-ID chr8 ; pos 5958721 to 5959350)
ggcgagcggagcggttgaggcagcaagcggctgaggtattgtcattgagtaatatgttttcgtggtcgtgttattccattgtagggttttgacggttagagaaagggggttttgtgtgatgctcatggatgctccgtttggttccctagaaaatttagggaaaattgagattgggaatttgaatagaccatgaaacagtaaattgaaatttaaatagtagtgaaaacaaagacatttacggttttttttttttaagcaaaaacaaaggcctttacctgtgcctagttcaatcatttgcctagtttaggcaatctctcttgaatagattttgggaaaacatctggtttgctattaaagagagaataaaataaaaacctcacgtctgtgtaagaaaagcatagggactgacaaccgattcatctcactaggcactattagcaattataagtgcatgctctttctctcttcaataaatacaagggaattttattttattttttgtttgtttatttgtcttttttctttcttcctttatttttttcttttggtttcaaattcataattttggatattcagtggtttgtgttggtgtgttggaaacattgatccaggtagaagtgctcaacgagg

SEQ ID NO: 98582 - DNA, 539 bp, Vitis vinifera
  Intron number 2 from transcript GSVIVT01025776001 (locus G SVIVG01025776001) derived from phytozome v7.0 (chr-ID chr8 ; pos 11994117 to 11994655 reverse strand)
aggtttatctcctttacttgtattgtgttgttttgttctcttagtttctaattagtacctttgccttttctgcttcaaatttaggggattttatgaagaatttggaagttttaggatcgtatttgttgatcagattactcaattgtagttctgtagttccttttcagatgggttttgaagatgttgaagaattttttctgttcttgggaggggactgcgttgctagtttcctgttagcatctttttaagtgcttgaatattagtgtttttatagaacaatttggaagtttactgacctttatgtgctgatcagatacataaattttgcaattctgaagatttttgtggatggttttttttttttttttttgatattttgaagaattatactgttcttaggagattgtttgattatatgttgagtagcatggtttgattggtttttatttttccttgcggatttctggtttttaattgatggtgcttcttttactttcattacagtctgattcggtattgttcgattcattgaggagact

SEQ ID NO: 98583 - DNA, 901 bp, Vitis vinifera
  Intron number 1 from transcript GSVIVT01027006001 (locus G SVIVG01027006001) derived from phytozome v7.0 (chr-ID chr1 5; pos 18616021 to 18616921 reverse strand)
aggtcactccctttctctgtttaaatttatctgtaattcttatgttttgtttgattggtgggaaaatgaaagaaatcgaagggagttcgtgattctttatccttttcttaattattgagggaacccgcagaatagaatctggactgtgaactattttcatatcatgacgctcaaattgtgtcgttttcctgctcgatgaattttctcagccaccaaaaggaatggggtggttaatgttccatttggtggttaggaaaatgtaggaaaagaaaagagaagaaagtgaagttttgagtgtttgagttttcagtgattggagttggagaaactaaagtgatactctatttatttcttcggcatcagttgctttgaaggaaaacagtctaaagttctgtttggttgttgagaaaatgtaggaggcgaaataatttaacatctggaatcaattgttcacgagggcttggggaagctactacgatgatttggcttggttgagctgatttgttttaattcctccggaaatgaaagcaatggcaaaatttgttttctttgcttgtgtgtcttctcagcaaccaaacagtggattagggggatcttttccgagaaaagattttgtcacggtacaattaaatataggtgctaagagataatctttccctggctaacttaagacacccattcccaagctccaaagcttcagaataaaaaacgtctttccataaaaaaaacaacagagtcacattgagtataggcccctgctaatcttttcttcctggtgctcctttttgtttattttcagcaacattttcataagcacttagtagcttcctttccttttacaattttgcattgctgaatgtggataggttccaaagatcgaaaagattgttctgaactgtgg

SEQ ID NO: 98584 - DNA, 908 bp, Vitis vinifera
  Intron number 2 from transcript GSVIVT01030266001 (locus G SVIVG01030266001) derived from phytozome v7.0 (chr-ID chr8 ; pos 9717412 to 9718319 reverse strand)
tcctatttcgcgcttctggacagtctggtttcagagtaaccatttctcacccttcgctctctataagttttccctctgtacaaccctctgatgctttctctatagaactctgtagtcaatcactccatcttctcttcacaatagaaatgtgaacactcttatctgaacctgatgaacttgattttgcttgttagtcgcgtagttgttcgtttatttttcgtattttagggctttttttggcatttgattgtgggcatagcggaatgagattgcgtgatttcttctcacttctgtatgcagtttttggtcttattctgggaaataatctctaattcaatgttatttgtttcctgcttattcatcgcgtgtgatgatgctctgagtctttttagtttgggttcatttttttgtgttgttgcttttggatatctgggttttgtgagtaagaaaatgctgggaatcattggtaatttttttttttaattctttgtttataggtatataggaattctttttgtattgaagtagtctggtatgggctaatgtggttgaccatttattgatgttcttctttttcctagaagtgtaattcaattagaaatatgtttttccttctactgtttgaacttctaaaactattactaaagcttgatagtggatcaggatcatatttgatgaatggaatttggaagaatttgttagagattttcttgttattgtaggttctttttttgtttttctttttttttttcaaagggaaaatatcatttatatgcgactttttacaagaattaaaattttcaaaatgactttcattatgtatattaacataaggctttgtttgtatcttggaatttatgagggaaaaaaaaaattagggatctcattgtcttttgtttgattacagg

SEQ ID NO: 98585 - DNA, 1051 bp, Vitis vinifera
  Intron number 2 from transcript GSVIVT01025485001 (locus G SVIVG01025485001) derived from phytozome v7.0 (chr-ID chr6 ; pos 395773 to 396823)
aacaacttgctcacaggggaaatttcatcctggttgttcgatttgaagggcctgaagaacttgtatcttggaagcaatagtctgacttggaacaacagtgtgaagattgtaccgaagtgcatactttctcgattatctctgaagtcttgtggtgttgcaggagaaattccagaatggatttctacgcaaaaaactcttgactttctggatttgagtgagaacgagctccaagggacatttccacaatggcttgctgaaatggatgttggaagtataattctatcggataacaaacttacaggttctcttccacctgttctctttcaatctctaagtttatcggtccttgctctctcccgaaacaatttctctggggaattgcctaagaacattggagatgcaggtggcctcatgattcttatgttggctgaaaacaacttttcagggcctattcctcagtccatctctcagatttaccgcctattgttgttggacctctccagcaacagattttctggtaagactttcccaatatttgaccctgagggatttcttgctttcattgatttctcttccaatgaattctcaggagagattccaatgagcttttcgcaagaaaccatgattcttgcattgggtggaaataagttttcagggtccttgccttcgaacttgtctagcttgagcaaactagaacacctcgatctccatgacaacaaccttaaaggtgatttaccagaatctctcttccaaatctctactttgcaagttctgagcttgcggaacaattcccttcaaggttcaatccctgaaactatttccaaccttagtagcgtccgaattcttgatgtttcaaacaacaacctcattggagaaatccccaaagggtgtggtaatcttgttggaatgattgaaactccaaatctgttatcttcagtctctgacgtatttaccttctcaattgagttcaaagacttgatagtgaactggaagaaatcaaagcagggtctctcaagccgccaccttgatatctacactctgttcgacttgt

SEQ ID NO: 98586 - DNA, 830 bp, Vitis vinifera
  Intron number 1 from transcript GSVIVT01029368001 (locus G SVIVG01029368001) derived from phytozome v7.0 (chr-ID chr1 7; pos 15569719 to 15570548)
tggtcacctccgaacttctccgcaatcattttctggtaagttttcaccttcttctcttacaatctttcactttccggccattgaaattctcgaagggcttcgtttttcatacaggaaataatcagtttctaatgctatatctctcgttttccttcattttctcggtatccaaacagtcctgcgtgttcacagttcgcttattccttttttttttttcttccttgctcataaatcttgttatgcatctttgccgcaaatttttctctgaaaatcttttaagattttttttttttaaaaatccaacctgtatagggattcacacgccgtggtcgtttgtccagacatttgtatttctatacaagtttatagaattttttattggatagagaaaatagagaaattgtaatgtagtggttcatcgagatctgcgctagtcttctgattcttctttgcttgctctgctactaccacggacctgctgctgtttttgatcattatttcgtgcatttattctaagtgttcgtacggattgctttggttttctctctcatgacatgctgtttttcgctagtccatggcaatactgcaaccatattgtttcttttatttgccatgtatttttatttttagttgtttagctgccacacggttgtttgctttcgtctctccatcgcatgcttttggtgtggttgtacctcaaaattgcaattttgagggaaagcgttggaatgaaaagcatgtgggggagaggtaaaggaagggattggggatttttgattgtggtggtttggtggtgaattgaatagggtagggccagagtgttggaggag

SEQ ID NO: 98587 - DNA, 702 bp, Vitis vinifera
  Intron number 1 from transcript GSVIVT01026644001 (locus G SVIVG01026644001) derived from phytozome v7.0 (chr-ID chr4 ; pos 20790225 to 20790926 reverse strand)
aattcatttccgtgtggctagaactctccaagaaggtaactcctttcttctctctcaattctttttaatcgaaatgtggaacaaggaatatgattttgggtgattgtttcgtgtttttgtatgaccacatgagaattgatgagactcttgtgtttttttttggtttttattgtgttaaattagggtttcaaattctgtttgagtttttccgtttgttatcacattgaaaaccatgggcgagggaccacgttcatcaagaacgatgcattgtgagatttggtaaccatgtaaattgcttttttgatcgcattgaatggttattattatggagttcgacacaaacaattgagcataacatcacatatttgtactgggagtctcaaccttgttgaaaataacagcactagaaatcttaatctgggtgattaagtttgtcatgaatttgaacatcgatactataacaaaaaaatatggaccctcatgaataatgggtagccagaatcagtagaatccgggagccatcacatgctaatatcattgttactttcttcaagtaatggaacttcattcttttcattctaatatctttgttgagatagcgtaacagttgttttacctctagtactgaaagatggctcttttgaaatgattgttcttttggttcctctttttccttctagagagggttgagaagtgctgaag

SEQ ID NO: 98588 - DNA, 971 bp, Vitis vinifera
  Intron number 1 from transcript GSVIVT01024641001 (locus G SVIVG01024641001) derived from phytozome v7.0 (chr-ID chr6 ; pos 8135862 to 8136832 reverse strand)
tctgcttctgctccatcggaaatcaatccacttcggtgcggcaactcctctggtttctttcatcaagtttgaattctgaattcaattattgcttggttgattttatttcatgtttggcattttattcagctggctgctaagtgtaatccttcaaaccagcattttgtttttattctggaaattggctgagaattgaatttaggaaatcctttttatgtatcggtgaaacctaggaatagaagaaatgcatcagtcatcagtgttctttgtcatttaagctctgagttctaagaacctaagccctttgactgattgctgaatatccatccttagccaccattctcgccgtataaatgttgtggaacatgcaggaaggtatggggttctgctgacatggtttttaaaatgttttcaaaagtcctcttagaagctggtcattttagcaaacactttatctcaaaactgatcccaaacaagaacatgttttactgttttcatgttttgaatatgaacatgtttttgaacaaaatctacttcattttttttcttttgttaccaaacaatttctgcatttccctaaatttcaatacccatatagccataagtgacttgggtattcttagcgtattagcatgaattccattgttatcctgctccatcagtgcagcagaaattatggggtccatggatatgtgcactgtgcttgttcatattttaggtgtgaagtgctctacggggcagtttggccggaaaatcctttctgggatctttaatgttttctcttaatatggaatttttttaaggctgcatgctggttcagttgtttggtcaccatgatgctatatcttgtgcctttcaatattattgttattattgccctctagattaatgtaaccaattgaactactgggttgatctcttttgccatgttcgtaggtcggaagtatctttttgtgttggaactcacctca

SEQ ID NO: 98589 - DNA, 670 bp, Vitis vinifera
  Intron number 1 from transcript GSVIVT01022232001 (locus G SVIVG01022232001) derived from phytozome v7.0 (chr-ID chr7 ; pos 17713848 to 17714517)
aggtattattcttctcgacaatctcaaaccctagctccatttcgcactcttggctcgtttctgagagaataagagagcgtaaaatccatatttttcgtgaatcctgttattattaatcataattttcgttttcctacttttttgttagcaaataatggaaaaaagggacgttcattagaagcgaattttctcagacaaaggctaatatttttcatggaattatcgctcactcaaatcttgttttgtattgtgaaagaagaaatttattggtataataattggttttattgattggtattatgatttatgaactccgtagaaacttgtctggaactatcattcttatcgtcaagaagcttgtgggtgttaccattggcacatgattgtaaattatgatttggatatcattgatttttgttttatgggtttgtacataagacctctcaaatgttattttaaattcatggatttggattttaagttgtaatgatctttgtctagatttgcaatgtggtaagtttttatggaggattcggaattggggacggagattttaatccagcagctctaagttgtaaaattcaaatgatacttaggagttcttggttccatggtaattgttttggagttgtgacacagcctttatgatttgctttgttgttttttgcag

SEQ ID NO: 98590 - DNA, 1069 bp, Vitis vinifera
  Intron number 3 from transcript GSVIVT01021210001 (locus G SVIVG01021210001) derived from phytozome v7.0 (chr-ID chr1 0; pos 2569033 to 2570101)
aagaggctgctgatcagtcactgaaagcttatcaggtatgtgttgtttgatgctgtgagggtgtaatttataagttcttggttgatgcatgtataaaattgcaagaacgagattttattttctgtgtggcttgggttgcttcaaatgctataattcttggtatattatcaccttataatggttcgatttactggggcaaaaagttattgcttgtagaaactttgatcgatttgggaaccttatttgatcaattgttctgtgcatacgactctctgtgtttttattttaagaggcgttgaccatacatgtgtccttgctgagaacctattattgtgcaagttctgggtgagagagattatatttattcattttctttttaagttacacgagtatatgaagtgcaagagaggtgcatgacatggataccagatctgtgttggacatgacacttttagacccgctcctaggaggtctcacttatcaaggaagagatgaatgcggccttaaatctgtttactagtttctgggacgcatagtaatttgttcatgtgtcgcatggataatgagtgaactttccatgttcttcctttattccatcataaggtgtgacacttggacaactgaggggtttgtgcatgtctttgatgattccaacaggtagacacaccttctaagctgcatatgatgagtacccttgtaacacagatgtcctttcttgattttccttcttttcaaccctgctagatcctcttttctataggccttgctagatcctttttgtcttcattacacacttatcatgtaaatatcagttttttggacaatgggaaagggacaagaggataagaaggttctggatcatcgcctgctgacaggtttttggtactagatgtgtgtgattgtttaataaatttgtgggtgtcaactatctttgttgtactatgaaatgctaaatagctctccgagttccagaattagttttgtcaagttgagttatttgaaatattcatccatttgtgtgattgggtttgcagacagcttctacgacagcagaggctgatttatctcc

SEQ ID NO: 98591 - DNA, 656 bp, Vitis vinifera
  Intron number 1 from transcript GSVIVT01028787001 (locus G SVIVG01028787001) derived from phytozome v7.0 (chr-ID chr1 6; pos 18826433 to 18827088)
gtttggtctgctagcaggtgagtttttactttttagggcaagttgatgatgatgtgatagtgtaatatgtgcatggttttgaatatttctgagaatttgttgtacgtggtatgtggactaggccccaaagcttgtttaatctgggccccgtagtaccgcaaccaggagctgttgtggcagacggtggtgtcttggggcctttggcccagacagtgatgaggaagatgattaacttgatgaacaaattctttaggtgtgattttttttaatttaagggaactattaggaaaagaaactagcgagatgaaatagtagaaaagaaaaaataagaaaaaaaattaaataaaattattattattattatttaaaaaaaaatgatatttaatcattgtgtctatattcaaactatatgttatttgattaagtaatttgtatatcatttttcataaattgactattgaaagaaataatggaaattgtttttttttttttccaagtctaattaagaagatgtcagtgtcgttgaattcagaaacatgctctagtctttacccaagcttttgcaggtatatatgtgaatgtgatcactacttagccaacaatttcattttctctcaatcatctgcatatatatagaaactcccccgtcggaaaag

SEQ ID NO: 98592 - DNA, 712 bp, Vitis vinifera
  Intron number 1 from transcript GSVIVT01021401001 (locus G SVIVG01021401001) derived from phytozome v7.0 (chr-ID chr1 0; pos 4935035 to 4935746)
ggtaagtttgtttttccaacaatctaaatgaattatgcaccctctgattggttgatgaggaaattgaggaaaaagagaagcaaactatgaaagagtatgtttcatatgttgttttggtttccaaatatttgaaaaacacactccccagctgagctaaatagttgtatctatcattcatggttgcgttgaggttgtttaaagcaaagtttggaatcttcttaccttttctctttggaccaaaaggagaagaaatccaaagtatctcctccttcgcagcaccaacactttgcaggatattggatctggaaagaagaaaagaaatggaagaatgctctttccaagctccacacagggccttaatttacaaaaaacaagacttttttttaattcaggataaaaataaaattttttaaaaaaaagaagaagagaagaaatccttccctatgttctctttccttctctatgttctatcaaagaactcgcaagttctatgcacgtgaaaaagaaatccttcaagatttcatgatgcaaaaatatgttccttccttggagagtaaacaggtctaggatgaaatgcaaactagtaatatatttttaccatatttatgcgttccccagcattcaaattctgaagttccaactgtttctccgattgatgtgtttttagtttttaccaggtcaggaagccagagaagagaactctgctgaagga

SEQ ID NO: 98593 - DNA, 674 bp, Vitis vinifera
  Intron number 2 from transcript GSVIVT01021313001 (locus G SVIVG01021313001) derived from phytozome v7.0 (chr-ID chr1 0; pos 3884164 to 3884837)
ttggaactctcactaccgttccaatacatcatttggttggtctttagcttaacaacttgaatttctaccaattcaattactcaatgatcatggagttgaattgctattcttgatgaaacatgagttattagagtacaacttaaacattctgcatttgtccttttctttttctctaaaattcccttaattcatgggtccaatgtctgtgatagaaaatatatttaatgggtggttggaaagtggacctcaaagatttgtatttttgatggtttaagatatacacttcagtccatttggagtttgtgagaagtgaacccttcaaatcataattgaggtcccctaatgatttttcatctttgtgaagttaaatccaacatgtatgctaagaagctctggaagcaaatgaaagaatgaatggcttgataacctttggttttgtacaagaatttagaagctaaaacttatagaaactgcaccaaggtgatggtaatgtgtgctttattttgtcttttgtgcatatagataaatcagtctccaactcatgattttttgttattattattatagttgttgttgttaacatgattatttttttacaactgtttttgttgaataatcatgttgatttctaaagcattttcttatgtatttacaggatcgatctcttgacttcc

SEQ ID NO: 98594 - DNA, 503 bp, Vitis vinifera
  Intron number 1 from transcript GSVIVT01025792001 (locus G SVIVG01025792001) derived from phytozome v7.0 (chr-ID chr8 ; pos 11796861 to 11797363)
agcctctcccaaagacactcccgcccttcgcgcaggtacacatccccccatgaatacagtcattcgctacttaatcagaatagagattattagaatttgagttcctttcaattcaatattcacgatgagtttcgtaatttgaggtttaagacttctgtgcaaacaattttcaggagtgatggtgtatttgttaagagttggtgggcttgacatacactaaatctcttaaaccatccttttaagggactaaggaatatggagtgaagaggtttattttttgcttctttaagtaaaatcaaagctgggtattgggtgaagagattatctaaccctcttacttgatttttggcattaattttgttatgcctgaaattgatggatgcatagagaagtaatcttcattcttcagtgccatttcaattttttttaaaaaaaatttattattgttttttctttatatttgtttcttttataattgtacatgttagcgattattgcaggaa

SEQ ID NO: 98595 - DNA, 624 bp, Vitis vinifera
  Intron number 2 from transcript GSVIVT01027985001 (locus G SVIVG01027985001) derived from phytozome v7.0 (chr-ID chr7 ; pos 2997928 to 2998551)
gctgtggcatttcgccgaataatttcaaggtatttttgctttgttagcttaagaattgagtgctttgtttctgttttcaatttatatgaattttgtggtttaagtcgacagcttatgtcctttttagctttagttatgcctagtgcctgtattcaatttaaatagtctgtttggtttctgacaaatagccccagagaaaagggaagacaaaatttagctatgatgttatcattctattttccccccttcaaatgatagaaaactcaacccaattaaccaaaattttgcacttgaaatttgggtttttcctcttgaattctaataataacaattcttgaattcaaaatattgatttttttctttgttttattaactaaatttttaattttcaatgcattcttagcaactaaataccaacaaaaaaaaaaaaaaaagtttcaaaaaacaatgccttcagaacttatttctgtttggtttgctacttttcaatttcaacatgctattagctattaaatgatggttttttgtttgtataacattggcattttactgcttagctgtattcatcgtcttgctttgatttttgcaggttcttgcccttaagcatcatacttctaaattaat

SEQ ID NO: 98596 - DNA, 158 bp, Vitis vinifera
  Intron number 2 from transcript GSVIVT01025449001 (locus G SVIVG01025449001) derived from phytozome v7.0 (chr-ID chr6 ; pos 760434 to 760591)
ttcttgggtaagtggatcatcaaccaaaattgattaaaaaagaaaagaaaaagaaactaacttttatttatttatttattttgtgggttttgattttatttgtattatctttcgttaaaaaagagtgattccaagggctctggttccaatagagatat

SEQ ID NO: 98597 - DNA, 431 bp, Vitis vinifera
  Intron number 3 from transcript GSVIVT01025449001 (locus G SVIVG01025449001) derived from phytozome v7.0 (chr-ID chr6 ; pos 760670 to 761100)
ccttcattgcacttcctggtatgtctctctctcatttctatatataaaccaaaatcatcttacttttacttcacaaaagagtggagttgggaattcttccagaagaagatcagagtgttcttccttggagagactttttaccatcatcagagttgtagtattgaaataaaagagaaaaactaattgctacttttgattaaactaataataataattatcatatgaagttattggactactaagatcctgaggtttcattaaatttattaatcaatcaaactatgatttatctcttctaccttttttacatattcatatatattctcttatcatgtaactttatgcaaaattaagaatattttttaattattgttgatgggggtggttttttgtatttaatattttttatgggttattggtggaaggtgggt

SEQ ID NO: 98598 - DNA, 937 bp, Vitis vinifera
  Intron number 1 from transcript GSVIVT01028119001 (locus G SVIVG01028119001) derived from phytozome v7.0 (chr-ID chr7 ; pos 3977194 to 3978130 reverse strand)
aatcttctggtacgcacaaggctcacgatctcattgttttttcagatctgtgcatgaggttttggttggaattaggggtctgatgttttaaatctgattcagaatgtgaattgtgttctgttacctcatggaactgaattcaaaattgtattaagagattgtgacatgtatattgggtgggaatatgagttcgtaatttttggtttctgtgaatttttttggttgttgctcttaatttgcattggaaggaattggatattaataacgaattgaggtatgaaatcgcggagatattgaatagatattggttgaagattagaagcaaaacatagaaatatcgttggaatgacactcgtagatgctagagatgtcgagatactgatgtacttgcagatattcaagatcacgaatttctgcaagtgatgagatcaaaatacatttaagaattagagaaatttggacactgaaaatctggaaaaaaaaaaagagctccctttatttaggcctggaagttccaatgcatgagcattggctaagtctagtttcacattcctgcagagtgtcttaacttttccctattctgaattaagcgaggataagatcgaaatgcttttaagtgattagagaaatttggacaccacaagttccgatgctggcagacaacctgggaaacaaagattccctttattttagtttagttacacattctttcactgttccatgatttctcactgttctaaattaataaattgttcaatggatctaaacattttccagtcgcactgcatcgttttatgttgtcgaaggtaggggtccagcagtgagcttggtatccttgttgcttacctgtagttttctataatcttcttatataataatatttgcttcatttgtatgtgaaggcacaaaaatcaaatttggaaggacttcttcaaag

SEQ ID NO: 98599 - DNA, 757 bp, Vitis vinifera
  Intron number 4 from transcript GSVIVT01024519001 (locus G SVIVG01024519001) derived from phytozome v7.0 (chr-ID chr6 ; pos 9334424 to 9335180)
atttcaggttattaatgcttcattctttttcttttacattaaatagtcctagttcatgaattttgcaggcccctgactatcgacactgttttcaattactttctagtagttaagaggctacatgaatgaacaaaaattcttggagtgtttatgcatgtgcatgctggtgaacacacgccactctgcagcaccttttttgatggttatgggatttagtttggacaactcaaatggaatgctgtttgattgtgtcttccaaacatatgactgtaaattggttttttacctaacttgtcttgtgttgctctggtgactacagaaactagtttattggtattcttgggtccccaacctgttccaatacccatatattccccatccgatgatctcttttattggcttaatgtaaccccttacattctcttcattagaaacattacctgtacttgcacctgtaattggtctttaaaaatcagttcaattcattcagcagtctcccagttgtttgaaattatttcacaaatgttgtcactggtcctgttctatcttaactcttagtttaaattatgagtcacttgtattttcctgagcagttcctagaattatggacacattgatgtgggaatcacaatgctgttctattcttattcttttcaactgtgtacaatattcataatctcctctccatcgttgtgccttctatgtttccttttcatcagatttttctaaagaattattatttttttatcttcacagg

SEQ ID NO: 98600 - DNA, 719 bp, Vitis vinifera
  Intron number 1 from transcript GSVIVT01022205001 (locus G SVIVG01022205001) derived from phytozome v7.0 (chr-ID chr7 ; pos 17452939 to 17453657)
ttacaaatcttttttataaagtgtttcgttaatttttttctaaggatctttgattaaattgctctgtacaaaagtcatatatgacttagcaagagaactccaccattcgtctaggaaccaataaagtcgagacacgtgcaataatcacaaacacgcattggtgattggaccacactgacttctagtttaaatttttcttgtgtcctggatcccagcacacgttaagtatattcaaccgcaccttatcctcttcacaaccctaatcccagggagagctttctttttctcttctatgtacagctccaccatatctctgaaaccacccaagaacttcaaaaccctagtcctgaatactgaaaattaaccagccaccatggccgtttggacatggactgcacttgccctaactgccattattttcctcataaacatagtgaaaaacaagcataagaggctgcctcctggccctagagggatcccaattttaggaaacatgcatacgttagggagcttgcctcaccgagctcttcaagctctagccaaaaagtatggccccataatgcacatgcggttaggctttgtgcctgccattgttgtttcttcccctcaggctgccgagcagttcctgaagacacatgaccttgttttcgctaataggccaccccatgagtgttcaaggcacattttatatgatggaaagggcatatcgttttcggagt

SEQ ID NO: 98601 - DNA, 579 bp, Vitis vinifera
  Intron number 2 from transcript GSVIVT01020846001 (locus G SVIVG01020846001) derived from phytozome v7.0 (chr-ID chr1 2; pos 1124882 to 1125460 reverse strand)
ctgcattacaggcaagttcatctcattttttatggctccaaacaacccccaaaattaacagcagaagttctctaaatattattttcatttctcctttcaaatgatcatacaagtctctcaagagttaacaaagctatcatcaaacctttcaactttgtttattagatgaagataccccacttttgacctttaatggtatgccaaaagagaaataaaagcaaaaactagtctggatttgcaaatattttaaccagcccacagtttcttgccagctaatcaacacaaatttagctttaatccaccaaagattatcatgaatgcttggagagaaagaaaaagcagctattaaaaatctctagttcacaacagatctatattttcttcttctgctatggggaacaagcctataccaagattgtaataatgagattaggtgttgcattgattcattcacaaatcacaacaagtgaagttcattattaaaccattgagtgtaggtatgtgattttctactgatcaagcttatatttgtgtgttaaaccagattgtttcagtacttcttgtaacagcaggagcaat

SEQ ID NO: 98602 - DNA, 377 bp, Vitis vinifera
  Intron number 1 from transcript GSVIVT01026711001 (locus G SVIVG01026711001) derived from phytozome v7.0 (chr-ID chr1 5; pos 5309443 to 5309819 reverse strand)
attcacgagataggtaattctacaaactgcatttcttttgcttctacttgggtcttcttttcgtttcttttctttgcttcttttcctcctaagctctgcttaaatctcatactggaaattgaaatatgtaccagtcaattgggagagtgcctcatgactcttcttttattggccaccatgtgttcccaccgacggattaacaaattgaccaattttaacttcattttgttaagttatatttactctaccttcttttttcagttgtgaattagaacaaatctcagtatactgctctaattcttctattttttatttgtctacttagggcttttaaaaaatatgaccatgtgattgttctcaatttgaattttgcagac

SEQ ID NO: 98603 - DNA, 552 bp, Vitis vinifera
  Intron number 2 from transcript GSVIVT01028110001 (locus G SVIVG01028110001) derived from phytozome v7.0 (chr-ID chr7 ; pos 3881883 to 3882434)
aaaaagggaacacaacttgtgaaatctgtctccaggtttgaattcctctttccttctctgttttttggaagctctttgttttgtgttttcttgtttttgaaagcaaagaaatcaatcatctgggctcttctgtctgttgtctgtgctttgtttgaagtgggtttgtgttgttttttgtcttgaacgattcaaactcttgtttttctttgttttttttttccgtttgttttgaatattggagttctcaatgttaccttttatttaaccttccttgaagcctagttctctttctcctctccctccctctctctctctctctctctctctatacaaataatttaaaaagttagacttctattttattatccagcctattctatttaggaataatttgcattaaaaaaatctttttatttttaattttttttccggctttgtttctgttctttttcaatcttgtcttgttcaaattttctttgacagtccttttcacgcatttgaatttgaaaactgaggtctaatcaatgaaaatgaactataaattgcaggaat

SEQ ID NO: 98604 - DNA, 829 bp, Vitis vinifera
  Intron number 2 from transcript GSVIVT01026631001 (locus G SVIVG01026631001) derived from phytozome v7.0 (chr-ID chr4 ; pos 20892984 to 20893812 reverse strand)
ggggatcactaggtaccctattgttccagggtatgatgctcttcttccaccattttctaatgttaatttcaagatacattttgttgttattattattattatcatttggttgtgttaactgacgttatgattcaagaaagcagcatatatttattttataatgacctttgtgctctgtgtggatcttgggaaggaaggaaaggaaaaaaaaatggatgatatatatatattggttggaaataagatgaaattaggagaaaatgtagctttcagaactccctgttttccatgttaaaaagaaagcggggaaagttgggaaagggtggaggaaaattttattccttcccctttgcttgcatttcctttgggctgctttccttatccttcagaaccaaacacagcccaactttgttggaaaataagggtgtgagactacatggttgaggtagctcaaaatgtgaattcaaggtatcgtacactgaggaggggataggtgtgtgtgggttggggcgagcctctaggtaaataagcctttatagcttcatctttctgttcttcttttgttttttctatatatgcggtgtattcacagcaaatggatctgcatgtgtgcataaaagtataagcattcaaagttgcatgaggttttcaatgtggtttcaccttgattttggttttgataaaaatatatagaaaatagcagaaaattcaattggagtaagagatttttgtatggaaaaagagaaagttactaaaaataagacgaaccaacctcaggcatgttaaaggaactcatattggtaatacttttgaatgttttcgtgcaggc

SEQ ID NO: 98605 - DNA, 899 bp, Vitis vinifera
  Intron number 1 from transcript GSVIVT01023557001 (locus G SVIVG01023557001) derived from phytozome v7.0 (chr-ID chr1 4; pos 9709132 to 9710030 reverse strand)
ttacaaagttggagcagacatatcatatctcccttgttctttttattttattttcttattattatgtatattttttttatattttatttaattatatgatattctaaaaatcaattattatattaatttttggtcatttttatattaatgcaatgtagatggggccctactccctctttctcgattaatgcaatgcacatgggggcagccttggaattatattttcgattaatgcaattcacatggggcttcgctctgaagactgaattatattaattttcaactatttttctattgatgcaattcgcatgggccttcttgctctctgaattatattaattttcaaccattttttgtagcagctatatttcgattgttaatacgatatataagaaccgctactacaaatagtactacacccttgattgtgaaatatcgattgcttgtttccctatgaattgcgtgaaagtaggatactccaaattcgagggtcaaagagttttataaaacgtcataaatcttatttatgcgaaacttctctatggtagagctccgctcttgcaattgggtcgttgcgattacgggttggatgtctaattgtccaggcggtaatgatagtatcttgtacctgaaccggaattgagatctcattcaaagaaaaagatatcaaatatctggagtttctttttgtatattatatggatgatccgatccacaaggaccatgattgggaattgtttgatcatctttctctgaggaagaggcgaaacataatcaacttgaattcgggacagctattcgaaatcttagtgaaacactggatttgttatctcatgtctgcaaccctgacttcgattagactagaccgacccagataggaacgtgcccacgagggcacc

SEQ ID NO: 98606 - DNA, 304 bp, Vitis vinifera
  Intron number 2 from transcript GSVIVT01025740001 (locus G SVIVG01025740001) derived from phytozome v7.0 (chr-ID chr8 ; pos 12356286 to 12356589 reverse strand)
attcccgcacagacacctttcgagcaaggtaagaacttgggagaacattagatttgatctcgagaaagctcagaactctgggtctggtaattttaatcaatttcaagttttcttgtaaatttttttcattattttgatgtcaaagaaaaataaaaaaacaaaaagaacttccaactggattgtaatttatgttgaatctgaagctggtttgataagaaattgttagatcagaatactgtattgaaactcaaattgatattgtattgcaggtactcaccccaagggccgcagacaatagaggaaa

SEQ ID NO: 98607 - DNA, 988 bp, Vitis vinifera
  Intron number 1 from transcript GSVIVT01023835001 (locus G SVIVG01023835001) derived from phytozome v7.0 (chr-ID chr3 ; pos 3101856 to 3102843 reverse strand)
gcttccaattccgacaaggatactccggcgggtaagcttcactccgtgttttttttttttttttttcttcttccaaattcgcgccctgtagtctccgataaagatctggatcatgctttgatgccttcaattgattttaatttacttgcaatcagaatattgggtttcaaagtttggggattgtgttacagtgtgttggattatcggtatagtagctttctgtttgggcaagaattggctttaagattgatttatttttcaggattttttatgaatcttggggcattgcgtgtttcggcaattttgttggtaattaataaacaaagattttttcttgggagtatatgaaaccctatttctctgtataacaagtcttggtaaagcatgaatgggaaaaaatattttttcttttgttatttgctatcctttgaagaatatccagatctgagtcttagagtatggattgaaacagagggggggcctcaaatcctttccttgcagtgcttgccctttaccacttgtttccatcatcacctacacacctgtctccactatatcttttatcgattggaaactttctatgccatgggttatttctttaaaaattatggatttttttttttttgtcatgttatcttgttcaacaacccatatgtttgaggtacatgtggtatatgtgtatgcaaatacttataaaaaaaaatgtgtatgcaaatacatatcagtattttctttaaaggtttgctcttgtttgctttttagtatatgtgtatgaattcattcggatgttgcaatattatgtcctgaaacggagggattttttcttaccttcctttgtctcttttattctgatgttgcttggatacttattattaagtacttggttaatcatgattttcttgcttttctatgataaaagaagagaatgtctatttgctttaagactttttttgtgatagtattctcatgtgtattccaatattcttag

SEQ ID NO: 98608 - DNA, 569 bp, Vitis vinifera
  Intron number 3 from transcript GSVIVT01025870001 (locus G SVIVG01025870001) derived from phytozome v7.0 (chr-ID chr8 ; pos 10969059 to 10969627 reverse strand)
gtgccactgctcttatttttctccagtgattgaaggttgagtgggcaagctgttaccatttgtttttgttgttcgctgattgttgaaagttgtagaagaatggtgtatctggatctccaagcgtacttgatcacagaacataatcaaaatatagaggctctaatacatacatgtcaaagatccctatttcttaaagattttgaaggagtaaatcattatgcagaatatattatgaagaggacagattaatatgttcctacatatttctgatgtcaaactgatttgtatcagtaatcaaaaaagatttagttttctggttgaaaaatcataacttggttttaggaggaacaagtacattcttttctatcttttccttgaatattttttcattgtgtgcatatcatctgcaggacttctttgacttattttgttccaaagaagtattagattatgtgggtgtcttagtacttactgaatcagagcgggaaaacactatgtttctattattgtgattagtgtttaatgcaattctaattttttctgtgttgtatgtgtttacagggggggaa

SEQ ID NO: 98609 - DNA, 701 bp, Vitis vinifera
  Intron number 1 from transcript GSVIVT01025870001 (locus G SVIVG01025870001) derived from phytozome v7.0 (chr-ID chr8 ; pos 10971310 to 10972010 reverse strand)
ttcttgatttcagtggcactagcttctgctatcaggtttttttttttttcttcttctttacttctctgttttgtggcttgctacttttgttttttttttttttttttcttttattatttttttggtgtggtgttgagatctgagtgaaggcagatcgagagggctgcgggagctggagtgagtcgtttttcggtgatttggtgttgaaattgtgagctgcggtgtttggttgctgagaatgtggcaggaaggagatgaattggagtttttattttttatttttttgagggaattgtggaaactgaaagtcttgtctgttgtttgaagttgagttttacattttctttgggaagtaaaaatgagggaaaaggttgtgtgtgtgtgtgtgtgtgtttgcagccaaatggagttataagtgttgcttttgtgaatttgaggggagaattttgtttgtagctcattatgttttttggttttaagatcagcaattgtctagacaaggcaaggcaatgcaatgctgagcatttgcaggagttgtgtttgaatctttgaattatttccatgttttttagaacaataaaactaggccagtattagagttgttttcaattttcaatacagttagatctgttaagagctaattatctcggtgctgaaaatttgttgctttttgactgattgcagagagactttgagctgta

SEQ ID NO: 98610 - DNA, 520 bp, Vitis vinifera
  Intron number 2 from transcript GSVIVT01020747001 (locus G SVIVG01020747001) derived from phytozome v7.0 (chr-ID chr1 2; pos 2386051 to 2386570)
gggtattttttctgttctctttcttttgtcatgattttcttgtctgtttgtttccatgacaatattttctgggaaaatgttgcgatcaagaatgactgtttaatgctggatttggtttctgagaaaatgtgggaagagtgaaaaaaagaaaaaaagaaaaaataatttgagttttagggtatttggatcctgagtcaactgttgcctagtccaactacttacatagatgaattgggttcttcattttttaggaaacagaaactgcataaaacattgaattcaaagtttgattgggatttgtattagttttcttaactaccaggcatagtgcaaacctcaatttttataatgcataatgtcttatgcatttctggttattttttctcaagaaagtttgttgtttgaaatgttttcagctgaaataaaacaaggagacaattagaatttcgaatttggttgtagtttcttggttattaagttgaatgattgactttttacatctaataataggtatcaattg

SEQ ID NO: 98611 - DNA, 576 bp, Vitis vinifera
  Intron number 1 from transcript GSVIVT01029087001 (locus G SVIVG01029087001) derived from phytozome v7.0 (chr-ID chr5 ; pos 12303327 to 12303902 reverse strand)
agattttgaactttttgccatagatcggcttcgaggtatatcattgcttgatatccgtttggttactgagaaaatctaggaactaaaaagaagttcaattttctatctgttaagtttctcgttgtttaaaactgagaaaagtgaggcaaatccatttcctctgtttattccgtatacaaccggcgcgttagggtttccatgttattttaactttcaggtcttgcacgaaaattgggagtttcattttcttttatctggatttcggttcgcgtttggttgccaagaaaatttaggaaaagaaatgaattcagaattttaaaaatgattctagacaaaagaagtctactaatatgagtctaatacaactttttgacttagcgtagttaattattttttttcattatttaaaaaggaaaagactaagattattacttttttatttacttattgctctattttttctaaatcgaagatgagaaccatcaggatttaatcttgggatttatattttaaggtgttttttttgggttaattggaggttattaatgtttaatgcagttcttaaagggatttctg

SEQ ID NO: 98612 - DNA, 605 bp, Vitis vinifera
  Intron number 1 from transcript GSVIVT01020602001 (locus G SVIVG01020602001) derived from phytozome v7.0 (chr-ID chr1 2; pos 3898650 to 3899254)
agaagaaagacgaggatctagtaagtttcacgcttttctctctgttttcctcagaaaactcgggaaatgaaatcgaaggattttatttagtagatattttattaatttttcggtgttggtttagtttctagatagtggagaacttacgtgagctaggtcaatgagttatatgggaattgaatttgtttgcctttggtttctgagaaaacttaggaatttgatggtttagctctaaaaatatagaaactgacctcaacgaagtaaaaatagttgtttttgtagacctaaatagctaaatgaggttggattttggtttccttctgtttgatgttgataaaaatggaagaaaggaaaatcaaaagttgaaatcttacgttttgttatttccgattcaaagcttgcatttacttgtcttaggctaaaatgagggaagtctttagtgttcttggcatctagcataatcaatagagatattctaagattcaggtgtttgtattttcctcaacttttcactttcctagctatcaaagaatgtgttaaaaccatagttttgtcgtaaggttctcatcttctgatatggctatttatttgtgtcttgcagtcag

SEQ ID NO: 98613 - DNA, 259 bp, Vitis vinifera
  Intron number 4 from transcript GSVIVT01025653001 (locus G SVIVG01025653001) derived from phytozome v7.0 (chr-ID chr8 ; pos 13287160 to 13287418 reverse strand)
attgtataatcacattggctttgggcagagctaaggtgtctctctctctctctctcactatctttttacctaatcaaagactaaaaattacgttagttttttctttcttgcttgaacattttatttttcttcttggttgaaaatcaaataacatattattagatctctcaagctttagaaatggtcaactttatgaagaatttcaaacataaaactaatgtaataatcagaagacaataattgaatttgtatgctgcag

SEQ ID NO: 98614 - DNA, 299 bp, Vitis vinifera
  Intron number 6 from transcript GSVIVT01023278001 (locus G SVIVG01023278001) derived from phytozome v7.0 (chr-ID chr1 2; pos 20216834 to 20217132 reverse strand)
aagtctcgtacactaccttcttcatcataagtgaggtgcagaacattctctgtttctatgactttagatttattcttaaagtatgctctgttaatcattttaattgtttcgggtttcttctttggttgcaacactctttccagtgttcttaagcaggtgtcccaagcagccctaaagatttgttttcttgtttagcattcttttgatatgcttatggaccttgagtttatttgtcaatggccatttctttgttaattcatgcaggtttttctaaaacaacttctgattactagctctta

SEQ ID NO: 98615 - DNA, 779 bp, Vitis vinifera
  Intron number 1 from transcript GSVIVT01023530001 (locus G SVIVG01023530001) derived from phytozome v7.0 (chr-ID chr1 4; pos 10186071 to 10186849)
gcctctttttcatcttcgcccgcttcgtttctcaggtaattcctacccgaaatctctcttttctgagaaaactggggttaagagggaaaatggaattctgaatcatttggcggctgttgaattaggctcagttgaatgggttttaactaatagtttcttttgttttcctaccgtttcttagcaaccaaacgaagtctttaagcatctcaagttccattttttggcctgtttaacatcatttgtttttcttcgaatttaatttgcttgtagtttattttcactttcttgttgcggttttttttttttctttttcttttttttttttttttttttgtaaattcgcgatatgacgtttagagataagcttaaattttatatgggtctttgtgttagatgaagggaatttcaaatttattagtactgctattgaagtttcagaaattttatgggcaatctttttatatgtttagcattatgagctatatatttaaaacaaatgaataaaaactcacattgagtaagcgctaaattgttatcccaattaatggaaacgtgaaattgtttcctcccctccccccctgaattctgacttttgtgctcaaaatctattctgtttggggtctaaattaaaaccaaattcatctgaattccggtagcatgatttttatctttacttgttactagaaaagaattttttttttttttttattagctgtggttgtgttttcgacaattaactatagcttcagggcactgcatttatcaggttttccagaact

SEQ ID NO: 98616 - DNA, 823 bp, Vitis vinifera
  Intron number 3 from transcript GSVIVT01028775001 (locus G SVIVG01028775001) derived from phytozome v7.0 (chr-ID chr1 6; pos 18971259 to 18972081)
ggaagctttgcgcctctcagtcaggaatttcttaagtgaaatatttaatggtactcatatccttcaaaatggctattgttctacttttagctactagttaatagctctaatatttagttctttgttgtcatttgtcacttgagcagttatgtttcaaatgcaataaccaataaacattaaaaatgatttttgttattgcatcagttgagattaatctgatttttttattaattaagtcattccatcagaaaaatagagataccgcttcagtttcatggttattgatttttttctttaaccttaaaatggtcctggtaaatgtaataggtggaggttattgtctcagtaatcttttttatttttaacatttttccaaatattttatttggcctcttcacgtttactcttttaaattcgaaaggagaatagtttatctaagtagttcaacaattatggtcaagaatattttccttgcaccagtttgtatgtcataaatttgttagttcatgggttttattcaagaatttttttttcttttcatttttttctggcaacatctaaaggagtatattgttaaagctgacatgcatgacgggtgaccatcaggatcaaagtcttcatctcatatcaattaacttcaccggggggagttgggaatcccttgtagttttatatctttatgatttgctttctccaattattttagatgacaacatatagttggatggcttgcttttttattttctttcttgcagtaaattaatattgttactgaatctacaccaaagaggtgtccttaacttatccacgcatccctgctctg

SEQ ID NO: 98617 - DNA, 363 bp, Vitis vinifera
  Intron number 2 from transcript GSVIVT01021334001 (locus G SVIVG01021334001) derived from phytozome v7.0 (chr-ID chr1 0; pos 4182604 to 4182966)
gggtttctttcaggtttctctcaaaatcaataatctttaatcacttttctttaagttcttgaactcttagaggctgttttgttgtgcatgaagtctggtttccatgtgtccaggcaaatgaagaggacgatgtatggggcgactgacaaaattattcagaaattaataatttagcatatatgatgtccaatacaaatttgtataaagtagacctagggttcgtgcaaacagatccctataatccatttgactttgcatgacataaatatagatattaaagtaaatccaatatgaaaaaaataataataaataacaatatacagaaactaacatgtgtgttcatgattgcgcagttggtgaacc

SEQ ID NO: 98618 - DNA, 390 bp, Vitis vinifera
  Intron number 1 from transcript GSVIVT01029697001 (locus G SVIVG01029697001) derived from phytozome v7.0 (chr-ID chr1 2; pos 13309637 to 13310026)
cataggttccacaacctcgacctttttcagcaagggtaaaacatcttcattgcttttgcttttgttctaaaacggctccttttcttttagtgtttttatttattttttaaatgagataggatttcaggtgatttcttgttgtttttgctatgaatttcaaaacccaactcatttttaatgggttttgggtttttgggttgatccattgttgttttttttgccatgatttttgaaaacccaacttttctttgtattcaattcttttgcgtgggtttgaattttgggtgaatttttcatcattgttgctgttggaaatctagcttctttttgttcctttctttttaatgggcttagttttttattgtttgtttattttcttttccataatag

SEQ ID NO: 98619 - DNA, 739 bp, Vitis vinifera
  Intron number 1 from transcript GSVIVT01021541001 (locus G SVIVG01021541001) derived from phytozome v7.0 (chr-ID chr1 0; pos 6828593 to 6829331)
atcggtcaggtattattcttagttccaattttttccctccgatacatgtggggaatttttgtttggttgctgattttttctgtttaaactccgtttgtttctcacgaaaacctttgcctgagaaaaaaacaataaaaagaccaattattaggcaagtaatggctgattagtcctgtgattgattaatttggaaaatcgaaagaagttccaataattataaacaattagacaattgacttatttttccttttggcgcatacaattttttatcattttcttatttgttgcttctcataacctttgattgggtccaagaaagccaaggaaaaaagacgggaggagattagatgattcaaattttatttagttttgttttctactatatcaggaggttctactgggcagacagttgtccttgggttattattttgtaaactagaacaacaggaaatttgagggttgatttttcttccctttttatttcttcagcttctcggtaatcaaaggaacatttgagttaattaaccagttgtcctgtttttactgcgtaatgtgaactttgtttgtattcacttgatgattcaaaagttttgttatgctctgttgccttattgttatttatgcaaatgtcattcttgctcacactttcaaaaatgattttgattgtgagtgtgaattctttttttctttaatatgtgcttgcgtttgttcattgcagattaaaagggaaatttcaacc

SEQ ID NO: 98620 - DNA, 803 bp, Vitis vinifera
  Intron number 2 from transcript GSVIVT01020705001 (locus G SVIVG01020705001) derived from phytozome v7.0 (chr-ID chr1 2; pos 2971647 to 2972449 reverse strand)
gggaagatctcaaagaaacggtactgagttcatatctctttctgttttcttataagggtttgttttcaatttgggtgattgattgagtcatgtattaaaatttagtgggtatcttgaaaatttataggaaacctatttcaattttcctttttgtgaaatttctttggtttttagctgttttgtgagctcatatgtgttaatttgaattggtccttgactagttcatggcaatcctgcattaccatgtagtttttagctgtagtttcttccaatttttgttgttttcctgtagattttgaatcccagattctcatttccaactttgatttaagttcttttcttgggtgaaataaaataacctgattgaagagtaattgccaaaactgctacggatgctatatccagtgtaagcatctggataatctggagtgcaattgttaggtgagaaagcagggaactctagttttcaactatttgatatggttcagaacaggttcccaatttttggaagcagaaatcatgtaagatatgaaacctgaaatttcaattttattttttattttttatttctcagttctctaaatggtctttggattggatgtgtttcatggttgagtgaagaaaagcaattgaatttcactatgtcaagtttcacacataagttactattattgttttgattcatgaattgaatcaatgaagagctagagaaagtgaggcattttctgcaagaggtttctgacagcgagaagagtgacttatttatttgttattatccaacatgcattaggttcaagagtgtt

SEQ ID NO: 98621 - DNA, 702 bp, Vitis vinifera
  Intron number 1 from transcript GSVIVT01021668001 (locus G SVIVG01021668001) derived from phytozome v7.0 (chr-ID chr1 0; pos 8998375 to 8999076)
gattctattcatcaacctcctcaacccactttgaggtcagtatctttttcttccttttttttttgttctttttccttccttgcttatatttggatgttttttgctctgcaacaacacaagcaagctttactaggctaattatcagttgggtatctgagaaaattgatgggctagttttgttttctgctttttttttttttaacttttatttatttatttattttttgtgtgctgtttggctgctaagaaattagcagctgattctgtttgattgataagaaattgtcagtttatagtgtttggtttctaagaaactgtgggttccaactgtttggtccccaactaggtgatggcattcagggaaagaggaagtgcagttagccttgttaactttccctgaggctattataatttctatcatttcaggtattaaaatcacataatcaaggtcttttttttttttttctaattgggtatgttatgaaactgatggttactttcttcggttttctgtttttcccctttctttggtaaatggatttggtctgtgtccaaacaatggatactcttgcttcatgtcttctctcaatgtaattaattagaaaatgttgtgtttttcttttcttttctcctttgtgttttcttttcatcactttctttaggggtttgtttatacatttcaattcattgatgtgccacaga

SEQ ID NO: 98622 - DNA, 1059 bp, Vitis vinifera
  Intron number 1 from transcript GSVIVT01019535001 (locus G SVIVG01019535001) derived from phytozome v7.0 (chr-ID chr2 ; pos 1420898 to 1421956)
tatcaagtttcctcagaggcaccgcaaaccctccggttggtacagtttctcgcaatcttcaatgttattttggggcttttttcatctttcattaatgatttctttttcttttttccatttccataaatttctttattagattgtcaattctccatatatttgttttgggttggttatgtgaattttagcccaagatagttcaatttggaaaagcttgtaagttgtctggtaatgagaactgttttctgttttatttgggaaaaaaagaaaaaagaaagatatttggcacaggaaaactgaaatgttataagaaaatatgtttggcaagacattttcccaagaaaaaaaaaaatctgaaaatgaataattctgagaaaaaggctaaaatgttgtcgggtgctttagaaatgcaagtaatttgaaaaatgaggatgtttataggttggttttttttttttttttttttttctaatgtttggttatttggaaagataggggaaaaaaagagggaaaagatgcaatataaaatttattttaaataaatatcaaaataaaaaatatttttcatttaatggtatatgatatattattccttttatcaaatacaaatcaactacataatgtattatctctgaaatgatatccttgttcccatccaattgcatatcatatcagggtatacatttccaatcccatctaaccaaccaaacaatcaaatgtttgtctaaataaaaataaagaaacgtaggaaaaagcctattttttaataatttaatttttttttcccctcaaattttccatagacaatcaataatagaaaatttttatagattttcattacctttttcctttcttagtatttttctttcattttctttcccaagaataatttttattttgtcctcaatcaggagcttgaattcaatgccccatgattattgcaaattgggtctgcattgtgtgaaactgtgaagtgattttatgtgatcattgcagtttgagtgttaaggtgattgctttgcaggttctgcatctgcatcccaggcagtgtctgcagat

SEQ ID NO: 98623 - DNA, 881 bp, Vitis vinifera
  Intron number 1 from transcript GSVIVT01024485001 (locus G SVIVG01024485001) derived from phytozome v7.0 (chr-ID chr1 6; pos 3180186 to 3181066 reverse strand)
attcggaccctaactccaaggttagggtttttgtttttatcccgcttcaaatgtgtttcttctttatcgaaatattggtggtatttgtatgacattgaagatgcggaagggttttggttgctaatttgttgcttgaaattttgggaagaggaggatgagctgaactctgttatatatttttttttcttgattttaatgttcttgatattttctatgtcattgaagatttgtgagggtttgatttgttgatttcttttaatagaatttttccaggaagaggctggcccttagcctcacttcccttctagggttttatttatttatttatttattattattattattaaagacatggaagggttttttgatttgttaattgttacttaattttttgtggttgtttatcattttatgtttcaacttttcttaacaaattatggctggtatttgtgaaatattgaagatttttgggggtttgttttgttagttattgtttgaaaccctaactctgatgtcctctccgttgtttttatgcggttacttttgcttgaaaattgtacaagaaaatattgtggatatttttagaacgttgaaagtatgaaagggttttagtttgtgacttgttcttgaactttttccttttttacaaaagaggctgaccctaactctaaagtccttttgtttgataatttttgcttgaatttttttaacgaaatgctgattttgtcttattctatcttttgtttttattttttcccctgattgttgcttcaaaatttcatgagtaattgttgtttaagaattgtttggttgttggtaagtttttattttctaaatgttgctttacatttttttggtgggttttatagaacattgaggat

SEQ ID NO: 98624 - DNA, 988 bp, Vitis vinifera
  Intron number 1 from transcript GSVIVT01019554001 (locus G SVIVG01019554001) derived from phytozome v7.0 (chr-ID chr2 ; pos 1577771 to 1578758 reverse strand)
caattcccagccaaaagtgaaatgccagagtacctgaaaatattttttaaatccattaggcaggtcaagagtcaccatagaacatggttgcatatcctccctagagattggtttacaaccagaaaaatgttaagtttgactggcttttcttgttaaaaagcagtgtttcaagagaactttcctttcaaaggtaagctctttgtatggaataattccctctctagcatcctcccatcaaagaagaaagcaccagattccagactcaaatggacaataatcctcagttctaaaggaatttgttgtcatctttcatcaggatttatcaggccaagaagaagccccatccattgttggtggaaatggacaacacgctttgcttgtagaactacacttataggtgatatcaagttttgatacttatgggaaagaatagcatccccacagctttgatcctttgttccacccattgggtttggtagcatactagcatcatgcctgaattcaaactgaaactactttaaatccgtaaagatctaatatactatgagttcttcatgatcctctaaatccaaaatgggagtgagtacagttaactttcatattaaaagattactttcatttataacaaactctacaagagagaatgctcttcaaagggtccaaaacctcggtttaacagggaaaaaaagcaagaaaagaaagaaaatcaatcaaacccaaacaaacaaaatgttgaattcgaccgtgccagtctctattacaaataggttattcattgaagatagaaagcttagtggtaaatctaaagattctctgggaaaaaagtaactctcaggaatcctctttttgggcagccaacttcactattaaccctttcctttttaaatgactcaatttggtttagattcatacaaccctagtacaaatatatatatataaaggaaaaccataggattaagttactaacatatatagaaaagtgttcttg

SEQ ID NO: 98625 - DNA, 371 bp, Vitis vinifera
  Intron number 3 from transcript GSVIVT01020254001 (locus G SVIVG01020254001) derived from phytozome v7.0 (chr-ID chr1 9; pos 22215243 to 22215613)
tccttgaacacagcaacctgaaggatctcatcgttgtatgcttctctctcacaattttcccttaacttttatgctcctgtttgttgcaaaaaaaaatagaagaatgagaataaacctaaatattcaattctcaattttttcagaattttcattaattggaactcgagaaaacaaaagcctcaacttaatttaggttaagactacaactttgtttactttttagaatttgttctcatttttctcaacaaccaaagagaagattactttgatagatttttttttttatctgtggatggatatttggatggactgcaaattagggtgttcttgatatgctttagatgctgccatgtaggttgttgaagggcagg

SEQ ID NO: 98626 - DNA, 375 bp, Vitis vinifera
  Intron number 2 from transcript GSVIVT01026833001 (locus G SVIVG01026833001) derived from phytozome v7.0 (chr-ID chr1 5; pos 20113448 to 20113822 reverse strand)
tcatcaaaacccagtttgggaagcttgatatcttggtaagattgaaaccctgatcatttcttgatgattttttttttccatcttttttgttttattggttcttcttctggcaattcatttagaacattgcattcgtaacctatatgattgagtgatgtttattttgattctctcccgtatcaactatcctcctcacatccacgaaaacagtacctaagaagaattttagctgtgaattccggtactttagattgtgctcatctatatatatatatatatatatatgttttgtgagatggatttcccaatgaattccccaatgattcctgaaaattttggagctgaataattcttgggatactggacaggtgaaca

SEQ ID NO: 98627 - DNA, 536 bp, Vitis vinifera
  Intron number 1 from transcript GSVIVT01020864001 (locus G SVIVG01020864001) derived from phytozome v7.0 (chr-ID chr1 2; pos 879561 to 880096)
aaaattctaagaaagcgtaggtttttttggggttcttctttgtaggtgttgattcatggtaaagatcacatgatttcaaggaatatattagtatatataagactttctctcatggtagactttcaaagtctttgaataactgacatttttcttttatttccttttttttttttttttttgcaacattttcccttgaattcctttctttcagctcatggtattcgactttctccagcttcacggacaaaagaaattaaaggatttttgtttcatcattccctttttctttcttgtcgactttctgatccagtaaattctttcttttctggtagttgaatgcaataccagtttgtgggatcaacaaagaaaacggcatacaaattcaaccctatgtagctgatttatcatttttcaagcattctacatacccaccaaggaaattttggtttatatctctgtgctgcacacatatactgacatttttttttgataatgtttcaggaataaatcgaagaagaaaggagagaaacggccaa

SEQ ID NO: 98628 - DNA, 344 bp, Vitis vinifera
  Intron number 1 from transcript GSVIVT01022494001 (locus G SVIVG01022494001) derived from phytozome v7.0 (chr-ID chr8 ; pos 3904094 to 3904437 reverse strand)
gtgctgtatgtgctattaactcttctctgttttctgtttggttctcgggaaagactgatagtaaaagaaaaaagtgcttgctctaaagcaatttatttttctcgctttcatacgaatcttacattttcagttgctttgattgattcatcattttaaaatgtttaggattgcgttttttttcctttggttcctatataaacactaaatttcccttgtttatgctttaatccaaaatggttggtctaggatttgtgtcagcttgctgggtatggatatttagaaatgatcgagctttagtcttttaatattatgttcacacgttacaacatcgtttttataggtta

SEQ ID NO: 98629 - DNA, 1008 bp, Vitis vinifera
  Intron number 1 from transcript GSVIVT01027050001 (locus G SVIVG01027050001) derived from phytozome v7.0 (chr-ID chr1 5; pos 18356974 to 18357981)
gcaaagaaggcattctagaggatttcgctactcaggttctgatttcaccttttagcctctgtttagttgctgagaaaagagaaggaaagaagatggaatagtgtttttggattgtactttttgtctgcagtatggtgaggaaatgggcgttggatatctaaattttgaaatatggtttctctcactgttcttcattttctcggcaaccgaagagagctcctttttttttggcttagatcttttcattttgacgaatttccttccctaaactgctacaatttcgagacgattatgagtctgaacttgtattattgctacgcctacgccaacttttcccttagttattgtgctattgcttggttagacttgttgattatatatattgataggaaaggggatgctagcttgattgacagtacttactgtgttatgctaatatataggctacaatgttacattgggttctaatatataatttttggtcgatgcagttcaaatatatttctgtgtacttttctcgaatttattttactataatttttttttttttgtttgaaatctgaacattcaaaacaaaatgcttttctgagagctttactacttgaagtaagcatctccacaagaaagaaaaaacaagaagaggctcataggatgatttaaattaggcatcatgctggagagattacaaattgaatgatattattattctttgtccagattccccaccacgatttgtgaggcaggggcactgttgcagttaattgaattgtggtgatcattgtttttacaatgaaaggaaaaattggcaggccatttcaattaggacgagtcttcgggatgtatagcattcctcttacaaatcataaaaataaagttcactaagaacttttacaacctaattgagcttggtatctagaagtattttgtcagcattacctgtaatactatttatgaatgaattcttcatgtttgttgaaattgaaattctgcagggtggtgacaggaagg

SEQ ID NO: 98630 - DNA, 1015 bp, Vitis vinifera
  Intron number 1 from transcript GSVIVT01025341001 (locus G SVIVG01025341001) derived from phytozome v7.0 (chr-ID chr6 ; pos 1791235 to 1792249)
ccttttagagcttgttagtgcagagcttgatcctcgtaagtattttgtcatttaacttatcaattttgtatatgaaatcgagtaaaactgaactgctgcagttttctgcagtgaccatccaattgcaggccttgtttggttgcggtgttgtcactttctttttttttctttttttaaatcagtcaagaagataaaattttaagcagaatggagaaaaaaaaaaaaaggtgcattacagaggctaataatgcaagggaggatttgagtcttcctgaccatgtgtttaattaccctaatgttttgtttgtttgctgagaaaataaagtagaacacccaaaaaaatatctgaatttttttatttcctacactttctcgtcttgaattttaaaattgggtgaatcatgaaaccatacatcaaccccccacccaaaaaaaaaagtaagtttttaaaactttgtttttgacttttcaattcaagtgcaaaataggaaaaaaaattacccaacccaccgtccgcctctccctccccatcgaaaccggccgagaccttgccggcgtcagcaccggccgccactcacagccctctccggccggcagcctcccctctctctctctctctctccctttcccctccctctttctttccctttcctttccttctttctctctcttcccttccctttccacatcaccacagccaccaatgccagcgacccactgctgttgcccagtcggagagagccgtgcgctctcggcgatgacgccggcaaggtggcggcagatttgggtcgggagggagaggcaggagggtaattttggaaaaaaaaatagaattactgtcttaagtgtacgaaagggcttttttttttttccattttacgtttaaattgaaaagtcaaaaacaaagttgcagaaacttgctcgtaaattttaaacttgatccatggagcactgatattttcattaatgattttgcaaagagacgggatcacagaagaagccaattaacgcgaat

SEQ ID NO: 98631 - DNA, 732 bp, Vitis vinifera
  Intron number 1 from transcript GSVIVT01025346001 (locus G SVIVG01025346001) derived from phytozome v7.0 (chr-ID chr6 ; pos 1670961 to 1671692)
tctgccagttattatttaagttgatgtatgcagttgatgttaggcacttagctcttccttgttgaagaaaattgtccttggtcactgatactgccaaaaataaacacctttgaaacgcatgctattcaaaatacattcaaccataatcaagcacctaaaacacctttatgtaaaagaagcacttaggattaaggtcttccataagagatgaccttcaatcagcaccagctggctttccactttttggccgctaatggccaaagtcaacaatggcagcagaaggttagctggatacccccataggaaaactctctaaaccctgaagcccatttctttattaagaaacctcctttgaatcctttgaatctagaaatggtggaaccaaaattttcaattattcctgaagatttttgagcatcttcagtcaccatggctgttgcactgccttttgctctttccctcatgctattgtctctgctgccatatcacacccatgctcaaacttacagcaatgtgactctggggtcatccctcactgcagagggcaacaattctttttgggcttcaccatctgatgaatttgctttcgggttccaacagatcagaaatgaaggtttcttgctggctatttggttcaacaaaatacctgaaaagacaatagtctggtcggccaatggcaataatctagtgcaaagaggatccagagttgaactcgccactggtggccagttt

SEQ ID NO: 98632 - DNA, 825 bp, Vitis vinifera
  Intron number 2 from transcript GSVIVT01020552001 (locus G SVIVG01020552001) derived from phytozome v7.0 (chr-ID chr1 2; pos 4452878 to 4453702 reverse strand)
caccttgtgtttcgcctcctccggctcctgtggcagtgaagcggcggcgttttgtggtggatgacgatgaggaagatgatgaagaggagttggtgcggcggaagctggcgaggaagcttggggatgattttgataaggtagccccggagaacgtgaaagggaaagggttaattagtgctgattcggccaaaactgggggaggtccagtgaattcggtggcgaggcggactcgaagccggaggtccgaggagcacaactctaacgacggtgttatggaggtggttgaacaggcgagaaggtcaagccctaggggtaagaaattgaagggagacgagagtaaaggcagtggagagaaaaagggttctcctaccagtgggatcagttcatcacccagaacttcacctaggctatcaaagcgaaaatcgagctagttgtgacctctgataaccagttttcttctttattctatcatctttaatgatcttaaacagaatgagtacagggtcctgtttgtgtttacattttgaagtttgtttctagatcttctaagaagcacccatgtgagaaaatggaagtttgagacacaatcagctttcatgggaattcaaactttaattttccccagatcctcttgttgcttttctctgctctgtttggttgctaagaaaacgtgtaaacagaaaaacaaattcaaattctggtttctgtactaataaacacttgcttcccaaataatgataataagaaaaagtaccagtaactaatgaattgatggtccaattataggtagtaggatagccgagagctccattacaatcattttga

SEQ ID NO: 98633 - DNA, 984 bp, Vitis vinifera
  Intron number 1 from transcript GSVIVT01018930001 (locus G SVIVG01018930001) derived from phytozome v7.0 (chr-ID chr4 ; pos 18563660 to 18564643)
caaatcaaagctctacttcacgcgagtggttctctgtgagtttcccttatcccttttccatggtttctaacagtttcgccgtcgtttggttgatgagaaaatggaggaaaaactgcaggaaaacccaatatttttacacccgtttctcatcaaccaagcggggcgttacttgtcttacggactttatttcatctcaatacggactttaatgggtttgatctatcctttatgaaacggcattgatgatatatttatgactttgttgactgcgggtgcgaattggttgttttaattctcgtatttttatgattttcatgtctgtgtctcgttctggatggttaaattcgaataaaattgttgtcgtttgggttttcactactatcccagttcatccatgcttggtgattgcggacagatttcatggaacatatgattgtcatcagtatcatgatcttgataactcctaaattttaattatgggtttgtatcaggaatatgattttttttctttactgattgccttttccaaatctgtttgtaactgtaataaaattgttgtcgtttgggttttcactactatcccagttcatccatgcttggtgattgcggacagatttcatggaacatatgattgtcatcagtatcatgatcttgataactcctaaattttaattatgggtttgtatcaggaatatgattttttttctttactgattgccttttccaaatctgtttgtaactgtactgctgtgtgtccttttgccctagagttgtaattgtgcaaactctctctgtgatggaaggtaattggtttcggttttgtttccatctgcaattttttggcaggatgtgacttctctcctttttccctgtgttctataattcattcctttgattttgaaattatattatttggttagaaaatttgggtgtatgattattgattacattcttcacttctatttagttgttgtgaaggaagaa

SEQ ID NO: 98634 - DNA, 531 bp, Vitis vinifera
  Intron number 2 from transcript GSVIVT01028303001 (locus G SVIVG01028303001) derived from phytozome v7.0 (chr-ID chr7 ; pos 5916363 to 5916893 reverse strand)
cccgaaaattgagtgtttaaccgataggtatttggttttgcattgtggattgagttaatggttcatgttatttcttgtttagtagatgaaaaaattgaggaaaagaagatacaggaatgaatttttttgggtttttttttataaatagaggatatagcagattgtgggttaaatttatgctttttagttgtatgttttgtttttatttaaaactgagtatatagcagatggtacttggttttgtttttggttctgattaaagattggaatctgggttttctacaattcgctgtttggttcatgaaaaaaatgatgataagggaggataacaagatgaaaatggggtcttattcttctgttggttttgatttcataaaattagactcagttaggttttcgtttggagtcaaactattttttttcctgctagtcgaatgaagcatttatattcaggtatttgtactgttgcggcctggagattgatcactgtaatttctctcttttttgttatgatttttaggaggttctcac

SEQ ID NO: 98635 - DNA, 466 bp, Vitis vinifera
  Intron number 1 from transcript GSVIVT01023861001 (locus G SVIVG01023861001) derived from phytozome v7.0 (chr-ID chr3 ; pos 2920626 to 2921091 reverse strand)
atagaagagtttgttcttgtcatttttcttcttcttgttttgttatactacaattattatttgaaatgacttagaaaatttgaggtgggcttggaaagatagaagagtcttgcttgactactgggtcaccttttagttcagaatttccctgctgacaatctctgggaaatcaggttaatgggttagaattgctgattattcagccagctcaggcagagattaatcctaaatgggtttccattcttagtcatgagtctctagttttttttttttgttttttttaatctctttatctccatcttggttgaatataggtcattgggtgcaaaaacttcttccttggcttaactggaactgagtttagatttcaatatccaagtgaagggttccaagatcatatggttttatgttaaggatagtaggtaacatacaactatttcttgtgattccaggccttcacagcagc

SEQ ID NO: 98636 - DNA, 762 bp, Vitis vinifera
  Intron number 1 from transcript GSVIVT01022453001 (locus G SVIVG01022453001) derived from phytozome v7.0 (chr-ID chr8 ; pos 3207940 to 3208701)
tacttttgtcaaaataaggttgaaaaaggatgaaatgttagatttctaaaattggatttccaatgatcctcttaatcaaattgcccaaaaaaaaaataattaaattttgtttttttaatgggtgaagatataaatccaaaaaaaaaaaatcaattcaaaaacacttttacactattagcaataataataataataataataataataataattaataaatatagaacaataaaaataatagtgcaagacgtatatctccttttatcctcactcttttgtatttttgttaatcaaaccatgcatacacatgaatagaaaaaaaaaaaaaacataaaattttcgatgtgatccctatatttacagagtgcatgaatacttaatcaaagaaaagaggagtacaatgatgaagttctaaaacaaacttgtcatactactttttgtgctttgaagccaattatatatatatatatatatatatatataaatcaaaaagtataattcatatatattttttcattattagaaataataataattaataaatatagaaccacctagatctcccttcatcctctcttttttgtatttttacttcttactcttcctttttctttttcattctttattctttaaccaatctctagaaaaagctttatcactagggagagctttatctttccaagcttttagtgtatctggaacaaaagaagaaatcatctctctttagtccttagtcttgaagtcagcacagggcaaagaata

SEQ ID NO: 98637 - DNA, 676 bp, Vitis vinifera
  Intron number 1 from transcript GSVIVT01023021001 (locus G SVIVG01023021001) derived from phytozome v7.0 (chr-ID chr1 2; pos 16824422 to 16825097 reverse strand)
cttgatttggtggaggagctcacgccctggttcaggtctgtgttttggattggacattttgtgttcctaaattgtgtattgatctgtttggttgctgagaaattgtcagaagagtgcatgaactaataccttgtttggcagctaatttttcagtcaaaaaggtttaaggaattgggactgaagagaatttaaatagaggggcatttgtattgcatgttttgcttttcaatgttattgacaaaatgtgggtaaaatgggaaaccaagataatcctccaaattctgaatttgggtgggattcaagcttttatgatttcatttgcttccggacaatgcagataaaaaatttccctccagattcctcagtattgggacttgggaaaaccaaatcattttcgattgagccaaatgtaagtatttggtttagcttaggcgagcttttcatttatcacacctagaattacataaaatattagagttagttttttatgttatgcttcccagcagctttctgggcaaccaaacagaaggtatctgtgtaagagtagttccatattacatttcagtgttttctagttgaaccattgtctgcagaacctggttgagcatatttgaactaagttaagttagattatttattgatttattcttttaatttgaatcttttagggttttag

SEQ ID NO: 98638 - DNA, 768 bp, Vitis vinifera
  Intron number 1 from transcript GSVIVT01030239001 (locus G SVIVG01030239001) derived from phytozome v7.0 (chr-ID chr8 ; pos 10026283 to 10027050 reverse strand)
aaaagctgccaattccttcaaactcgcaaaatcatgtaattttcttttctcagttgtttaatggttgtgtattatgtgtgatttaatataattttgaattgattgcttattcattttgcacactatctgatattgttgatttagggtttagttccgtttaattttgttcaaaatgttattttctcgagttttttttggcaatctaggagaggtttaagggaatttggaaggatcgggttccattccatactggataggaactgatgagcagacagtggaatttttatgaagtgaggaggtcatcagaaagtatttaactgaaattaccttaaattttctgcttgattctagagaattttagagaaaagatgtcttgggccttgaaagttaaaaactaccagtccagtctctacctattttaagattccatggtctcattgatttccttacatctttcttggtgaccaacagaataggaagataacaattcatcatcggttttgaatggtgatctaattttctttaattttttattttgatgtacgtatgggcatttactttattccatctttgaatttttctacattgcttgtttgatttcaatgcctatatttcctttggaaacagttgacagccacttcaaagaaattttaaccttcaaaaggaagaaaaagtatttctgaaatcctcaccaatgatgctttagttaataggtctctctgtttttattcaggggataaagctggttctattaacatcaaattggct

SEQ ID NO: 98639 - DNA, 589 bp, Vitis vinifera
  Intron number 4 from transcript GSVIVT01023012001 (locus G SVIVG01023012001) derived from phytozome v7.0 (chr-ID chr1 2; pos 16910281 to 16910869 reverse strand)
caatagacgggtctttagttgcaagtgagatttgaagacttgaactcttttcaggaatgcttcttaaggcactacaataaatttcacattttgctaccataattttaggcataaacaaatttttatggaaaaaagaagatttttgtaacaaattttatttttatgacaaaaaggatttcttttaaagatgaagcttctattcgtaataaaatatgatatttagccacatcatatatttgtgtcaaataatatgataacaaaatatacatataggagaaagcttgccaaagaactgcataaatgtgatggtgactgcaatagaatgaacaattctaggctctgtaaaaataaaaaaaatactatacactgcaccaatttgaattgtagtgataaatttgtagttgttttttctcattgtttaccagattgatgttcttgccatgtctatgtgtgatacttcttccaatctgttcttgacacatggtatgtttcgattcttgtccagttttctgtaagcatgggatgcttatctgcttcaccatttttcattttaggtttgaggtagccagcttgtagggcacaaatctga

SEQ ID NO: 98640 - DNA, 626 bp, Vitis vinifera
  Intron number 2 from transcript GSVIVT01023012001 (locus G SVIVG01023012001) derived from phytozome v7.0 (chr-ID chr1 2; pos 16911214 to 16911839 reverse strand)
cgacactctctgaaagactcgaagtagctctccaggtataataagagacttgtcttcttgatattacttggtacattattaacattttccatcacgtaaaacctttcttgactttgtgctccctctggtaaaaaacaattaaaaatacaacattttctgtttttaaaagaaaataattgttttccagttattgaacatatatttttgttttgttgttttgatgaataacaactttcaaaaatagttatcaaacaaggccttaactttttaaccctcaaattgcaattattttaatcatatatgcattggtttgcaggttatttgggaacagatacctgcaacaatgtcttattttttccaaaaagcaatgggtatgtcatttttattcttgtttcttcttgtagagtgacggagtgggtgtttctattttcgcatgcactaaatttaattcaagtaaataaaaaattgaacctacctctcaagacctctcaacatttattaatgggtcttatcaaaacttaacactctgcattatgttgtgattttgcttccttcaatattaaataaacctctgtttctttttcaaaacaggagcagctcggagaacttcttagaagaaacaaagt

SEQ ID NO: 98641 - DNA, 798 bp, Vitis vinifera
  Intron number 1 from transcript GSVIVT01028234001 (locus G SVIVG01028234001) derived from phytozome v7.0 (chr-ID chr7 ; pos 4820027 to 4820824)
gaacttcgacagccagaaatgtatgcaaattattgccactcagaatatgtgttcagtataaggtttaggatgttgttgaatattacatggcaatggtaattctatattttcttccatagccttcagatgagtctgatcagcatagtaaaatctactttgttgcatatatcctatcacatcttgtgtttagcccttttcctttctgtccttgttatttacctatttatattcattcccaccaatgaagttatgtcttgtgttggggcctttttaggatatcatcaataatgcgatactgaaccttatcactatcacaattattataatgaatatttgggttttgatggaaaaaaacaacaacaatatttttggtgccaatttgaatacagtagtttgaaaccatcaggttgggggaaggaggattatgaagaaaaagatgaagtgcacaatagaatgttgaaattttgatactttgcattctgataatgatggcagttatcatgtttcctatctgtgatatacatttcatacaaatatacgtatgtaggtacatacataaaatcatatatgtatgaatacatacgtaggtacacatgcagatataagctgtttctcaagggcaagaagcttattctatttttgtgaagtgtgggagttttgttgctgaaatctctctgtatgcacactatttcaagttatggctttcattatctaataataattcataatttattactttttttttcttttttctttctggtagggataacgaaagtcggcaatttctttcaagaaaag

SEQ ID NO: 98642 - DNA, 894 bp, Vitis vinifera
  Intron number 1 from transcript GSVIVT01024398001 (locus G SVIVG01024398001) derived from phytozome v7.0 (chr-ID chr1 6; pos 2093909 to 2094802)
gtccgatctttgctgatttaggtaaattccgatctaaccggagatgggtttctttatttttctgttttcggtctgtttggctgctgagaaagtagaagatgatgggaaggaaagatatagaagtgggttttttgtttttatttttgtagtttgatggttttttgggaagtgaaattgtttggttaactgtgtctctttgtttctctccgctgagatttacagaccattttgaacttcttagatcccaaaaaatctgccttcttcttctttggacaaagtctggtttttgtgcgtttaggtaaaatttgaccttgctggagatgggtttcttttttttttttttttggctctataggggtgctgagaaaatgaaggaaaatggaaaggaacaaaaaaaatttgaaatgggtttttcttagtgtagcaatgtgggttttcaggaactagaagtgtttactgaactgcttcttagtaccttttgttttcctcgggcttcttggcaaccaacggtgaatttatagatccaagttggtgtgttggtttttcaagtttgatcttacttaaaagtaactcttttggttgctgagaaaatgtgagaaaacggaaggaatttgaagatttgggtcttggtgttctgggatccagagaaatcagaacctcccttgagtagccttaggtgttctcagtgtgtgtagacattcaacactaaactttcttttcttttcttttctgttctgcagtttctcagtaaccaaacagagggtggggttaagaaatgcattgatgctttcaattttggaaaatctcatgatttggtgatgaaggactgaatttgattaatttctttcttgaatttcaggattcgtgatacctagatctttggtagtattcaat

SEQ ID NO: 98643 - DNA, 1045 bp, Vitis vinifera
  Intron number 1 from transcript GSVIVT01019470001 (locus G SVIVG01019470001) derived from phytozome v7.0 (chr-ID chr2 ; pos 894621 to 895665)
aaagcaaaagaagacgtgaacaggatccaggtaacttgtgcaaaaccccacatttctctgtttgattgttgagaaaaatgctgaaaaataaatgaaagccttcgatctaattagaagtaggggatggagtggtagttttaacattgcaaatcttctttttcttttaccacgagtctcagtaaccaaacacaacccactgagattcattgaccaaacacactaacaacctgactaggtctgttctctcgagctgaaaggatgaacgcaaaaaaacataaaccacaagatcaaacaccaaccttaggatacgttggactatgatgtcaaaccaaatcagatttttttatttaagctttctgggaaggggactcttataatgatatagtagaaaagcttgcagaaatgaataaagttgaatggaatgaacttgttccttttctttcagtcctagcttgcacctttccaggttccacattaaaagctaagtaccccataatagaatcaattcaaggaaaagaaagaagcaagtcagacctcgcagaagataacgccagtgtggtttttcaatcatgcacacaatatccaaataatgaaaccttgatgctaacagacagctaaaatttcaatccaaattccaaatattgaacaaagacttgagcattcaaggtagaaaaccagagcccagaagaggaaaatagtagaaaattaatgctcacaatgcactgagtcagcccgcccaaaagaaaaagaagcatcagatcaatgacccaagaattcgaagcaattaatgaagaaacaaacagaaagatggaaccgcttcagagagtagaaaccatcttgtaccaattatagaaaacacagaacatgtgggtggagaaaatatcatgctgaagaagagctacaaaatccatataggtaaaaaccagcatgggccatccagaatctcaacatgcctcatctaatcattcttttttttttttttgtttcttttcattttttaatgagcataggtcattcagaatctcactccgtggctccgcctcat

SEQ ID NO: 98644 - DNA, 774 bp, Vitis vinifera
  Intron number 1 from transcript GSVIVT01027147001 (locus G SVIVG01027147001) derived from phytozome v7.0 (chr-ID chr1 5; pos 17424042 to 17424815)
acgcgttgccggctatcgccgtcgtcggaggccaggtcagatctcgatttcgtattcggattttgatttgaaagattctttgttggttttagacgttaagagttttttttttttgaattgttggtgcgttttggttttatttgttcctttgtcatgcgtttggatgccgagagaacgaaggaaaaggacagaaaatcaaatataatatatcaaatgtaaaatttaaatctaaactacttttgtttgctgagaaaaggcatgaaaggaaaggaaattaaaaatttggagctagaggttcgtttggttattgagaaaagttatgaaaagaaaatgaattaaaatttggatctgaagctcgtcttggttgctgagaaaatggtaggacaacgataagagttaagcttttgaagtttaagctccatttggttgctcgtaaaagttgtgaagcgaaagaaattaaattttggattcaaagttcctgcttggttgctgaaaaatgataagaaatgaaggaattaagctctcaaattttgagctttgtgtgtttggtcagagaaggcatgggaaaaaacgaacaataaaattttaatcttgacgcttatattataagattagtgacaccataaggcttctttgggcgtatgcagttggattcgtgtcaatcatggcttaggtttcattctggtctcgaaactctgaaatataatttggtttcatgatatcaattattcatttgcagagctctgggaagtcttcagtgctggagagtgttgt

SEQ ID NO: 98645 - DNA, 486 bp, Vitis vinifera
  Intron number 2 from transcript GSVIVT01027536001 (locus G SVIVG01027536001) derived from phytozome v7.0 (chr-ID chr1 5; pos 15936432 to 15936917)
agactggttatctcactgaaaagcaagccgccacggtctgacaatgatccctatctctatatgtttatgtttaaatttacctagtgtttggttactgagaaaaggccggaaattaaaaaccagggatttttgttaattgggacctaggaaaatacaatgtccactgaaagcctaaatcaaatgtgtcgcctcaaagcattggaaaacattagggtttaggtcccaagtttattttcttttcttctctacagatttttcggtgacaaaataggtgtatgaagcttaatcgagtggaggatgctgttttctttggtcccaatcactttaactacaaatccaatatcataattcaaatcatcttctccatacattttctaggccatcaaatgaggctagagtttttcagctatattctattttgggttaatgacttcttttctgtcaaatttagtacattgcaagcctcacacaagcattagcatactg

SEQ ID NO: 98646 - DNA, 380 bp, Vitis vinifera
  Intron number 1 from transcript GSVIVT01024498001 (locus G SVIVG01024498001) derived from phytozome v7.0 (chr-ID chr1 6; pos 3349386 to 3349765 reverse strand)
ggtttcaactccatatcttctcttccatcttaaatctctaaaaaaaaaagtttcatttaatccaaaccctgcttctctgttcttcctttgttccagtttatatctctgttttttcccattttaatcccacaaaaagtcctttctttccccctcccttcatttcatatatctgctttttacaatcccattcgaaaaaaacctcctctattcttccctgtttcagtctgaaaaaaagggtaaaggagagaaaaaaaacactcctgttcttgtcctgtttcagttcatatatattttttaaatttatttttgacattttgattgaaaacccaactcttttcttcccctgtttcagtttctaatcccagttttctcacagttga

SEQ ID NO: 98647 - DNA, 940 bp, Vitis vinifera
  Intron number 1 from transcript GSVIVT01021921001 (locus G SVIVG01021921001) derived from phytozome v7.0 (chr-ID chr1 4; pos 5560866 to 5561805 reverse strand)
tcttttgtctaaggttagttttttcccatattttttgtttgttcttatactacttgaaatatttagggagatatattataaaaatatttttaaaaagaaactatgagaagaatacattaatcttgaataataattttattaatttgattttaaataataaaaattgtgaataataagtaaattacaaatgagttgaaaaaaataaaattttaatgtgaaaaattaatttaaaaaggataaatgttaatataaataatataaaaatgaggaaaaaatggaagttattattttaatttagaaatgaaaaaaaataggtactaattgaaagaaatattgcattgaattagaaaggagaactagtgaaaatttaattcaaataataatattttatttaaattttagaagagttaaaattaatggcttttgggaaaattgggttaagatgttagatgaaaataaaaaagaggaaaacatattttatttcatataagaagactaattaatcttgatttaaaataaccatcaaagttaataattttattatttagtttcaaaaaataaaaaaataactagtggatcataaataaaatatagaagaaattgaaacaagaataaagttaaaaaaggaatttttaatatgaaaaaacataataaaaaggaaacatagtaaatttcattttaatttaaataaaaaaaagttaatttgtaagtagaaataaatataacaatgaatttaaaagtgaaattattgaaattcttaatagaaaaaataaatttgaaaaggaaataattaaaatttgcatatgatttgagagtgaatgaattatattgacctattatttttgtatttatcacatttttaccattgatgatatcatgtattatatattgtgtttttcatgtaggtttcattccctcttaatttggaggagttggttct

SEQ ID NO: 98648 - DNA, 854 bp, Vitis vinifera
  Intron number 1 from transcript GSVIVT01021837001 (locus G SVIVG01021837001) derived from phytozome v7.0 (chr-ID chr1 4; pos 6671039 to 6671892)
aggtgatttctaaaccctacttttcatttttttttttcctttttttccccactcttctcttatgttaccttccggtcgcgaagaaaattgaggaaaagagaaaggaaagaaaattttgattactgattttttttttttttctggagtatctggcaaactgaacgaaatgagctatttttatggctcaattgagtgggaggaaagttttaaggttttaagctacatttttttcttttcgatagtttttcgggggatagaacgggggtattttggaatttctcctgatagtgtatatcagttttcttggggttttgtttcagtttcaagcttcttttccctgtgatttagcttgaacatttgatgtgattctatgaattaatttatcttttgttttctgtacatgtccttctgatcggaaatttccttcaaatgcttaataaagttactgggtcttttcaaaaccacagccttgtatgggagtcaaaaaattatatgcatagaaacttcttcatgcatgcttggtgattatcttgcaaacaaaatttgtaccttttctgtctatgtttggtctggttggaatatttggtagtttctttaatgaggtattatacaaataatttcaaaaatacgccttctgcgtccttttcagatctcagttatggtaaatatggtctttctttctttagttgaaggcaaatgtgtggacttttgcttagattttgaaatctattctcttctgatgattctttttttatttttcccattgcttagtgggtttataaggtcatgccctaaaaaacaatccttatccatatgcaggattctcctgtctttaattacatcaacagtctctc

SEQ ID NO: 98649 - DNA, 978 bp, Vitis vinifera
  Intron number 3 from transcript GSVIVT01027519001 (locus G SVIVG01027519001) derived from phytozome v7.0 (chr-ID chr1 5; pos 16012655 to 16013632)
tgatagaaggaccaagtaatttgaggtattttgactaatttttcatatttattgcactcaaatttcttattattttttgtgggggtggtccattgactccattttgatgaattttaatacactccataggaatccaactgtagatagagactcctatcttctcttcaaagaaaagtctctctctatctctctccgtgaaataccagctttatttatggacttaaaaaaatgagaatacagctgagaatcaatctcacccttgtctctcctacagatctcagcctttggattagatcaggtccaagttaacaacccctgtagagtgaatttgcttaccttattccactatcattaattatgatcacattcttgaaaagtaaagttgcagtcttgaaatgacttcaccaaaatgccctccatggtcccccataatacccttcatttgatggccgttcatcgtttcatttcatatgtaaaaagggtgttttggtatttttagaagtatttgggcgatggttccttaattggacggcctggtattacctgtaaaataaattctctcactttcataagcaattattgtggtttaaatacctctgtgctttttaaaatttttgaaatttgtttttaaacttcatatgcatggaatgatcatagctttgtacaggacttgtggggcatatttaggtacttcaatattgctggtcgcttcttgttttcagcaaatgggctttctttgatcttacaagattctagaactctagattttgggccatatgtcttttattattgttcttttcttatcgtttttgggtttttaatttatctttgatgattgcaactgctccactgcttttgattttatatggaaaattcacttgttttctacacctctctcatttgggtcgtcatttgaatgtttggtttccctgaatatcatcagctctttctgcctcagccatcaatttgacccaccca

SEQ ID NO: 98650 - DNA, 757 bp, Vitis vinifera
  Intron number 2 from transcript GSVIVT01024804001 (locus G SVIVG01024804001) derived from phytozome v7.0 (chr-ID chr6 ; pos 6828388 to 6829144 reverse strand)
caacagctgagagtgtccgcgatcgtctgatacaagtaagacatgttagatctggaagttaaggaattaaaaggacacattcaggagtttgtactttattgatgcttttcaaatttggcatagtttgaaataatgctattttattcataaaattggggtagggaagtgatgtcattattttacatctgcaattttattcatttttctaaatattgatatcttgtagatgtattttagattggaatgtttctgctaaaattccatacgaactaaatgtaaaatgagtgattttgtccctccctggtgaagaaaaatacgttgcttactaacttcagccttgttaattacttaatcctcttcagatatggaatattgtagatctggttttcaccatgatttttttacgttattttcttaaaaagatatataacaaaattaaagtgtgcttgtgaggcttaaatgcttaatatctgatattaatgagatataatatagtgaaggaaatgttgatttaaagctttccgctgcacaaaaaggaaataacaacttaaatttttccatagaactaaacattgggatatgtgtaatcaaattcactcatgaaaatattttaattaactgtgcttttttttttttactttgtacaatgaatcttagctctgagattatggataaattaggttgttttctctttcttattcacaaaatgcagctggattaatgatgcctctgctaatgtgttgatcactttgcagca

SEQ ID NO: 98651 - DNA, 597 bp, Vitis vinifera
  Intron number 3 from transcript GSVIVT01026827001 (locus G SVIVG01026827001) derived from phytozome v7.0 (chr-ID chr1 5; pos 20140803 to 20141399 reverse strand)
ctcctaagattgcttcctatcatttgtgcagaagggtaattatatgctaacccgttaaagcttctctcagtgcaattcattgaatactgtgtgttttatcggaaacactttgtcttgtggcttgtttggttttactggaaattgttcccatgtatgttggtcacagataactcattcttgctgtataagcttgctttggcctttttgatccactaataacctagtcatatgttacaaacctatgcaaatctgctgatttttcttgtaggtcacctacaagttattggctaacaaatggactttttttttttgaagtaattgtgtaacgacccgctcccaactatgtaaatattgtttactttggacccaaaggggtcctcacggctttaaaatgcgtttacttgattaagatgaacctctacatgtatagcactaggaactttctcccctattcgatgtgggacaacacaaattggtttatgcatgtgtggttgtgtttggccatttcttcaaattgtgaagtaccttcagcgtaaaattacaaaggacaagcatttaaacaatttattgtccttggtcagggagcaatcacgaaac

SEQ ID NO: 98652 - DNA, 904 bp, Vitis vinifera
  Intron number 2 from transcript GSVIVT01022086001 (locus G SVIVG01022086001) derived from phytozome v7.0 (chr-ID chr7 ; pos 16478874 to 16479777)
gatcaagaagaaaaccaactgcgaaccgtaagttcccattatctttattatatgctaaaatgtcttgtttttaatttaataaatccacatcacattctggaatcaatatcagctaaggtgtgaatctcttgattcttgcaaactttgaagttgaaaccatacaagtttcacatggtatagatgatgcttcatataaaagagacgcattatgaaaacaaatctctgaatcataacaagaaagagagaatgacctacttaaatacaatttctccacctgcagcaccatatgataataaacaaaaatctgaatgttatcttcagtatgctgttcacttttgttcttctaaatgatacccagaggcatcatatttgaaagaaaaaattaaaatagaaagcaatcattaggatctttttctacttttaataatattcaggttatgtttgatttctggaaagtgatagggaaagaaaaaaaatgctaaggtaaatgatttcctcatatttggttttacatagaaaatgtgaaagaaaatttaatttttatataaaagagttaaataagtgaaaaaagtttgaagtagtatataataatgatttattgactttaaatcattttttgttttcctttattttttattttctttttattttcttatacttttcttctctattttctttctctcatatttttttctgcaaattttttgggaaccaaatatagccttgtggtttagagaagtaatgaaattaaatttttaaatcatttttggcagtttgattccaaattttcacatcgttacttgactgtttgaattacagttctgttcatcaccgagtactgaatcaagtacttttaatcaatcttgtaggattgggagattacagcagcttcagaaaagctggc

SEQ ID NO: 98653 - DNA, 989 bp, Vitis vinifera
  Intron number 2 from transcript GSVIVT01028871001 (locus G SVIVG01028871001) derived from phytozome v7.0 (chr-ID chr1 6; pos 17938051 to 17939039 reverse strand)
attgccaccagattgattgcctttgcagtatcgtagttttaatgccctaagcatacttgtaccagttaaatctttcattttggattctctgctttgcccatgttcatatttccaacggtttttactggaaattatacaaacatgtacatacatcccaggcagcacttgtaggactaaaatttgggaatcgtaattttaatgatttaaaaactttaatctactaaatatgcttaagctaaaaaacccaactgctaatttcaggactttctttcagcaaaatttgtttgagtgctagcctatcatgcattatcacgggccctgaatgcccaaaaccactaatatttcgtatttgcagcatttaatatgattgttagacaggctcttaatgctgtgtttgctttgagtggctcgtgtccagtcactcaccttatcacatctcattttaagatgttctctgttatcagactcaaaacatggaccctaaaactccatgatggccatttatggagggtagtgtgaaactagtggcaggttttagctctgctgcatcgagggattttcttctcccatgttaacatgttttaattattcttacctatatgatactcaataacttcctttggcacttcaaaatatttttcaaaaagcaaaatatgatggtgaaattaatctaagcatttcaaagtttttgcaatataaatctcctaggtgttaccattatttgcaatataatgcagccctgttggcagtgggttctttatgtttataggagttcatagattaaaacatcaaatataggtattaaggtttcagactttgacacactatatgagcccaaagaaaaattttaagagcatccttgacttcactttaggtgtgaaactagtttttggaagccaacaattgaagcagtgagttctttacatattacttattagaattgtaatttgggtgcaggaccctaattctttaaccgacaagaagtgtga

SEQ ID NO: 98654 - DNA, 677 bp, Vitis vinifera
  Intron number 2 from transcript GSVIVT01021577001 (locus G SVIVG01021577001) derived from phytozome v7.0 (chr-ID chr1 0; pos 7367064 to 7367740 reverse strand)
agaaagttcaaaattttgtcgctgagcacaaagaggtggaaactctaggaaatgaagccctccaagatcgtaacaaggcgctctcagagaagctcctcaagtccattgatgggtatcgatccttgaagaggaagttgaaagaggcccaggaggagaatgcaggacttcacatgacattggaggaagtgggggtggatgtagcagctggcctagaccaaatccgtagcttcaggcagcggatcatcacagggaatgaacaagcagtggatattgaagaggaaatgtcggcattggcacatatgtttgaacgctttgaaatcaaggcaacaaagcatagacagaagaaaagtgagtgtgtaaaaccaaaagttgtgattaaagccagtagcccttcagttctcgcatgagaagcaaggactaagaaaacaaagtgacaattggggctctgctagttttgttttttcctgtcaaggaaaatgcaaattatcccatagtttggaattttaaataagaggttgagtgtttgtaattagtgacccaataacaggttcagcattccaacctatatcccctgccccggaatagttgtgtaattcccttttttgaccttattcccccatcttgtatgccattgttaatgagaagattttcttgaattcttctgacactttccattt

SEQ ID NO: 98655 - DNA, 653 bp, Vitis vinifera
  Intron number 2 from transcript GSVIVT01027042001 (locus G SVIVG01027042001) derived from phytozome v7.0 (chr-ID chr1 5; pos 18410165 to 18410817 reverse strand)
aacaaggggaagaacttctatttactagcagtaaggtttggttttccaatcccacctgtcctttaggtactccagttattgttctgttcgggttaatttcttaattgggctgtccggccgctactgatccaaacaagttctattgagttttcatcattacatggctcgatatcctgcattctatagttgtgctaactttgatttttgatagaaatttgcattttgactgttacataccggtgcttatgacatttactgcactgtttgttggaccaagccaataaaatcatacccagcagcgtgttgtaacattgtttgataaaaaactaggacatggctaaatgaaggattctttttggacttatccaattgaaatgatcttcttgattgtgttggctccgactaatattgatgatctatgttaatagacaaaagatattttgggttactgaaactacaagttgatcactattagatgatcaccacagacctaccagaaacaggtagccatcagttgaaaatttgcacatgctgactacattcatgagataatttgtatatcagcaagcagaaaaaaccaagaaatggatatgcaactgatttattatctgttcttgtgtcaattgtaggcgatctttaagcccccgaaagca

SEQ ID NO: 98656 - DNA, 502 bp, Vitis vinifera
  Intron number 2 from transcript GSVIVT01020612001 (locus G SVIVG01020612001) derived from phytozome v7.0 (chr-ID chr1 2; pos 3778830 to 3779331)
tgactgtggcactctattttcaaggtaagtcttcctattttttctagagttcatagttcttttcaagttttaatccacaccctaatgaagaaaattaaggaggcaaattttgaagtacatgaaagtgagatttctgtagttgttcatttcactttttttgtgttacagacaataaaacatccctcacactcatttggctttttccgagaaaaaggagaagggggtccttgtgaagataaatggattgataagaggacaaatattgttttagtttcattaagaaaatttctctaaatcttgaagtttagtctcttctacttgatttttcctttcttaattagttagcattagggtatatatatatatattcattttcgatcttgagcccttcttctttgcttatatgatacttaattcattgtttctttgaatatttgagttacttgttatgtattgtgtgggcacaggcgagatagcttcatcactcatagggccttctgtg

SEQ ID NO: 98657 - DNA, 422 bp, Vitis vinifera
  Intron number 3 from transcript GSVIVT01024890001 (locus G SVIVG01024890001) derived from phytozome v7.0 (chr-ID chr6 ; pos 6215577 to 6215998)
acacaagaatatctctgcttattcagtaaccaaaggtatttcatcacatgatccatggtatattccaagtgctaggagtaaattcctatttaccagagcaatactgaacaagagaaacatatagaatttatagcggttctcttctaaagggagagctacatccattttgccattgtagattttcattatgaaaaaaaaaaaaacctacagaacgatctcaggtcttacaataattatctcatctctgattttccacagagaaaacagtcaccatgcatgtacaaaataactataatatccctttgattgattctcagtcaccaggaaaagtgtatattgtaattagcaaggctccacacaactgaacagcaagtccttggattgaccatctgtcattatcattttgtgatttttcaggagca

SEQ ID NO: 98658 - DNA, 983 bp, Vitis vinifera
  Intron number 1 from transcript GSVIVT01028882001 (locus G SVIVG01028882001) derived from phytozome v7.0 (chr-ID chr1 6; pos 17829399 to 17830381 reverse strand)
tctctgtcattgggaccttctcttttggcttcgtcagcttccttttctctctctcttcacttcaatcaatgtatgtatcgatatgtatgtgtatttgttctgtcacgggtgtttcctttctgggattttcaccattatttatgaagtttgtcgtagcttttgacttcggtatctgtccctttgtttggtttccaagaaaggaaaggaaaggaaaagaaaaaaatttgtgagttttgagccagccgggctcttgggttatttcttcaaatgcctttgatttttaaaattttttttactgtgcgaggatgaattatattgtttgattcatatgcttttgttattattattatgattattttatttttgttttctagattgtgattttagaaaacatttataatatttctaatacttaaataacaaaatttttgaagtgttaaaaatattaaaagtgttttttaaaacactgctcttaatcatgaaaaatcaacccccaagtgtatgtcacaattaattgctgaacctgaaaatttccaaaattttcagattctgttttcctttggagagaagaagggttcaggctcttaaataatgaaaatttcaaaattttccttgttttcttttccttcattttctcgagccatttaagagtaactgagttcaacttttgctttcaaaaattttattttttctggtttcaaatgaatttacttgggtccaaaacaaaacttggcttatacttagcaataatcattttgaagtatatcaggggaaataatctagaaattttcatgacaagaaaatttgtactctgttgaagaaaaattctccaaggcttcctttgattgctgaggagaagttaaagaagaaaagttgggaatggaaattttgcattgttctgaatcaaaactgtcattttccttgatttcattttctgatgaaacaaacagatttttaatcaacttacacatttgtagcttggt

SEQ ID NO: 98659 - DNA, 821 bp, Vitis vinifera
  Intron number 3 from transcript GSVIVT01022018001 (locus G SVIVG01022018001) derived from phytozome v7.0 (chr-ID chr1 4; pos 4253979 to 4254799)
ttcaccagttgaagggtagcagctcaaggtattgtaggttttctttatttttctgctcatgttgctacttttttatcaagctgattttatctgtttcattcaattttcttcacaaaaatagaaattttttctatgatggatcatgtgatgtgaaagtttttccaacttcttaccacttctgtctagcaagaagagaagcacatgcatccaggatacctgggttgaattaatcagtgttttatggcaacttttgaatgttaatagaagcctatcgattcagttgaacaacttctgaattagtcatagaaaatttttggatcaaggttttaatatctgaagctcatctggatccaaaagtttgtcactgaagatgagatgattagattgtttattgctattggaatcattcaccagctgaatttttttaatcttgtacccattcatgctgttttcctagtaaattttcaaatattttcaattcccatgtcattgtcatactgccgtagtcatttaagaaaatggggtccttccattgtgcttccttgtgaaagcaagcatatccttagtttggatgctgagaaaaataaaattttgaatcttataactagtttccttctggtttcttcatatataatatgttctcattagggccggttgagaggaggtttttgttctcttctctcaacaatgaaaaatctactattaaggttctgtttcatttcttctcctactttcttcaaagaccaaacaaagccaaggggaaaatttttgtttatttccaattccttgatgtaacagcattggtgcacagcgagttcaaa

SEQ ID NO: 98660 - DNA, 941 bp, Vitis vinifera
  Intron number 1 from transcript GSVIVT01019819001 (locus G SVIVG01019819001) derived from phytozome v7.0 (chr-ID chr2 ; pos 3613262 to 3614202 reverse strand)
gcggttcctagcggatcggtgagcctatcttcctcttttcattaaattcaatttgagttccgtttggtagaaatcccggtgatgtcctatagtatgtttttccaaatatttctaaattataatcatgtttatcagttatcttatcagagcagtgaaagagttgtgatttgagattaccattttatcgattcatttatttttgttaaaagttatatgatgagatgtttaaaagttgttttgaattgctgtgatagcatagatacagaatcaccttttgtttttgttttatttatttttgttttggtttgttttggtttttttaagtttttaaagaccaatatggtgactagtcttgtatttatccatgcgatttcggaacaatatctaaatactctgtcaagctcattcatacttatacatgtattcgcgttttccctttgacacaaaatccaaattgctacatcctactacctgaaagatgggagagtatacaggattgggcataatgctggaattcgtagccatctctctcaagtgtcttttatgaagtggtgttctttggattggtttatccagacagagcaattcatgagggctatggctatgttgccaatttgccattactaacaatggtgtttatttttgcttagatattaaaggctaggtggtttcccatgttagaccaagtggactttctgaataagttttcctctatggtattgctccttaattgagtgttaatggctgatttctgtataaaactcatagaaatgatggacaggatgctttgaaattgacaggatggtgctaacccatgttaggctatataggatgagtacaatcagccagtttctatccattgccctcgcttctgtttgtgatatgatttgttttactgctctccagagtggtggggaggcttccattgttgcagaagtagt

SEQ ID NO: 98661 - DNA, 753 bp, Vitis vinifera
  Intron number 1 from transcript GSVIVT01018863001 (locus G SVIVG01018863001) derived from phytozome v7.0 (chr-ID chr4 ; pos 19138488 to 19139240)
ttgttctataaaaggtccaaggtccaaggttcaaggttcaaagttccaaggctcaggctggttcgaaggcctgagaggactggacttcactagggtttatgatggtcctcctttcttcactctgagagttcagtcatggctttcctccgcctagctttctccacatagttttcccaatattttcttacaataatgaggtattttggaagcattgtccctcagctgtcaaggaatctcaagctccgcatcactcagaaccctaccttttgtgattcgttaaaccctaattctcatttatggaaccgtttgaattttgtactgaaatacacttcctctgcgcaagtcccctccgagagggtttcgtccatcgtagacgagatctccggtctcaccttattagaggtttctgatctgacggaacttttgcgcaaaaaattggatataaatgaaatgccggtgatggcggtgatgatgccgggcatggggttcggggtgagaggggccggcggagcggcgccaaaggcggcagaggtgaaggcggctgagaagacggcgttcgatttgaagctagaggcgttcgatgcggcggcgaagattaagattattaaggaagtgaggacgtttacggatttgggattgaaggaggcaaaagatttggtggagcatgcgccgacacttttgaagaagggggtgccaaaggaggaggcggagaatatcattgagaagatgaaggcggtgggcgccaaggtcacc

SEQ ID NO: 98662 - DNA, 1011 bp, Vitis vinifera
  Intron number 3 from transcript GSVIVT01022631001 (locus G SVIVG01022631001) derived from phytozome v7.0 (chr-ID chr2 ; pos 13856711 to 13857721 reverse strand)
gattaatatctccggttctccccttgaattccctggtttgcacctcttcatccttccattgctatttcactttgatccttttaaattttatttttgtatttttaaggcaccgtttcaatgtaaattgaaggcatgaatgtggagaatgaagaagggaagaaaagtgaagggaaaaaaatcaactgaataatccttctcaaattacattccatacaataaggcatttgaaattgtataaagaaaaagtagaaaaaaatgaaaataatttgagttctataaaatattaattttcattctcttttgcctagataatgaggaatttgaagatgaataaaaaaagtgggagaaaaataaaaataaattcagtaaagttttcttgtacaattctcaaattttattcccttctacattgataatgaagaatttgaagatttaagaagaaaagtgggataaaagttgatttcaataaatttttttcttttgacattcttaaattttattctccttttacatagatggtgaaaagtttgaagatatatcaagaaaaagtaaaaaagcaaataaaaataaaaataagtttgagcttaataaaattttcttccaatgctttcaaattgtattcccattttaaatagattatgaataatcggaagatgtataaagaaaaagtgaaaagaaataaaaataagttttagttggggatgtataaagaagaagtgaaaaaaaaaaaaaaattttgagctcaataaaatttttcttctattagtctcaaaatattcctctttttacacagatataattttttacatagttcacttttcttcaaatttgtagagcaaactaaataagtgaatttgggattccttcttgtttctctcctttttctggtacttaattagatccaagcatagcttaattttattcacctctcttgtattgaagacaattgcttgtgtttctatttcaatgtgtatagagacttttcccagcattggaagagtgagagtgaag

SEQ ID NO: 98663 - DNA, 887 bp, Vitis vinifera
  Intron number 1 from transcript GSVIVT01021873001 (locus G SVIVG01021873001) derived from phytozome v7.0 (chr-ID chr1 4; pos 6223113 to 6223999 reverse strand)
ctgtcaaggacggtgcggagcacggcatattgaaggttaagggatcgttttcactatttttatttgaatttagagtaatgaatgcattttttgtttgttcatttagtgtcagtgttgttttggttttgattgaattgagcgtcaactgttgtctgtatttgaatgtttgatacatgtaaaatgatgtttagattatgcgattgttcaacattgtcgaaagataaaatgaatgacttagttgagctgattctttttcatgatattcaaagtcttgaagatcacgagcttaaattagttgaatttggcattttttgtttgaaaagatttaaatgctccataattgaggagatagaatggaggaaaagacaaatagtaagattttgagtcttcacttctatcaacggaaatggttgtgttaggctaaattgaactgaaggtattcaattaagcaaaatggttgtattaggcatgtttagtgggattctcttattattatgtcattggatcataaatagtgaaacctcttttcatcattaataaaatgtttaagactcagaaatgtggacttcattttattccccacacttccattgtaatctgagcataagaggaatttaggttctgtgaaattcaactgtgtcagagctatgaattctatgtttaatttggattttgagaatttcaaattctattttaaatttgcacatagtaatatactcatagtgcacaactgatgaaatgtgatgctgtggaagattgggataacagaacaaatgtaactgttgattcatttttttttttttttgggagagctgggtttgaaattatttgtgctttgatgtgaatttgcagcttcgttcactgtcaagccctagtgaaattgcaca

SEQ ID NO: 98664 - DNA, 1007 bp, Vitis vinifera
  Intron number 1 from transcript GSVIVT01026185001 (locus G SVIVG01026185001) derived from phytozome v7.0 (chr-ID chr1 0; pos 13578381 to 13579387 reverse strand)
gttacatagcgccaggtaagtacacaacagtttttctttcagcttttactctttcgatatatcttttgaacttttggttgtttttgttttaataagtttggtatctttgagatttgatgtatttagtacttttatacttcctattatatacttcatagaagtcacaaattatactggatgaagggaaaggagatattattgccaaccaaaccaaactttttctactattattacttatgaagagcttgaaagtgaataaattcttctaaatttttaatatattgtttttctttatatttttcatgcaaagtaaataatagctcccaactatgtagatattcttcgctttgggcctaaggggcccacatgaatttaaaacatgcctataaggttgagggaaactcattcatatataatgtcaaaactttttgttttcatatctatcgtgggatatcacattcattccttatgtaaaggtaatatcctgtttatgtcccatgagattgtagagtcaaacaaactttcacatcatggttatagattaactttatatcatttgtaatgatctgctctcaactatgtggatattacttgttatgggcatatatatttcttttaaagttccaaataaaaaaggaaattcttaatagttattcataaaatgttgtaaaaaatggtttgagagtaagagaactttatataaaaaatactaatcaatgttctctcaagcattttccaaatagttgtcttcattgtcccaataagtcccaaatatttttaaaaattccttacaatagtttttcaaaggtttaatataagttgtaaaaattaacttaatttcatcacaatttagaaataaaacgttgtcaaatgtcaatgcaatgctatgaaacattctcaacattttgtaagtacagataatatgagaaaactaaatgaatgtttctttctcatttgtgcaatatttttttttcttgttttgattcttaacagagcttgcctacact

SEQ ID NO: 98665 - DNA, 814 bp, Vitis vinifera
  Intron number 1 from transcript GSVIVT01021882001 (locus G SVIVG01021882001) derived from phytozome v7.0 (chr-ID chr1 4; pos 6068467 to 6069280 reverse strand)
gacctattttcctctgccactctcaatcctcgcaggtactaatctaatcacgttgatattatttttttttgcaaccctcgtttgattcccaagaaaatccatcccccattcgatttccgggaaaattcattctcgtttgatttccgagaaaatccattcaaaacccccaaagaaaaccaaaaaaattgcttttcttttactccctgtgttttctggatctgttttaagggtctctttgctgttgtgccattggatttaaatttcacgaaccctaaatccacgatttttgagccaggctaaaaaacacaacctttgcctgcaaatcatgatcagattttgtcacctgtgcgcgggctggactggtaggaaatatcgggaaattttcagaaaaatcggaaaaaaatcggctatacaaaccgaaaattcgccgataaattgcagtgtccggctattttttgaagatttcgccgattttttcgccgattttaaccgaaatttggcgaaatttctcccatcgacatttcgcccccctctttcgtaacgccgaccaccgaaacccgaaatttcggcgaaaaaaatggaaactttcatccttgtacccaattatatagatttgtctattttgatgatttcttaaaattttaaaatgtgtttataattaaagggatattcatatttatataatgtaagaaaaattttatttttaaaaatattaatattaatactttaatagtgaaaaaattactattttgacctccaaaataaaaatattatcacagggaaagagaggaagtaaggattttgcagagggaga

SEQ ID NO: 98666 - DNA, 862 bp, Vitis vinifera
  Intron number 3 from transcript GSVIVT01021202001 (locus G SVIVG01021202001) derived from phytozome v7.0 (chr-ID chr1 0; pos 2527791 to 2528652 reverse strand)
attccccaatttcaatcaccggttagggtttctttatccttggaaaaatttactttgtttgccttattaattagctcatgatggtcgttctcaataatttatggaattctaatgttctgtttactcggtgaacgaaattgaattaatggaatgggaaggaaaaatgaattgatttaagttgtttcctcttgttgggcagtaggaagaatttacataggaaggaatttctattggtaccttttgccactgttgttgtaaaaacaaaggataaatctctacattacaatttacattttttttcctccattgtgaacgccagaattcaattttttaggaaagtttattccccctcatcccaatcctacatcccaaaagcaatgcaactttagaagtatcttgcatctgggtgagggatccttagggaacgttgtagttgagtttttttttttctttctattgtttagaccttctcttgtatctacagtgatcagtttggttgctcagaaagtttggagagggaggaccaattattgaatgtcattcattataagtaattgaaatagctgaatcaggtttaattgagtgcaggttgttctttgggtcccaaattctgagaaatcttcaaatttgcaatttcttttcttttcctaccttttttctgagcaaaaataaaataaaaaatggagcataaatgtgaatcaaactattcaaacattgtactatggggtgaaattatcctaattaagattggaacttgatccctaaacttatgttgttttttgcggaactgtgggttctacgcaagagggccttgatgttatttgatgtagtgagctgtggactgactttgtgacaggtttct

SEQ ID NO: 98667 - DNA, 539 bp, Vitis vinifera
  Intron number 3 from transcript GSVIVT01030124001 (locus G SVIVG01030124001) derived from phytozome v7.0 (chr-ID chr1 2; pos 10063180 to 10063718 reverse strand)
gaaggctgaagtcaaggtaatctcatgttcttgttttgaatgagtgattgagtggtaactcttgaaacatagagggaatgctgggtggggcatattatcagttcccaattcaaaatttcttgtacaaaacaccagtttacatataacagttatgtgaagagagattggaagaagcatgtttaaatgctgagtttgctttagtgagtcactcaattatcttgtgaagaaccttctgttttagttctcggatgtcctttgagttcatcaaagaatcaggaaaaataaaaaaccaagaaaatctctcttagggttttttttcttttttatttttttgtttgtaatgagcattgtagccaagtgtgatatttggtaactcacccacaactttgtccatacttcttccaatagaactaaggtggaactgtggcagttttttttcatgggactatcacttaattaatatttacaacaaaatcctcctaatcaccttttgcattttggcagataacttgtgggataaatttcaagtataattattt

SEQ ID NO: 98668 - DNA, 670 bp, Vitis vinifera
  Intron number 1 from transcript GSVIVT01025008001 (locus G SVIVG01025008001) derived from phytozome v7.0 (chr-ID chr6 ; pos 5342471 to 5343140 reverse strand)
ctctcacccaagaaatcgagaaaaagctcctgcgggtttgtcgtttttttgaataagatgattttagcggtttgtttcatttccgagacaatataggaagcggaaaggaatttaaataattgattctgtaatttgtcatttttaggacctgtgaaacagaaacctcccgtcaattgatagtctaattaagctctatggctcggttgaggttttcttttttcttttctttttcctatttctgtttcttttgtttatttttccttttagtttcctcgcatttggttgctgaggaaaccgagggaaagggaaagaaaacagattatagaatcgactctgatttctgttggtttccttcttaaatgaaatatctcaatcatcatatacagatgggatggtatttcgttcagttgagtgggcattctttttctatgtttggtggattgtaaccataaatttggagattgcaatgtttttgatttttttcctttttctacattttttcacctactaagtgatacctgttagaaaaccgagagaacgaaagatatatacaagattcatcctattatttacatttttccagctgctgattgaatttgtcgatagagattcatttgtgttggacactcttgtaggcattagcttctcaatcgcagaggcgcaacttgtt

SEQ ID NO: 98669 - DNA, 867 bp, Vitis vinifera
  Intron number 1 from transcript GSVIVT01024807001 (locus G SVIVG01024807001) derived from phytozome v7.0 (chr-ID chr6 ; pos 6800167 to 6801033)
aatcgtgcctcggcgacaacccatacgttcgagtaagttttttttcgatatccaggaaccctaaattctaaaaattcaagaagccaagctctaaattgtcaagttctctgcatagaagaatcctttaattttcagtgtttcgaacggctatgcgatgcgtgagatattcctatcttaccgacttattcagattcatactcgtacattgaaaagtgaagtcctggtgtttggattttttttcccttgaaatttgatgccaaaatgacattttttcttcaaaagggaagagccgatgatttagggcatcgatttgtgctgtaaaaattatggcgtcttatttgtattttaaaagtcttacctcagaaaaaaaaaaaaaaggcgttgcatctaaaatttctttcacagaagcatcattctatttgtagtgtttagcttgtgtggagtttgagattgtcaaatctcgttgatttatttagacacataagactacaaaaaggggaaaccctggtttaagtcatttatttatttatttttaaaaaatgtgatttgcaagtggttcttgctgatgattttgaacatcatcttgtgctgtagtgatccatagttttttactctggtgtgatagaaactagaaaagtatgtgaagtaacacgaagaatttagatatgggaatgggtgaaagtgtcgaggaaaacgtgtcaaagagttttgttacatttatacgatagtagtataattttcatgcttcttttagttattttctgcaaaaaggggattgattcagtgtagaaatagtgaaattagtaatttgttttttcgaagtgtattgatatttttaatatggcttaatgcagacaaaggcggatt

SEQ ID NO: 98670 - DNA, 587 bp, Vitis vinifera
  Intron number 1 from transcript GSVIVT01027396001 (locus G SVIVG01027396001) derived from phytozome v7.0 (chr-ID chr1 5; pos 17092140 to 17092726 reverse strand)
aaggctcagatctgggacactgctggccaagagaggtttctcttctgctttgatctccctccacacattcaattatttattaattgttggttttatagttttgtttcatgattcttcaagtgggtttggttccatttgtactggattttgattcttttgtcctttttcagattaagtttcacatgaattggtcaagaatctagggaaattttgcagaaaatttttgcccatttggttatgttatttcttattagttttaatttaaaagtttgacaagtcaaatactcaaatttgggtttttattttttattttttattttgtaaaattaaataatattttattcatttctattaaaataaaataaaattttctgaaaccctcatgaaatttgtctttttattttttatttttaaaaataatgttctattcatttcaactaaaataaaaattttccgaacccctaaaagaaataaaaccatccttattatttttaacttaataaatttattttttaatcatatatattttgaattttttaattttttctttaggtatagggcggttacgagtgcgtactacagaggtg

SEQ ID NO: 98671 - DNA, 788 bp, Vitis vinifera
  Intron number 1 from transcript GSVIVT01024449001 (locus G SVIVG01024449001) derived from phytozome v7.0 (chr-ID chr1 6; pos 2732218 to 2733005 reverse strand)
tctgtctgaaacccacacctctcaagctctccaaggtatgcgcaaaaatgtaatttccaattttgccattttctggaaaatttatactgtgaatccatggccttttggtttcagaatgatcagggatagggttagggttagggttctgtttcttttctttctttctttttttttttttaatctgcttatcactattattcaatcaaatcatgatcaaaatcttgaagaaatgaagaatctgaattgtacatttcacattaggcacaatgattttccagagattaatgcatttgagagtcaattgttggcttctgcattcggttgaattcagtgatggagagattttcatttttgcatttttttttggggtgggggggttggtgtttggttaccgaggaaacgtaggaaaagacaagaaaacaagaaatcaattctttggtacttaaagctaacttattggtttcctttctctatccaaagtctgttggcgaccggatttgtatactgtggattttatgttagatgggtgttcttattactttatcttacttcttgtgctaatgccattctatgtgatattgttttattttttcatttttatattctttttggattactggttgaatgaggtaaaggggaagggaatgttgaagatagctcgagaaagataataatttttaagtacttgtagggttttactttcactttcccatgttgtttccgagacccaaatggaagatatcgctcatgaagtttaatttgtgtatgcactgtggcagttatttcaa

SEQ ID NO: 98672 - DNA, 491 bp, Vitis vinifera
  Intron number 2 from transcript GSVIVT01021110001 (locus G SVIVG01021110001) derived from phytozome v7.0 (chr-ID chr1 0; pos 1504774 to 1505264 reverse strand)
tccatcatctgcagtctgttttgtacagtattaaggttcgcttgctctttataaatatttcttgctataccttcttttttttttcgccttgcttctaccagcttgttgaaaccttgtcggaagtttttgggtgtgtttcttgtatattgattgaatggcgaatatgaggagcctaatgaaaagaaaaataaaccatttggatttttattcaaaattttcatattgaggaccacagctggcaaattgaagctattgtttatgtttctgggtatcacttttctgttacttattgctcttaaaaaatcttctgtatagtttctcagtccatttgattctaaagaatcttcccttagttgtactttagcattcacccttgctatgggcttactagctaaaaatatatcataaacaaaacctatgcagagttgcctattcttgtatttatgtggtttgttcctgggtcatcattgtattgcagggtgactcatcac

SEQ ID NO: 98673 - DNA, 527 bp, Vitis vinifera
  Intron number 1 from transcript GSVIVT01030166001 (locus G SVIVG01030166001) derived from phytozome v7.0 (chr-ID chr8 ; pos 10903770 to 10904296)
gcaggttcaaggagaaggttattctcaagaaggtaattgatacgataaaaaaatacttctaaaactaatttttatttcttcttcttcttcttcttcttcttcattcttcttcaaaaaagaaaaggaaaaaaaaaaagaaaaaaaaaacagggcttttgattgggcatacttatggtttagaatgaattcataaattcccattatcctttctttaagttaagtgctgaacctgcaataattcaaatgcctattccatttatttaatttgtctgccctcttggatcctgcaataaattcataaattccttttatccctctatgcatttagcttctcacttctccctcctcttttcctgtttgtttttctttctctgggaattataacagtccattttgtcttttggctattactaatgtgtttcttgtttggatccttctaagcaaaattatagtgccagagtttttaattataacttcgattgcaatgtggcactgcaggtgaaggttggagtccaaggggctgaaga

SEQ ID NO: 98674 - DNA, 852 bp, Vitis vinifera
  Intron number 3 from transcript GSVIVT01025232001 (locus G SVIVG01025232001) derived from phytozome v7.0 (chr-ID chr6 ; pos 2965524 to 2966375 reverse strand)
gttcctgttcctgtaagtgtagcatctattgaacactctttatgcttgaattaatgagataagatatccactctgtaaaattggttaaaattgaaaacttgaagtcctgcattttggggagttgtattccatatatcacttgtgcccttgtttttccatgttgaggacttgtcacaacatcctcctgctgtattatacctgtttaagtttgcttgtgtctgtgtagcattagcatgtggcatattttgctaatctttaatttcactttgtatactcttttttcaataatttggaagtttctaacaatcattaatgctgtggattgaaatattactgttatagaaaataattggttttcacttgcctagtttattgtgtttctggtcacataggaagttttggtctgggatatcctaattctgtattcatgctatgattaaaagagagattttgggccaagaaaagaaaagaaaaaagagagtgaagttggtctttttatagagctaggagtacagattcttattatgttcatcattttaagcctaaagtgttctgttctataatgttcaggaatataaattgataatatgcaagctaatcttgaatagttaatgttcagaagtatgcattacgtattgtaactgaatggcttaatgttaggtaaaattgtattgtctctagattctctaacatctccaaaaccttacacatgaaatggtcagtaacacatgctacaggatgattgattgttgtgcttgcttaattttgtaaattgaggggctagtatatgctttagctccttataccatcctcaaacttatgtttttgtttttcttcttggttctgtgcagc

SEQ ID NO: 98675 - DNA, 711 bp, Vitis vinifera
  Intron number 2 from transcript GSVIVT01024288001 (locus G SVIVG01024288001) derived from phytozome v7.0 (chr-ID chr1 6; pos 568716 to 569426)
agcatcctgggccatttcctcattaaggcgaatccgttagggttttgtttggatattaggaagtataagggaaagaagagaatatgtttttaagctcgataaaatctctccatattctttcttcaactcaaattaccaattttcatcatatgagattttctttcacatttttcattcaagccaaacacaaaaatgtgatttttccttttttttttttccttagcactttcttgaaataggaggtttccctaaatttgatttttgagtctctttctttgttctcctactttatttctaaattagggtttgttaaacatatttttttaattgattttttttgttttatttatgaaataattattttgatttctggacttttttgtttttttgtttttctgattctgagtctaggttttcctttgatttgtaatagagtttttgatttttggtacaattgttttgatttttgaaactggaggtgcatgggtggggtggggtggggtgattccctaaatttgatttttaagtttagcgtttttctttttcaattttatttttgaattagggttttgataaatagatttctgtaaaaaataaaaaacaaatttctggaatgggggcattttgtctttatgatatttatttgttcttggtttgatctccaaagcaattattctgatttctgaataatatttcagattctttccaaga

SEQ ID NO: 98676 - DNA, 375 bp, Vitis vinifera
  Intron number 2 from transcript GSVIVT01027262001 (locus G SVIVG01027262001) derived from phytozome v7.0 (chr-ID chr1 3; pos 17504757 to 17505131)
tgtttcaggacaactttgtgttcttgcattataaggtttagtaattttgtgtagttctacaataaacaacattctattgactttggatttggaatttaactctaatgagcatttacttatttttcatacatttttcaagaatccggttaatgagattttccttacaaaaaactagaggtttgttaactctcctataatcagagcctagttctcttgcataaatttcaagcaaatttataaccctcttctttgacagtcttttatattggaattaaacatcttggtgtctttgaattatttaaatattggaagccaattaaggagtcatgcaatggcatattgtgaaacttgatacacataaaaataagatctatt

SEQ ID NO: 98677 - DNA, 777 bp, Vitis vinifera
  Intron number 3 from transcript GSVIVT01028920001 (locus G SVIVG01028920001) derived from phytozome v7.0 (chr-ID chr1 6; pos 17536637 to 17537413)
cttggtcttggtgacgtatgaaattttttttcttccatgatttaacttaccatgcacttatcctggttgctgttattttttgttactttgaaaattgaggtggtgcattgaaatttaatttatgcctgcagttttccatgtgtggtcataagaaaattgtagatcatatatgctgttttgccagacgtatccatggaactgaataatcattttctttgtgtacaatgttaaattcagaagtattcagttgaaagatcacagctacagaatctacgtgcttactttctttcttttaattcaattcttatttagctatcaaaaaaaaaaaaaaaaaggtatacaaaagtgttatgccatgccttttggactggcttcatggatttgattatcattttttatttcccatttttctttttgttcatgaaaagagcattcttaggtcaagatctatcatgcctctagccaaaatagttctatcaaatctcacaaaggatacacccttgggtgatgcttttggatttattccatggctttatcagaggaccgttcaattcctattgtatgtattatgtactatatttgaaattaataggcattcatatgtagagactgcatgtttttttcttcttgtttggtatattttgtttgagaatatcatcgtgctattatctaccatttgattattccattacatttgagtgctcttgctgcttcttttatgaggcttttaacaaactcttaagcttttgttcttccattttgcaggctattcctgcc

SEQ ID NO: 98678 - DNA, 1014 bp, Vitis vinifera
  Intron number 1 from transcript GSVIVT01029026001 (locus G SVIVG01029026001) derived from phytozome v7.0 (chr-ID chr5 ; pos 10908672 to 10909685 reverse strand)
tgctttgttgcgtgatttagataaaagcttacagggtatgagattttattgcagcgatgcccatgttttgtctttgttttatttttttttgctttctcgttcttcagttatcttctcctgacttccctgattccagaagcagaaaatatagtttttttaatttcgaggaggagtaattggtttgcttttctgggttaggcttggttctggacttgggtgtggacaattgtgactagggtttctgttttggggggcgaaaagttaaaatcagtcataacccatatagtgttgaattcttgagcatggaatctctatgttgattgttattttattagggaagtgctaccgagttcgttttggaactaatacaagactaatctcatagttcaattgtagtgtttctggcctgaattgatggggcagagtcaaagctggagattaggttaaaatttgagccgaggatgaaattataagtgcatgacagagaagcgtgaaagcattggcagtggggagtagggttggaagtcaggttgaatgtggatgttataactcaaaaatggatccaatacaattttgtttcatgtgggtgttctgtgcaggattagcaatcttataatttttcaagtatctgaattttcataatttatcatagggaagaactgttctcatctaaaactttaaaactaacagaagtataaagggagtttattatcttgaatattagttgagtaggcctttttttctgtagcatgtgaaactctgatatgatgttagtctcaacttgtgataagtgaatatgaaagactcaaagaggagataatggtggtgaattttttgtcatgcatgaaatgatatttctgtcttttgaagctgtttggttattcaaatgttcagctttaactgttgattaatgaatatgtatattttttgagctagggttttgcttttccagttatggggcttttgaagtacattgtttttgcttttgtatacaaacagaaatccaacggcaaa

SEQ ID NO: 98679 - DNA, 944 bp, Vitis vinifera
  Intron number 2 from transcript GSVIVT01019575001 (locus G SVIVG01019575001) derived from phytozome v7.0 (chr-ID chr2 ; pos 1699791 to 1700734)
cctcatcaaggctccctgaggctgatcagattaaggtaattaactttagagattcaatgatatgtgataaaattttcatgattaggatcaaatataatgtctagtggaagaagggaatacatttaatctcatcagcttgaacaacactccaaattaacatgactcataatttgcatattaattggtattttcttctacaattctcgtgacttgatttctatttggagttagtttttactttttagcaaatacaagcagagtcttcaattcatactattcagcaattaaccgaaggtttacacattcaattatctgatcagtataggcaaaccacaaaaaagtccacttgatgaatcttcacaattggagttatcaccttcttctacacatatctttaagcttcacctatttttcaaaactgaaatcagtaaattaccaagataatattgttttatgttggaatttggaagcatcctaattggacttctctcttggaggatatcataaccacgttcagagaagtcagacccatatgctgtgcgttgagatcttgctagaccaagtgacatggtggttcccaccttcaacggaaaataaaatattgttttagtgataaaaataatagagattagttgaaacattaccatagctgagataaccttgaattaattccacccttattatttttaaatcctaatatgacttgcttgtttcttgctcctcgcatattcgatacagtttcctttcaccaacgctgacgtaatcttttcatgatccttcatatctggaaccaccaacatttgactaacgttacctactatattatacactgttgcaaattattctacaacatttgtaattaggatatataaataattaatcatatatagtaatgtttagaggttaataataatcaaaatcattcctgaattatgatgcagctg

SEQ ID NO: 98680 - DNA, 1021 bp, Vitis vinifera
  Intron number 1 from transcript GSVIVT01027652001 (locus G SVIVG01027652001) derived from phytozome v7.0 (chr-ID chr1 5; pos 14633173 to 14634193)
aggaggctccaccaccttcaattcagccaccgttggtaaacatccgagctcctatatcaatcttttagaaatcatatattcatttcaaagaattatatactgagtctccaagaaaataaatgagaatagcgatttgaagaatctactaaaagtctaaaagtatactttatggaactggtatagaaaaactagacgaagaaaattaaaaaagtacatatatatatatatatatatatatgatgaatgaagtgttcacattcaaggagacagtagtttgcaaggccaactcgctagtgagtgacccagctgagttgtcaactcaaaactaagtctaagacacggttggaaattctaggtaggtctttgtaagctgtctagaaattcgaacactgagcttctattgttgacaaaaaggcttcagttgtatgttaaaaaaaattaattaatagcagaatgtcaagagggtaataatattttcattgataaagtaaatgttattaatttaataaatacaaaagactatagaatatgtcaaatattttctaatggcagccaatgggggtcgagttgaatttgagtcgagtcggtgagtttcatgctgagattctctagtaaaaaagtgctttacgtcacacacagaaacgtccagataaataaggtcaaccagctaagggacgatgcatcacatggcttaccgtttatgggaccatagtttagctacctagcttgatggtcctggaccccaaaaccctattggataagtccaaaatctgtacaatttttatacgtagaccccggtccaccaacagaacaagtcatacaaattgatgtgtctgatttgattaattaaattagacaacagagattgcttgtgccgatcaaacattgtcctaactaccattaattttttcaatttcttgaattccttatatagcatggagtgaaactgacaaattcatcccctaaactttaaacctttgaccctaaaccgcttgttttgaactttcagctgcggttggag

SEQ ID NO: 98681 - DNA, 493 bp, Vitis vinifera
  Intron number 1 from transcript GSVIVT01019917001 (locus G SVIVG01019917001) derived from phytozome v7.0 (chr-ID chr2 ; pos 4439118 to 4439610)
aggagattctttggagttgagagttgagtttgtcttctatttatcattatcattatcttcttcttcttctctccacgccactgtgacatgtttttactggcttgcttcttcatatttttttctccatgaatggttctcctctcatgccctttctctatttgaactggaaattatgctcttttttttttttttttcctttttgaactgttcatctccttgttggtctttgagtcttcttcaacccaaagaaaacccttattctatagtttcagtgccctcttttagagaaacaatttttcatgctaacatgtttgaaaacctaaaagagagactcagtgaataatggtgaaacatgaataggcgtctttaatatgtctgaacagtatttttgtcggggttttcttcattttcattttttaaaatcttatagctactctgggaactcaattcctttacatgattctttctgattcaggcgttccagccgtgcttg

SEQ ID NO: 98682 - DNA, 782 bp, Vitis vinifera
  Intron number 3 from transcript GSVIVT01029823001 (locus G SVIVG01029823001) derived from phytozome v7.0 (chr-ID chr8 ; pos 47230 to 48011)
tgccaagttggagaagcttgctgagggggaatcaggtagaaatacttctcaaatttgaattactttttaccaatgtattttatattttatttatttttacattatcgggaatggctaagcaaaaagtgatgagcactgcagttattgttgtctggcaactggaagagaatttgatatttttcagtgatatgcttctgttgcaattacacactgatgcccaatttggttttcctcaaatatctaccatgtaactagttgtaattgcctaacttacatgggttttcattttctaattggcttgtgatcaccaaaatagtgattcatgttcgcctaataatagtcttagtcattttctcaaaatgtgctagcaattgtggattaacactggaatttcaattagtttagttgagagttgggggatggatgattatttgccacagtttgaattgcactttagtttgaactactataaaaaggaccttataaagccttatactttataaataatgtaagactcaagaaactagcatcaacttaagtacctaagcaatcctgtggaaacatagatcaaatcgagtttttatgaactgtatgctgtattcttgatgctaagagttttccgtatattgttatgtgctatgctaaagagcacatacattgtttttttattctactaccaagttttttctatattgctgataggaatacaattaagaagtttccttcctattcatgttgtctgcattttgttggcagagcctaaagggaaacctacagaggcc

SEQ ID NO: 98683 - DNA, 727 bp, Vitis vinifera
  Intron number 1 from transcript GSVIVT01022875001 (locus G SVIVG01022875001) derived from phytozome v7.0 (chr-ID chr1 2; pos 18497423 to 18498149)
atttcgctgaccaacgtgaatttttcggtaactcatcctctcatttttttgtcttggtggatttttatttttatttttttcattttccaaggaaacaaaccaaatcttaggtgcaaaggggtgtgcttttcgtttcattgatgaatgcccactaaagaagagaatgaaatattggtaggaaacttttctagagagaaatggagggttagggcctttttttgctagatattgtatttttttaatggtgaattgtgattttaggggcaaaggggtatgcttgttggaagttatattcttcatggtgcagtgggggtggaatcgtctttctttttttggtctatgtatgattcaaaagtgttaaggctctatttagttaggaggaacaacttgggaaaagaaaaaaaaggggaaacatagaaggaagattggtatctgttgttgggttgtgttttgaaaaaggaaggaaaagaaatatgaggaaattaaaggggagatttatacatttttgaacttctcctttatatttaacaaagtgtgtgaaagctagggaaagattggagaaaaagtttattaggttctaactagtaatttatttccctttaatttttaccctctcaaaaaatttcataaatcaaacaaagtctaatggcttctccctttattctgctctgtttttgtgtagctgatgtacgtgtttttcatttttcaggcataccaaatacactaa

SEQ ID NO: 98684 - DNA, 662 bp, Vitis vinifera
  Intron number 1 from transcript GSVIVT01030099001 (locus G SVIVG01030099001) derived from phytozome v7.0 (chr-ID chr1 2; pos 9804322 to 9804983)
ccttcaacctctgcgattcagttctactattggaggtccgctactgaatctttcttcgttctactcagtgctttttctgtttggtttccgagaatattgaggaagttttggtttttttttttatttataaaaaggaacttggaagccttgtattttattgttttttttctggtgtttggttcctcggaaagtatacaagtcaacgtagttaagctggcgtttgaaccaaaacaggggaaaatgtgagcactggattttttttttccctctttccttctcctcgagtttcatgatcgggaagcgcagcttaaagcttcgattggaaattggtttcttaagtaaatatttgctagtttgatttaagcggattgaaattttgtttcttaggatttaaatcgaaaactcttccagcgattgattattttttgtatattgcattcggttgaagattcagaactatagaagaaccatggttccataaccattgagtgttggttgatttgacacttgatatttgttttgaacttgaatcgtatgagttcttttaatgatttagtttggctgttgataattcttttttgatgaattttaatttttcatttctgcttatagcttatgttagtgttcaatcatggccaggtctacaggtgttcttttactag

SEQ ID NO: 98685 - DNA, 488 bp, Vitis vinifera
  Intron number 4 from transcript GSVIVT01030099001 (locus G SVIVG01030099001) derived from phytozome v7.0 (chr-ID chr1 2; pos 9806111 to 9806598)
aagaccggccaattgctgcagctagtcttggtcaggtgtttgctctgtgtttaactgtttatattccattctgttttggtccaaccttggagaattatgaaatgtttgttcattttatcttgaccttacgtagcttaaaggatactaattgcaatgtggtatgatatcaagaacaacctcagagagaaactttttcatacaacaaatggaaaaattattcaagtttaaaatgaaaaagaaaaaaataatacaagtaaaggtaagaaaagaaataaatcaagttggaaactccatggctagaacaatgagggggggagcatctacaagctgatggttgcatataagagctgaatgatgaagttagactcttgataatttgaactgaccaatattcttggatattactatttccttcttgcaaatttttgtcccttttgctgatttgaattttgaagagtccttttaggtgcatcgggctgtcctacata

SEQ ID NO: 98686 - DNA, 585 bp, Vitis vinifera
  Intron number 1 from transcript GSVIVT01020541001 (locus G SVIVG01020541001) derived from phytozome v7.0 (chr-ID chr1 2; pos 4668363 to 4668947)
tcctctgcaattcaaagattcaactttctcgcgatgtaagaattgggccgaaattttggtgtttacctttctctttttcttctttttatctttcttttatctgaaatagctatctggtttctgtgaattttcgttgactttttctctgtttggctgcctggaaaaagagagggaaattttgggtctgacgagtaaaatcctcaattctcagcccaagagccacagtttagcttgtaacatcccaagacctgttttactctcttctattttctgtatagccaaacaaattttctttaaaattcgtctttaaaagagttttttttttgcttccgtttcctctcctcctttttctcggaatccaaacagagactttttcttgtgtattatttgttaacagagcggtctttcttttgctttgtctacatatttttccggaattttttatctatccaataaaaatcgttatatttttctgtcacatcaattcaaaaataaaaataaaaattcctaatcataattttcttttgtttgcacacgtctgatcttataggaggctgttgcggggaaagatattgaaaattcaga

SEQ ID NO: 98687 - DNA, 327 bp, Vitis vinifera
  Intron number 2 from transcript GSVIVT01027212001 (locus G SVIVG01027212001) derived from phytozome v7.0 (chr-ID chr1 3; pos 18212495 to 18212821 reverse strand)
caaccaacctgcccgcaaaacccgaagaagagttggtatgggctttttctcttctaggttaacttgtccatttcttgtcattgagtttctataccattgtggatttgaatggagtaggcataaaatttgtgggtttgccccgcacttgtctcatgcttttattcaaatccaaccattaaatgggctctgtgttcatgtttgattttgtccagtcttttatattttgaatatttgtaccatgtgatgctattttaactgagcttaaattggtttttcatgaaaccatctccagctagacagaagaaagctgtgaagattttccctcgc

SEQ ID NO: 98688 - DNA, 435 bp, Vitis vinifera
  Intron number 1 from transcript GSVIVT01021149001 (locus G SVIVG01021149001) derived from phytozome v7.0 (chr-ID chr1 0; pos 1851111 to 1851545 reverse strand)
gaagactggccactgacttcattggtacattcactggcactgctctctgccactactttattatacatttactagctttggatgacaatttagaacatgttgccatcagctagctacatgcatatgaaaattaatggtgttaggtgctggaaaatatcatgttcctactttaccaagaaaattgagtctgattatcttagcttgctgatttgtttaaaatactttttggatcaacaaatttcgcttgagaaaaagatgtagcatgtcctttctctattgtttattttatttttgatttttttttatccatcatgtgtcctagtccagcgaaataattaaaacgtgactacagttgtgtaatagatatcatgggctcagttcttcgtttctttttctgcagcggaggcattgggttacagaaacataattccagcc

SEQ ID NO: 98689 - DNA, 933 bp, Vitis vinifera
  Intron number 1 from transcript GSVIVT01027575001 (locus G SVIVG01027575001) derived from phytozome v7.0 (chr-ID chr1 5; pos 15433844 to 15434776)
ctcgtcctcgtttcgaacccgtcgatcgagaaaaggttaagttttggaatttggaatcataactctcgctacatgtctttaacacaaccgcgtggttaattctagggttttgaagcatgactctttctctcaggagttttatagtgttttaaagttattcttcatgattatttgaagtactgataatgtatgttaacggtagattatcagaatctatgaataatctagtgtatttgtactatgttctgtttggttgcttagaaaatgcaggaaaaatgcaagatattaaaagaattttccgagccttagattatttcggtttttttgggaccggagaagactgaaatgtaatcgcttcgtgttagctgttagctgattttaggttaaatgtttaacttaactggttgatttataaagccggaaattcctttcctatctaggcgtaggattttttgctatttgggggaatgtgtctactttttgaagtataggggatgcaattacagattctatgataaacttgactatatttggttggttgagtatagcacgagataagatacttagattcgagagggataacatatcctctacaatgtttggtgggataacatatcctcttccatgttgatttggtcggtgatgtcttaggttcaaccaaacatgggatttcatgtcttcatgtcaatatgataccactatatgttttgcatcagtcaactatcttccacaacgtttctcctctactagggcttgagaccaactgtaaataagatattaaaagatgataattttaaagcgataattcatatctttgtttgctgatagatgtgggaatatcgattttttttaattattattattattatttttaaatagtgcactttgaatgtttatttatgattgatatgattctttcccttgggtgcagac

SEQ ID NO: 98690 - DNA, 878 bp, Vitis vinifera
  Intron number 1 from transcript GSVIVT01024747001 (locus G SVIVG01024747001) derived from phytozome v7.0 (chr-ID chr6 ; pos 7243429 to 7244306 reverse strand)
caaataccctgtaactctctttctcttagatttgatttttcatcttggtggctgagaaagggttttaagctattgaatttttggttgttcggcactgaattcagtgcggtttttcgtgtttgtttttggaaacagaaacatcatagaagaaaagtttggaattttatgtcgaacggtgggttgggcttttgaaatactatcttttttcttttgggtgtttggactgaagatgatagtgatcaagttggtgtggcgtaatcaactgcatctaattctgcagatttcccttttctctttgttattaccaatattgctattgtttgatagtctgttttgtcactctgtttttgcattcccctttctcatatttaaggcttggaatggttgttttggtgccatttggcgaagattgttatggggctctcaggcagaggtggccaatctccaactaaaaacggggtcttttaaccttataatatgtgatgctttccttcagtttccacctccctttgtcctattgagtataatgctattcttacttgctcatgtttctgtatcatcacttggtttgggtaatttttcgggtcaatttggatcagggttctcaatttagaactgtattggagcttctagtggatttttatctgtcaattaaagcacaacattttcacgctcacgattctgtccacctgccttttttcttcttataccatgttcaattctttttcttttgcatgaaggtcagccactagttttatttattgttttagggagaaatttttttccagatatttgttaatcctgctttatgattccttgttcatttatttgcttcttgtcttgcttttccagtgctttgggtcatccaagggagaaag

SEQ ID NO: 98691 - DNA, 1014 bp, Vitis vinifera
  Intron number 3 from transcript GSVIVT01030259001 (locus G SVIVG01030259001) derived from phytozome v7.0 (chr-ID chr8 ; pos 9794658 to 9795671)
ggagcacctccttgttcgactttatcggggatcaggttggtatttttccgcttatgtagtttggataattgatgcattagctgaaggatttgatttccggaatttcaattccatggaattggagaagggaataaatcgcaaattacaatcttgtttttcgcgaaaacctagaatgtcctgaatgcccttgactgtgaagttttggataagggagggtttgagtgaatccgacggctagaaattaatggttgcctccttgcctgaatctggcctccacgctgccacacctcaacataggctggtcaagcaacatatatgagaattattttttttcctcttcattcagttttaaaaatccagctcaacactcgaccccaaaaacacatgttcatcattgaaccccgtttgggttgctttaagccaggtaggattgcttgtatgaagctagaaaagcttctttttcaaagttcatcataagatgactcgtactaatttaaatgattttattaaagaaatttatgatttaaatttttttttttataaagaaattatgattctaatttcagccgtgtatattaaaataaaaaataaaatactatttgaagcacttcccaggtattctcacttgcttctagaactatgtgttttttttttttttttaaatatcaatttaaagaatcttgttattatcaggctttgcttctagatggaaaatatgagttggaagcgtgtatagtaatttcggcatcattgatgacgctttcaatatgtgtaaattgaggtgggcgcccccatgtgaactgagaaaaacgtgataagagtaatccaatagggttggggttaataagtgacaagtgggacattcagattttaaaattcagtccttccaaattgttagactgccaacaagtcaacgactaaatctctcagcaaaacctcatcctttgattttcgtgaatgaaattttgtgggtttgcagattgtggcttacttactgatatcttcagcatcagc

SEQ ID NO: 98692 - DNA, 835 bp, Vitis vinifera
  Intron number 2 from transcript GSVIVT01021808001 (locus G SVIVG01021808001) derived from phytozome v7.0 (chr-ID chr1 4; pos 7109891 to 7110725 reverse strand)
ctgagctcttggttggaaaggtattgcattttcactcggtttcatcaaggactgtctaattcaatttaatttatgggtagcctaaaagggattttctgatttggttatgttgtaatgaacattagtgttgggctctttggttgcataagtcaggcaagaattaggagtataggatttaacaatttgcagaaattgtaaataggatctaatttatgattattctactgggttctagaaagggatgttgttcaaattggttcatctacctttagatgaggcctgaaatgaatgtgaactgtctggtattttaccactggatgctctgttggttatataacttaggttgcttttgattgagtgctgatgaaaaacctcataaaggcggatgatgccattggaactggcttgtatgataatgtttatgattttgatgtcagtctattatgttagcaatctatgtaatatgagatggacaggaaaagataggcaccaaatttagagtagggcatcactctcttttattttttataattatatcatacgttactcattatcggcattgatgatcaatatctgtgtctgcgaccacaatggtgtcttgattgtttcttgaatcgtctcttgaatgtagttctctataatgaacagagccaatatgtaatggaatagggaaaaaagttcagaatgctgcttgagaatctgatggttagggaatgaaaattataatgcttaagcaagtaattcaactttgttttggttttcttgtcaattattttgagtgccaaaataaaatgttccaggtattgaaggagctacctcgagaaaagatccagtt

SEQ ID NO: 98693 - DNA, 770 bp, Vitis vinifera
  Intron number 1 from transcript GSVIVT01026967001 (locus G SVIVG01026967001) derived from phytozome v7.0 (chr-ID chr1 5; pos 18949465 to 18950234)
agtctagttcaaatcaggtattgatgaattctgcacatgaaactgaagctattgttcttcataggttttttttttttccattttttgggtgatcatggtgtttaaatttaatggatattggctaaaatttggtacaaatttgggtttagatgagcctagaatccgagctatgacaaaaattcaggtaaaaacggctgctctaatcttttcttttgcttatagttgctgaaaattttggattgcttctggtttaatctggactcctgaaatttcccttttgtaaaccataacgaagtgtgtgaatgtgatgaaaggcacatgaaatatatgtttttttgggaaatctgtcgatatttgattatggtgtgaccaagaagaaatctgctgcatacatatcaaatgccaaaattggaactgaactgacctctaaactctttggatttgaatctctgtttgagaccctgtttccaaccaatgtctatgttcattggagttttatggatgaatcatttggttttcgggtctagagagttgaaggcaattgaagtgaccctctttcacatgtgtacctccatttacaaaatattcttggcatgtttgctttgtaggttttttttttttttttaatgcttttgaagttaaacaatgtagtttgttctcactgttgaatttttttgataagaggatatttggataccaaattggttgagtttgggtgtaaaagtttaatggttggttatctcacagttttaattatgagcaggcagttg

SEQ ID NO: 98694 - DNA, 583 bp, Vitis vinifera
  Intron number 1 from transcript GSVIVT01022311001 (locus G SVIVG01022311001) derived from phytozome v7.0 (chr-ID chr7 ; pos 18407996 to 18408578)
caggtgtgtctctgtgactatgtgtgcttggtttcataatttcatcagtttctttctgggtttttgttttcctggcttgttttttcttttccatggttgaattctgttatattttgatccgattcccctgccttgaaattttgcttcacttccaattctgggttttaccgttcaatctcatttggtttcttggtagaatttgtgcggtgcttttgtgtttgtgtaattacctcgatcaatatgaaaaggttggttcttcccatctatggaagtgggttttcattcgccatatgtgttggtttggcctcaaaaggggaagtatctcggtgctggtgtttcttgcttgcaatggattctgtgatttctcaaatcaaaatgcattcaataatgtcaataataaccctcaatgatggtgctggtggtgttttcattgctggtctggactttgtaatctgtcaaattaagatgttccttcctatagaaaggttctactttctctttgattatcttttatccaaactgcaactgatgaactgagtcgtcatttctaggtataccccatcaagtataacaccatctcctc

SEQ ID NO: 98695 - DNA, 978 bp, Vitis vinifera
  Intron number 2 from transcript GSVIVT01023755001 (locus G SVIVG01023755001) derived from phytozome v7.0 (chr-ID chr1 1; pos 10653820 to 10654797)
ctttttttctattttttttaaatttttatacgtatgtatgctgatcaaatttgtggactttatatttactttacatgctttaaatcatctgattcttttgatttctctatatgtttttcatgttatctagctaggtagtggagcagcaagaaatgacaagttctgaaacaaacattgttaagaaatgcaggttatggaggaagatgtttgtagaagaaaaaggataaaaaagggtaaatacaatagcttttacaagcttgaagaaatggatctctaagttgtttttgatggaattagtttccaacctagagatcatttactaatgcagtctttctaaataacaccagagctacctcacaagtacacatgatttattatttgctcccattgaggttgctaatttaatataaggatcatttattcgtcctctaagaataaatgttttgtcattatattttaatgatttgtctcaatatttgaatttatagaatcaccatcataataaatcaacttgagaattccaatagaaaattatatattaaaaaaatttcataacatgatctatagctgtagccaaaaaatgcatgcagctatatcaccccttttgatagtggccaagagatgaccccaactaaaaggtctttcaatttataaggttttttagttgcggtcattcacccatcgtcatcaattaaattcctttagtcacggaagatatatggctgcagctataacatttataatcaaatgtcaccgtgttttatatggttgtaactataggatttatctccaccacctatggtcacgtttcatcatggtcaattatatccactctcatatcctatagtcacaattgtttgacttttagtgcggtctttggctgtggctataaacttattatcttgtagtgtcatattcttatctcctttgaattgtactaagcgaagattgcaaaaagacctagcttcagcaggagta

SEQ ID NO: 98696 - DNA, 572 bp, Vitis vinifera
  Intron number 2 from transcript GSVIVT01024240001 (locus G SVIVG01024240001) derived from phytozome v7.0 (chr-ID chr1 6; pos 135424 to 135995 reverse strand)
agcgtgcctttgctgcatttaagatatcctttcgtgtgcctttagatttgcaactgtgtacattagggtggctgtgtcattggggttgagatagctcgtaatgttctggcatgcaaattttattgcaaaaaaaagtatgaaatgtgatgatgttttttgcggaaagtgatatcctgaaaatgagagtggctgcttctttattgtgatgatgtagctggtttagtttacttagtacaatgaagctttaggggattcatttatagagtcatgtgtaaaagttgaagaaatcaaatcagactattctaatgtggttttcaagtactctatgagtgatgagaaacttaatatgaagaaatcaaatcagactattttaatgtggttttcaagtaccctatgagtgatgagaaacttaataccaatgaagctctaggtgatttctttaatttatatatcagagttgtgttttcaagtgctgtgaaaataaagtaccctttaatagggtttctaaacaactagaagtaattagattcatttaagaaagtccattgtgtaggctaggttatcttctgtgc

SEQ ID NO: 98697 - DNA, 945 bp, Vitis vinifera
  Intron number 1 from transcript GSVIVT01021559001 (locus G SVIVG01021559001) derived from phytozome v7.0 (chr-ID chr1 0; pos 7076870 to 7077814)
gctagtgaggtttgtgtctatatgaatgtgcttttgggttttgaacattgatttacaagctagagattaaatatggaatcttgtttgttctacaaatgttggagatgttacaatattacaactgttgattttctatgatgccttgatgtcttttgataaacttagaatgaattgtggactttggaagggaggatttcatcaataagcatgtaagaaaacaccataagcacatgttagtatgaaaatgactaaactggggtatgaatacctaaaaatgttaaccttgtacctatagtaaaataatggaagttcaaactctggaaatcatgtgtttttcctttttaaattgatccatgcatgaaaatatgaaaaacattgctgaggttgtggccattaacaatatatccctagattggaaaaggtacaccgttgggctaacctagaactacaagctaggataagaattagtcacaatcatgtacctacaaaatctacttataatttctagggaactttggagtgcatttacatgtgtgtgtatacatgtttggatgtatatatatgtttacaagataaaaacaaaaacttgtactagatgtaggcaaatgcattcactagatacaaaaatttccttgtgtcacttgttgagaccaaagaaatacatatttggatgtggtgattagatttcaacatagccttcttgatggtttggttcttgaattatgaggcggtagtgtctattgtacccttaaattttactctgtatcaagtaattactaatttatggaggcaaaaattccttgtctcatgaaaggaataacagtttcttgttcatattattttgtttggatgtggggtttctatattattcaaaatgcgattttgattgcgtgattgttgcaactcatattttgtctgttgtttgtattatgcctgtagggtaat

SEQ ID NO: 98698 - DNA, 555 bp, Vitis vinifera
  Intron number 1 from transcript GSVIVT01018952001 (locus G SVIVG01018952001) derived from phytozome v7.0 (chr-ID chr4 ; pos 18412746 to 18413300 reverse strand)
aacaagccatcgatacaatccctgaagacttgaaggtttatttcttttaagctttttcttcttcaaaaaccctaaccctctgtttgtttctgaaaaaatggtggaactttgatagtgagttttctattgttttgctttctgaaaattctgactagtcattgaatgtttcttgatcagtggttttacctttgtctgcttcaaaataatgaaaaatcgtgaaactggaagttttgttatgctgtgtgctacttggttacaaatgcggggaaagaaaaataaacttgaatttcctttgtgacccgagaatccactaacctccacgtatctcgagcttaatatgattagttcagttgaatttttatttttttggaaatcaagacgacttcaaaaattacagttctcttgactcagcaaccaaaccgggtgttgttatgtttgattgtttggtttgttggtgcccctttttttttcttcaatgctattgtcttggacgcttattgtgttgttgacatgtgagcaggttacagcagattttgctccacaatttgtcagaga

SEQ ID NO: 98699 - DNA, 523 bp, Vitis vinifera
  Intron number 1 from transcript GSVIVT01020570001 (locus G SVIVG01020570001) derived from phytozome v7.0 (chr-ID chr1 2; pos 4219316 to 4219838 reverse strand)
tggggtttctacctacctgtgggtttgcaaggcaggtaatgcattcttagtttttgattggagattcttcttgggccatttggtattgaaaagggaacaaatttgggaagaaattccaaattcgaattatctataattttatacgttcataaaagatatgaaaatttttatttagtttaaaccttttttcttttcttgattttctcctttttgttccctgtacttgtctcaaactttctgagattcaaagggtattttccctcaaatcttgaagattgaaatggagccttaatatgtttagatttgggtttgcagtggaattactttgcaaacatccattaacctggggggctcttttccatggagaagtctcttagataaagaaccaatttgggttacccttttcatatttttatttcaacttccatttgttatttgagtatatgagaaagaattgatttgggcaatttttatctaaaatgatgcagaggaaggggttcaagggctctcttaaagtggttca

SEQ ID NO: 98700 - DNA, 470 bp, Vitis vinifera
  Intron number 1 from transcript GSVIVT01027638001 (locus G SVIVG01027638001) derived from phytozome v7.0 (chr-ID chr1 5; pos 14790784 to 14791253 reverse strand)
aaaggggcttgttcttcttctctgaatcaatctatgtaagtcttcttcttaaattcatatcgtttccttttaagcgggtaattaagattttattcttcggtttctcttcatctgttttctttgtatccaaacggattgttaggttttcctctctctctgtatatattttcatgtatgatctttattattagggtttttgatcacttgaactttaagttcaaggttttgtctttgttccatttttcttttgaattcacagttttgatcgaaatttggtgttgaggtttgagttccttggatttggtgtcatggagtagtatcgttagattcacaagtcgtgaatgatttttattaatcatctattagtaatggattgataaactagtgttgaatttttattttggttattatgttttgacctgatctccgttgaaggtattgctcccttatttctttgcagtttttcaact

SEQ ID NO: 98701 - DNA, 336 bp, Vitis vinifera
  Intron number 1 from transcript GSVIVT01024248001 (locus G SVIVG01024248001) derived from phytozome v7.0 (chr-ID chr1 6; pos 180475 to 180810 reverse strand)
tcctctactcatctccaccaatccctccccctcaggtaactttacaattttcatttgccctatatgggttttggcttttgagtctctgtgtcgcatgggtgcttggaattttctcgatatttgctttttgtttctttttatcttttatgttctggatttgctatagttctggcttttgagattgtctatgtgaggtatgggtgctttggaattttatctatatttgctttgtgtacttgagagaagaaatggagggttgttgaatgaatgaggaaacattaatgtagtgcaattgtggcagtgtcaacattagtcatttggaggctgtggttcaca

SEQ ID NO: 98702 - DNA, 706 bp, Vitis vinifera
  Intron number 1 from transcript GSVIVT01021332001 (locus G SVIVG01021332001) derived from phytozome v7.0 (chr-ID chr1 0; pos 4142871 to 4143576 reverse strand)
gtgcacttgttgtgaatataggagacattctcgaggtttccccacatactcctttctacattttggaaaccgtagctaccgttttcaaacttaattttttctgttttaattaaatatcattttcagcccatgcttcatggttttaatatttatgagtttattagaatgtaggctccgtatatgcttggatcatgtaaaaagccttgttgttctttcattctttctttctgtttttttctctcagcttttggatagattttggtttcttttttaggaattatgagtttaattattagaacataagcttccacttatgattgtaattttttttattgtgctctaaaaatagccacataaagtaaaatataattaaaattagttaaaaatttatatatttttaaattatttaatttttatattaagaattaaaataagtaaaataaatttaaattaatatataaaaataatttattaattttaaatttattttttattttcttgcttttttttctcgttttatttttaggaatcaaatatggagaacaggggaaagaaaaaagaaaagaccaaaagaaaagaagatagaaggcacacacaacactaaataatgagtagaacttaagaaaaaattccccttttttaaccaattgccgcgtcttcctattttgcagattctgagcaacggggtatacactagcatagagca

SEQ ID NO: 98703 - DNA, 329 bp, Vitis vinifera
  Intron number 1 from transcript GSVIVT01026879001 (locus G SVIVG01026879001) derived from phytozome v7.0 (chr-ID chr1 5; pos 19688123 to 19688451)
cagaagggtcatctctcagtggaggacacaacgtatgctctcacacatcttattaagtttccttcactttgtgttgatggatgatactaatgaaaaacaatcacccaaaaacattgaagaaacattgcaaagaccaaaaagaagatcaaatggtagtgaaataatgtacataattgaaagttacacaattccaatcgttgcatgttagatagcatgatttgaattgtgaacctaaatcttaattaggaaaagtgattgttgggtgatttaccaatgctctattttacgtagcttatgttttatcctggtaggcgaattcggcatctggg

SEQ ID NO: 98704 - DNA, 736 bp, Vitis vinifera
  Intron number 2 from transcript GSVIVT01029507001 (locus G SVIVG01029507001) derived from phytozome v7.0 (chr-ID chr9 ; pos 22199901 to 22200636 reverse strand)
tccttacattcttccagttaatccaggtctctctctctctcactgtgtgtgtgtgtgggtaaatataaatgtaaatataaatatggatatgaatataagtctcctgcaatgaggtgtaaaggatcatggttagctgtagaagaagttattaataatctcaatttgatgcataacaaagatcctaactaatggggaaagtcaaatggctagaaaatacaaatggatatgattgtaacgcataatgaaggattggagaattaaaattgcttttggacaactaggacaagaatcttacattagaggaaagctgtagtatctaattttattcctcatgttagagaatagaagcaaactatggagcaatgaggtttctttaaatagaatcctagactttgaaaaggctagtttaattatttttttaaaaatattttcctcgcatttgggttcttgccaattttatttatatttttggggattttcccctagagtgtcctctttattccttaattcattacaatcaaagctttaattgatttttcaattactttgctcgggtttttttctcccctgttaacagaactaggttttgtttccactttattaaagactttaattttattctccttgacaaacaagttaccaataaattaggcagcttttcaggtttattttatctcactacaagcaagattttatttattggtggtaagctttcaaatttttatctataggacgg

SEQ ID NO: 98705 - DNA, 852 bp, Vitis vinifera
  Intron number 1 from transcript GSVIVT01025119001 (locus G SVIVG01025119001) derived from phytozome v7.0 (chr-ID chr6 ; pos 4266227 to 4267078 reverse strand)
cctcaagtgcacaacgccaggtaggttttgattagggaggctctgtgggtgttgtttctttctttcgatctttcatctcacttttcttctcttttatgcttgcttcttcgaacttgggagaggaaaagggattttgtttttgaggaataattgggaatggtattgggttttgggtattttctctttgctttttatgcttcttttttaggaattgaagggaatttaattatgggttttggatctgcttcactgaaactagcttaaaaggaaaagagacaatgatttttcgaggtctgccttttggatgttcaagtgttcgatcacttttctaacttgttctttaacaatgaaatcttaaattttgaaccaagcaccgaccttttttaaaatttttgtttatgaattaagggcagaatgaactcttgtggcctttgggaaattttcccttaaaatctgtcaaccccatgtcctcattttctctaattttcctccattttctcgtcaatacaatgggctaataatggtttggcccccctctttttttgtcctcttcacaattgcaatttcatgacttataatgagcatttaaaagtgagaattaggaatgccattaaaggtttcagatatttcacaactcaatcccacaaggaaaatgaaaattgttgattctatgtgcattaattttagtttgataatgtgtgcatttatctataagaaaatctttttcttttctctctctctctctctctctctatatatacatatatatgtatgggagtggtctggagcttcatatatatcttaccatttttcttcaattaattgtataattatgttgatttgtttcaggaa

SEQ ID NO: 98706 - DNA, 382 bp, Vitis vinifera
  Intron number 1 from transcript GSVIVT01023325001 (locus G SVIVG01023325001) derived from phytozome v7.0 (chr-ID chr1 2; pos 19728006 to 19728387)
atattcaaagattgcagagtctgcaagttgaaaaggtaactaatttagataggtgtcatgaggttgtatttttttgttatatcctaagtctcacattaggggtttattggttaatctttcctttagtgggggacacttgctcttccctttcttctctattttctgattattacagagaactatgttgcttagacttcaagaatcttgatcttgcttttagtttacatttaactacattaacctcatttttctttgacctgttttccattttatgcacattcagagagaagtttctatttattttatttttatttatttatttgattattattattattatttttttgttaagacacttttgattggaaaactttttgcaggc

SEQ ID NO: 98707 - DNA, 865 bp, Vitis vinifera
  Intron number 2 from transcript GSVIVT01026580001 (locus G SVIVG01026580001) derived from phytozome v7.0 (chr-ID chr4 ; pos 21429753 to 21430617 reverse strand)
atctggtatttttggtgtgatttattgtgagagaggtgagatctagtctgatacaaaggttgagagtcctgatttgtaggatcgatgtgttttagttgcttgtggatcttttatgtgttgtgaagccggtgaaatctatattaagttgatttgttcgtctgatctgctcttcttttgtttggatctctgctttttatcattgtgagtcagatctgacttgtttcatgtatactcttttgcttaattcacttgatttgtgaaaatattttctgcttggatctgtcgaaggttaattatgttgtgcctttgatgatcaagtgtaaattttgattatcttaatattttttctttggttgctgagaaaatggagcaaaaaaaaaaaaaaaacatagtcatgaatctttaatagtactgcatggtttctaaggatgaacaactgtcataaactgaaccgaatggttggtaggaccccttgagtaagggatttgtttggaggtccaaaattatctaaaatattggatctacgaatgtaatttattttgattttcttagcatccaagcatagaattaatcattgtacattgcggacttagtctgttttggaactttttgattcaggaaatcaactgatttggagaaagtatctaaaccaataggcattatgtttgtttcaaaaccaagtaaaattttggtagcctcatttcaaagtatcatttagatttgtatgtttatcatttataatgagcgagaaggcatggaaattatctgaaaaagctaaaaaggtgaatatttgtcaagcagcaaaacttaaactttgttatactttgtcccctgacttcatatttctcatgcaggtaataaaagg

SEQ ID NO: 98708 - DNA, 955 bp, Vitis vinifera
  Intron number 4 from transcript GSVIVT01029631001 (locus G SVIVG01029631001) derived from phytozome v7.0 (chr-ID chr9 ; pos 20457570 to 20458524)
tgacaaagattttgcagctcttgcgtttgagacaggttagatgtcaaaccactgcatctggaaatgagaaataaatggccgttataaatctaataccattctttgtgcttgacagcattaagtttcttctcatatcttatatagatattcctcctcaaaggatatagtggggtagggaattggggttgaacaccagggtgccctttttaggagtagtattgccagttcttgcattgttaatcagaattgttttcttactgtatcagatcaaatatacatacatatatatatatatatgtatgtatgtatgtatgtatatttgtttcacctcagaatctgatgcttataccttagcactgcggctgtgatgaaaactttgggcagatggaaattggtattatctgtattttttctacgcttttgatagtatattgtgacagtagtggcagtatttgccagcttgctatgcccaggtactatgcgtgatactgtaccatattgcttctgagataggttatggaactgtggcccattagcattcatatcatgtccataaaacactcttgacactcaaatggcgaagacaaactacaattttcattaaccaaaataaattgtctagtgagagcaaataatctagattgaaacgttgaaaatcaatgcctggctatagtactcaagaagctgaattaaatgtatcaaggatcaaatatcccaaacttgtattcttgatgctattttggatggtgaatcattagttcatcttacaaactgcttccttagtgattgaacattgttagttttatgtcaaatgaattagttatgcatcatcaataaggatataatgtctcttatgatgagcttactaatctaagcaagctatcccattaaaaaaatggagtgttctttgatgacataagatcttctcattcgcttctttgaatacagatattca

SEQ ID NO: 98709 - DNA, 917 bp, Vitis vinifera
  Intron number 2 from transcript GSVIVT01024813001 (locus G SVIVG01024813001) derived from phytozome v7.0 (chr-ID chr6 ; pos 6673040 to 6673956)
tcgcctgcagtgctttcagtgcttgtttcgctgaggtactgaggatcttcgtctgtgtgtttgtttcattgtgtgaatcgtcgttttcagtcttctgttttgttcagcaatgacattttttttttgttgtatttggtgttttgtgagaagtaaacgttggaactgatactaggaaaaatgcccaattgctgatcttgcagtgtaccgtcattgcctcatgctgattttgctctggaatttgttgttagctcaatggtgcatttgcttgattatacccttttgtttgtttttttttttcctttttctttttctctgttttgaattttctactagttgggagaattttggtgtatttgaaagtcgtgtctgagctccttaatggtggtcagatcttaaattatagaatagatattgggattttgaatgagaaagagaagcatcttttttggtttggggaatggataggtctgaatccgggctgcctaagcatggtatgagggactttaggccaagaactgaaccagctggatccagtatttatgctggaatgataagtattagtttggctttctcctttgtgaggttggccaattggtgtaagcttgaaaattcattaagaatcagaaaggtgaaggtcaatctcaatcttgaatatgtgaaacaatttggcatgatttttaccgagatattagcatacttgagaacatgtacgagaacctgtatttcagtgtgcataatatggtcactaattttttatgatgctcgcatttgttcaatgtattgctttacttctgagttgcttagtagcatctggcatatatgaaatcaatttttataattattgtagattttctgtgacattatagaacattttctgtgcagctctgtaccattcccttggacactgccaaagtaag

SEQ ID NO: 98710 - DNA, 504 bp, Vitis vinifera
  Intron number 2 from transcript GSVIVT01019458001 (locus G SVIVG01019458001) derived from phytozome v7.0 (chr-ID chr2 ; pos 811530 to 812033 reverse strand)
cactgcgacagcctcgcgtgattgcagagattgttgtaagttctttttactctatctctcaccttgaatgcattcatcttcaaaattcgttctctttccgtccaaataagttctttttattttcaattattcttagtatttatataattaccttaagcccttccttttagaactatcctaagaaggctgttttttgtccaaaatttcccagacatgttttggaaaaacaggtttatgcctttgagaacagaaaactgtaactggcttttctcactaacagctttaaaataacagtgagaaattaaactcaaggaataaattttgtattgacatttttgttttctgggattaaaggggtttcttgaagttagaagttcttggtacttctaatatactccacactgctgtttgggaaaacctgatattcattgcatggtggagaaataaactttgattttcattttggcagggaggaatattacttggtccttcagctctgggtcg

SEQ ID NO: 98711 - DNA, 785 bp, Vitis vinifera
  Intron number 3 from transcript GSVIVT01021226001 (locus G SVIVG01021226001) derived from phytozome v7.0 (chr-ID chr1 0; pos 2744729 to 2745513 reverse strand)
gcttgatttacctgggactgctgatctatctcaaggtgtggtcttatactgcaatagtttttttttataggtaaatgcaagtaatattaataaagcaccaaaaatgcacaccaaagtcaaaatcctgttcttttcttgaagtttctagaaactttagaagttagaaatagtcctggtatgcaatgaaaacatttgctcatgtgaaaatagcacaatttctttaatgggtatgttgcttatgtccttcaataaagacataggatggaaaagaatttggacttttgaaatttgtctttgtttggatcctgaatggcaaggatgaaactcgtggaaaaagatcagtggaagtggtaaaagttgtaaccaaaccttcaacattgagggggtttactcgccaaatgaaaaaaacagtttttcaatatgattggtttcattgcatatgtgcgacaaggattgcaaatattggttaagttcactgttaaaaaagcctaacataggtgcataggacaggacattgattatcaaatgattggtttcattgcatatgtgtgacaacgattgcaaatattggttaagtacaatgttaaaaaagcctaaaggatttgataatcaacgtcctgtcctatgcacctatgttaggcttttttaacagtgtatttaaccaatatttgccatccttgattattcatatacatatgccatgttgtttattacattcttgttaagcttattttgattggtgggaatttgcagcaagacctgcaaaactagtgagggattgtgaa

SEQ ID NO: 98712 - DNA, 744 bp, Vitis vinifera
  Intron number 3 from transcript GSVIVT01019026001 (locus G SVIVG01019026001) derived from phytozome v7.0 (chr-ID chr4 ; pos 17600036 to 17600779)
cattgacctactccagtgtactggaggatttacaggtatacgtaacctttgatgaaaatttgtatgatgtgatgcgtacttttattacaatacatgaatattgtaccaagttctgagagacacgttcatagcacctgaagtctgccaaagaagtttttttattatcgattttcaacactcattttgcccactgaagaagccattatttttatttctaaacatcctgtaaggaaaggtctgctttaacatgtaaattaaacttgaatccacatggttgcaagtgagattgaatccaaaggcagcctatgattataatacctcatccgatggctgtaagcagaggattgattctttcatagtgtaacttctgttgcctctagttggtgaaggttttttggcctgtttcattaattgatgtaatagtcaaattgcatgtgcgcgtcttatgataagctttataagataaaaagttctctcaacactgttctattaacaaggatctttttaatttgggttaatttcattgatctcccctaaggttttggttaaatacacttcgcttccattggtttgaaatttcatcaaatgtctcccatattcttctcatttgatattttcatttacctcccctctaattcaaaataaaggagatatttgacgaattttcaaaccaatggaggtgagtgaaattaaccttttaattttttaggctttgaaagctgcagggcaggtttggctgctgtc

SEQ ID NO: 98713 - DNA, 706 bp, Vitis vinifera
  Intron number 1 from transcript GSVIVT01027479001 (locus G SVIVG01027479001) derived from phytozome v7.0 (chr-ID chr1 5; pos 16444548 to 16445253)
gcaaagataagccatcaacttagctgtgagaaagtaagcttcaaatatcagttcaaaggaatcttctcttgatgttgttttatggttttatttcaaggacttgtatgtctaagacataaagaaaacacatgagtattttacaggacaataaatgaaaaactattataaaggaagttaaagatatcatcaataatcagtaagtggatgtcatctagttgcaattaatgcacggtagttttgtcaaagaaccttttgatgcatgaacgattagagaacatagtccacaaagttgagaaacttctttgattcttaatagttcatgcaatgtactattcagtatcattaccatccaaaacctgttcatcctcaactttctcagactgcagactagaagaatggacaactagattgactttcatctcctaacaacctacaaatagtcataaatcaagacaatatcaggagcttaagtttagctcttggcagagcttggtcatgtacacaatttaagccaaaaaaaggctgttgggagtataaagaaatgggataaaaactaaaacaaagccgaaatctctgcaaaaatgatcattttgaataatcaagaagccacatatgtttttgaggactactaatagttgcaggtggactccaaaaattttgtttggtgataggagttttggttctggagcactgaaagaaacttgaa

SEQ ID NO: 98714 - DNA, 698 bp, Vitis vinifera
  Intron number 1 from transcript GSVIVT01027597001 (locus G SVIVG01027597001) derived from phytozome v7.0 (chr-ID chr1 5; pos 15177054 to 15177751)
gcatttgtgaggtattttctccgtttggttagctagaaaacgaaagaaaactggttttgaagaggttttgaagcttggggctacttgggtgtgttgtgttttttttttcttgtgtgttcctttttgggtaggaaacaaagagaaatgccaaactgaacttcctagtttctttcaccccttgtttggtttctgagaaaaaaagaaaagaagaaaacttggaagtgttacattttctcctgtttggtttccgggaaagaaaaatgctaacccgacttacagccaactaattctggaaagagtcagctttctgtttttccagttctttctattttcccttcttttcctccgtttcttggcagccaaacagggctcaagattaaatttccaaaaaaatcattttcattgcttaaagatcttaaatccttacctgctctaatttttttcgtcatagaacaattctttttggttttatctgatcttgcatgggacccatttttgtccattccattctaatctctacttcaaaacaaatgaaaattttggatgcttcaaaatctttggtagcattctgagcttaatgcccttgaattgccctttttccttttttttgatgctactattgttctagtgtaccattgacagtgaagatctcaacagctaataatttcatttaattttttttgctgaatttcaggaat

SEQ ID NO: 98715 - DNA, 600 bp, Vitis vinifera
  Intron number 2 from transcript GSVIVT01022024001 (locus G SVIVG01022024001) derived from phytozome v7.0 (chr-ID chr1 4; pos 4174252 to 4174851 reverse strand)
atctaggcctttctacggcagaggtgaagtaccaattgttcctcttctgatcctaaccttactgcatttccactgtatcataaccctataaaataaattatacatttggcataaattttgttctacagttgactatttttagattcaggctcaaatggaatcgggtatcaattagaaccgaaataaacagaaagaaagttgattgattttagattcttctgtctttcttatcagaaaactgagctgaggattcagaaactatttggttaaatttgactccagtgtaaattttctatgtagagcataaaaaccttattggattttgcagttatgcatgtaggataatgatataaagacaaatgttgataacattaatcagctctttacttctagaatgacccccaaagcattttcagttcctcatttggatgcagcaatgatctgcatatcaaaacatttttagtggaatatattgcttagatttcacatatgccaattctccttctttcccttctacatcagcctaactaactaattgttgtctcctgccttctccattatgcagtactccatttttggttcaatattgacaattggagg

SEQ ID NO: 98716 - DNA, 786 bp, Vitis vinifera
  Intron number 1 from transcript GSVIVT01022024001 (locus G SVIVG01022024001) derived from phytozome v7.0 (chr-ID chr1 4; pos 4174857 to 4175642 reverse strand)
ttgctgtttgtggctcatttatttttggtactgctgtgagtgtcaccacccacccccaatattaattgtcttatatgcttctgtgcacatcattgtacgaattttagcttctttttgaattttgatagactttggaaatattgaaatattagattttgtagaatttttgaaattaaattgtcacataagacatcattgaattcatttagaaatgaagttgaaatttatggttgcatccgaatttcaaatctaatctatgcagctgatggggtttgaccgttggatgatcgcataaattaagtttattaatctgattaccttttcattttccaaaagtgggccaggtttcatgtcatttcttggcccagctctcagttgttaaagaacggcccacgtagtgtggggccgggctcggtccggcctggcccaggtcagaacttggtacctcgccataggagaccgccggcgtcggagaggttcgccggcgctgttcgcttcgttcttcaattctcccaaacctcgacttccagtagatagaaaccccaatttatagacctggagcgctcgttctctctctcttccattttcatccgagactcatcgaattttttgagtttcttttgaggttgttctcgctagaaaacctattttagccgtccgtagattgacgtcggcgcctggaatctccggtgaaacgtaaaaagggagcggttttggatgaagtaatggttagtttatggctgaattgcaggtgggatattcatcaccggctgagtctggaatcgt

SEQ ID NO: 98717 - DNA, 719 bp, Vitis vinifera
  Intron number 2 from transcript GSVIVT01025986001 (locus G SVIVG01025986001) derived from phytozome v7.0 (chr-ID chr1 8; pos 26261129 to 26261847 reverse strand)
ctagcaacgtaaaacaactttggaaagggaatagggtatgatcattatttaatgttttttttctttataataattttcaattttttattttttttattaacaaaatgtcttctgttatagcgtcttgaagaattaaagggcattgatctaagtaactcaaaacaattggtcaaaatgccaaaattctcaagcatgtcgaatttggagagactgaatcttgaaggttgtataagcttgcgtgaacttcatccatctattggcgatctcaaaagtttgacttacttgaatttaggaggatgtgaacagctccgaagtttcctatccagcatgaagtttgaatctcttgaagttctttatcttaattgttgtccaaacttgaagaagtttcctgagatccatgggaatatggaatgtttgaaggagctttatttaaacaagagtgggatccaagcactaccaagtagcattgtgtatttagcatctcttgaagtccttaatctctcatattgttcaaatttcaagaaatttcctgagatccatgggaatatggaatgtttgaaggagctttatttcaacaggagtgggatccaagaactaccaagtagcattgtgtatttagcatctcttgaagtccttaatctctcagattgttcaaatttcgagaaatttcctgagatccatgggaatatgaaatttttgagggagctttatttagaaag

SEQ ID NO: 98718 - DNA, 616 bp, Vitis vinifera
  Intron number 1 from transcript GSVIVT01021650001 (locus G SVIVG01021650001) derived from phytozome v7.0 (chr-ID chr1 0; pos 8748934 to 8749549)
gctcatttggccgtctctcaggtcaatccaattctcgcattcccttcgtttcccgagaaaaaaaaaaaacccaaaatatctccctattgctgttggttttcaaaattttacaggctcgcaattatgtgcagaggattgatttttaaatcatgagaactttgagagttttttttcttcacaattttaggttttgtttattttccttcgctttctcggccacctaatgctgtgaaattgattggctaatttagtttggataatttctgtgtttagttttattaattcttttgttgcatttttgggcttgtgttcgttgggtttctatgatccgtttttcgattttattgttgaaagtgtttgatggctgagaaagtatagcaaaagagaagataatcagaattttgaatcttacctttcaagatcaaaccggttgtaataggcactgttgggcagagttttttgttttctgcatttaattttatcttctttccccacctttttccgaggaatcaaacagaagataatttattaacttgattaatttctacagtgattctaatgaagtgtggaatttagtgcaggtttctgtaactgttccggttggtggcgagtcgtc

SEQ ID NO: 98719 - DNA, 980 bp, Vitis vinifera
  Intron number 1 from transcript GSVIVT01025306001 (locus G SVIVG01025306001) derived from phytozome v7.0 (chr-ID chr6 ; pos 2243158 to 2244137)
tccgtgatcaaaggcgtttcaatctctgcaagaaggtatgtttacgcctaaccttcttctttctcgtgtatgtaatctgctttaatcttcaaaccttgtgtttggttgctgagaaaatcaaagaatatgaaagaaaagagagaaattgtgaatgaattacatgcttttatgttcgcttcaagaacctaaaaagcttgccccagctaacccaaattgaaatggatcataacgaaatggtaaatctatgattcagaattttagtttcttgtttctctttctgaccttttaaatctaattaaatttgcagttgctgtggatttgatttgattctttctttttcttgaaaataatgatgggatttaaggtttctatcggacccatcactggttttgggtgtccggagcaatattgtttattgtaggaagcttgaagtttctgtaacacatatttggggtctaaaaaatgcttttggaacctggttttagtgtctttcttaatggagtcattcgatttagatttctctgtgacacatttcatgttttggaagcttttttgttgtatgtttgttggaggtgtccaatgaagattttcccttttagcagtctcgtttctatggttctgaatcaagggaatctagaggataaagtcatgatttctggttccatttgtacaaccattgcgaatcatgggtggcattttgtcctgatctcttgtaactccttatttggaatgttttatggtgagctatacaacaaggtactaattggaaccggttcaactttcagtataggagtcaaaatattttgaatggtctgcaaaatcttgttagaagctaacgaatatattcctggttgtttgtagatttcattcgggtttggaaagaaaacgaaactgtatcttattatttatgtttaatttattcctcttgtgaacatactctggtatttcattctcaaggaagagagcattggaagaacata

SEQ ID NO: 98720 - DNA, 943 bp, Vitis vinifera
  Intron number 2 from transcript GSVIVT01019042001 (locus G SVIVG01019042001) derived from phytozome v7.0 (chr-ID chr4 ; pos 17449780 to 17450722)
cctgcagattcttaatctgtttcaggtgagttactgacgcatgattctctctctcaccccattttagtgaattacttttgcataccatgtcaagaatctaacaggcatatcaggcatgtggaatcagtttccttcctttttccaatcatttgatggatggtggagggtgttgttatatgaacatgagatttgctggtatttaataaaatttcgtagctatttcatgctgttcggagtgggcgtcagattggggttttgggtaaatgattcattttggcaattctgtatttggggtgtgtcggtcgtagtgttcttgcctcctgcacattgattttgtcattgatcatgaaaattgcctttgattagataggatgtaggcacccttttgttggaattcaggtttggaatgcaggaatctgaaattcacaaggttttactcatcactccactatcttctgaatcacttaggaagcttgagtgctttatctttgctagactgtgctagaagggataattttcattcagaattttcactctttctttcccttttcccctttttcccttcctctcaatatataattatcgagttttgaaccatggtttagatatttattttccaatttaagtgcttgtcaggctgcttcttttgtgattgcaatataatcttaaatgtccttgtaatcttatttcttattcaccttcttaaaaacgggctggaaaaccattgtttccctatgtttgtctaaggattcaaaattgttttagaaggaaagatttttgcagatctccatctaaaagaattggatataaattgaggatcaaagtaatcacttgcagtagtcacacttatacctagccatgacttttttatggcatttcttttacctatgaaaatgacttgggtgcaggcaagattttgccagcccacaagggaataaaattt

SEQ ID NO: 98721 - DNA, 901 bp, Vitis vinifera
  Intron number 4 from transcript GSVIVT01019042001 (locus G SVIVG01019042001) derived from phytozome v7.0 (chr-ID chr4 ; pos 17451152 to 17452052)
ccctgaggaagatcagaaagggaaaaaagtagttggtaagtcacatggttatagggtgtgacaatgaacatccatgccaataatgctgttggaaactgctaattgctcttatcaaacacgatacaatattgcaggtgcttagaattgttgaagaaacaaaatgtaacagggtacctttggtattactttatagatgtgaattagtgcttttccacctttctggggatcttaattgttacctcagaattttgttcattctcactaaatgatcttgtgctttacagatagagtacaagtatttcagctgtgtttctgtttgttttggtaattttcttttttaatgtcaattagagttagaatctatgctttttgctagacatcattcaactgttttgatatatgtatttctcatcttatactcttcaacctgccatgataggatctagcaaactgtttctggcagatagtagttctaccctgattcttgttgtggtagattagtttagggcacaagttcagagtctcatgttggttagggcttgacctatgatcatgtgcaattgtatatggaaatgcttcaatcatgaaaatgcttctaaaggtccttcctgattgaagttttaattgccaaaagagatgatttaacattgatgtttttcctctatgctcttgtctgagactcttttaagttaaaaatgaagacaattgtcttagaaacttcctgcaaactttgcttacactgtgacatggataagattccttacaagggaatattcaataattatttttccattgaatgcatcttatttttatatgatcctatagagtaaatatttcttgtctcttagttttttttttttttctatttatctgttagatactgaatctcaattggaggaag

SEQ ID NO: 98722 - DNA, 642 bp, Vitis vinifera
  Intron number 2 from transcript GSVIVT01025411001 (locus G SVIVG01025411001) derived from phytozome v7.0 (chr-ID chr6 ; pos 996969 to 997610 reverse strand)
tttcttgccgtgatcattccaaacaagttcttcaggtactgattctattttcctggaaaatttcaaataaaaggtgcgtaagaatcgggaaaaaaaaaaccgagaataaaagaaaatttgaattatcattatgaaagtttattatgtattttggcaataagttgaatggttaggtgggcatgcaggccacatggatcaaacaagtaggtgttaagggtttggataagttcaattattaaaatccttgtgtttcttccattgatgaatagaaaaaaggtcatcattgaatgtctttgattggtttgtgggaatttgagtatgttgaccttatgtttggttttaggaaaatctagggaaaatatgtaatggaaaaatagaaagaaaataaaattttaataataataaataaacaaggtgggggtaggtacgaaaatttctcggatccgtcctgtctttgtcatatttaaataataacattttcccaaacccgttacattagttacgggatggcacgcagacccgacaaaacccatctcactgtggtcgatattcaagggttgtacctatgttactagggctgtgtctctttcagcgtagaacaactttgaatcctggttttcttttgtcattagcagctccccg

SEQ ID NO: 98723 - DNA, 779 bp, Vitis vinifera
  Intron number 1 from transcript GSVIVT01027028001 (locus G SVIVG01027028001) derived from phytozome v7.0 (chr-ID chr1 5; pos 18500364 to 18501142 reverse strand)
gcgtttcgggggattttagtattttacacaagcttgtaagtgttttctttcgtttgtttttctttttctgattgcttttgcgggaattaggttttatgtttggttgctgggaaaatgcgggggaaaaagaaacagaccaggttgtttgaaaattagttagggacccgggaagcaagcagtatccttttagtttagttattattggtgttaaaggcaaattcgagattgatttttcttccatttccttgcatgggtaggcgtatggttttctgtttggttactggaaaaatgggggaaaataaaaccaatcaatgcttacgtcaactcacctgttagtttgtggggaaccccggaaacaaaaccacctgttagtttacgtcaactcatggcacgcttagtcgtaagattttttgtttggctgctgggaaatgcagtaaacaaaagtcctttagcatttcctgggatggtctcaacgaagcctccagctgttgacacttgaaattttgttgtttttctactttctccgtctcctcacaacccataggggttctaacgttttaaaattcatttacttcttttttatgtgatttaatctcatttgcttgttctcaattctactctgctatcagtaccccaaagtgttgatactttaggtctagctttgatttgtctctgaattcggattcatccaagacaacagtttaaatttcatccgcctctgaccggtcaaattgttcattgcagataatatttgcgtttgggttttcgtctgcatcacc

SEQ ID NO: 98724 - DNA, 562 bp, Vitis vinifera
  Intron number 2 from transcript GSVIVT01027035001 (locus G SVIVG01027035001) derived from phytozome v7.0 (chr-ID chr1 5; pos 18441516 to 18442077)
ccctagactgttgttcagctgctgtcactactccggtaactctcgattttcttctctttgcagtagattgtttggttgccgagaaaatgaggaaaagtgaaaaagaagcgggattcttattcttattcttcgttttctgaattataccccaatgaggggttttatcccatgttaaaaaacgtctgtttctcagcaaccaagcagattcttactagtttgatttttgtctttcggatttacccagtcaagggtttcggttttcttcgttcccaagtaatgcgaaaattcagattcaaaacttttctcttccaatttctcgaatttctcagcagccaaacaagaacgttgcttgttttgattttcttttctgaattcctcaacgctacccagcaagggtattttttttcgccgttccgaagtattgcaaaaccccataatcattcctgcagtctctttaatttttccgcacttcctcagcagccaaagcagactgttaagattttgattttttttttcatttttttcagtaattgcacactttaagaggcaagatagtggtgta

SEQ ID NO: 98725 - DNA, 625 bp, Vitis vinifera
  Intron number 3 from transcript GSVIVT01027035001 (locus G SVIVG01027035001) derived from phytozome v7.0 (chr-ID chr1 5; pos 18442147 to 18442771)
ctttgtaagtcgaactgcaaaaggtaaaggcaaaatgaaagatgggcagccgttgaagcgatcgaaaataacaaagaagaaaggccctgttgatgctgctgcggctgaccgaggtcccaggaatgaagccaaggtgaaaatggagcaactggagaatgcttgcctgactgctccaacgccaatccgatatctgactccgaaacagaagaagagggaggaggagagagagaaaatgggacttactagcaatgcaagaagagtggagctcgagatgttgaagaaaaataagtccaagaaaagtgaactcgactccccgatgataattgggactccgggtttggatttgatatccctagggctggtagatgcagagagtattcctaaatatgaattgactgttgaagatggtcgtcggctagctaaagagtacagtagggttttaatgaggcggcaccgggctaggcaggcagcagagagtacaatattgaggttgaagaaggaagccatcgaggcattgcccgagaatctgaaggctgcagcattggtaccagatttgactccatttccagcaaacaggtttatggctactttgacacctccaattgaagggtacatcgagaaggtt

SEQ ID NO: 98726 - DNA, 648 bp, Vitis vinifera
  Intron number 1 from transcript GSVIVT01025319001 (locus G SVIVG01025319001) derived from phytozome v7.0 (chr-ID chr6 ; pos 2075293 to 2075940 reverse strand)
acttctctgctcaagattaccctgttttcactcctgtgagttctccatttctttccttcttttttttttttgagattttttcaatatcaatttagtttattgaattagatttttgtctaatcttctcattttctcccctgttacgttattgtttttgatcgatttgcttttaatgcaagtttctttattgaggcatcatgattagaattgaatgaaacccataaattgaatctcatctgttgcaatgattatgggttctgtgttctctctttaagcttatataatgattgtagttgttgggttttgctttaatggaagagtttcagggttatgcttgagattaaattaattccagaagattactcctttttttttttctttttttttgcttcaatgattatgtcctctgtcctctgtttcttccatgaatttttggttaaaatgacagagaaattctttgaccccagcaacatttttgctggattttgcttgttatatgcttcagtaaaaccaaacccagaaatctaggcccatttcaaagcattgttctatgcttagtctttggtcaatgaaatgaaaattctgggttcttcattatctgcaaagtccacttataatatgggaaatttctctgacagagttacggag

SEQ ID NO: 98727 - DNA, 326 bp, Vitis vinifera
  Intron number 1 from transcript GSVIVT01027752001 (locus G SVIVG01027752001) derived from phytozome v7.0 (chr-ID chr5 ; pos 7410399 to 7410724)
caggtatgtcaggactatattgacatgcacaacacaaatcttgctcagtttagtaggtcttaacttcgactaaaaccaaagctaattatgtttgcttttttgttattgtggtttgattttaactggttttccatttggttgattcaagtaactatgtgttgcgatctgaattaagttgcccacagaaactgccatgctgtagttttgctccttttgtcttcttttcgttcctataattcctctctttaggttccacatatatccactctagaaccatatgctctcaattgtgtatatgtgcttgatcaacttgcagagaaatagcc

SEQ ID NO: 98728 - DNA, 612 bp, Vitis vinifera
  Intron number 1 from transcript GSVIVT01020676001 (locus G SVIVG01020676001) derived from phytozome v7.0 (chr-ID chr1 2; pos 3189138 to 3189749 reverse strand)
ttatccttaatttacatattagtatttatttatttattatatattagtttgaattagaatagaatatagaatttgaaatagagaagtttactattagtttgaattacaataggagatagagttagaattatagtagaactcaaatgtatttgtatataaatatccatcattatcaataagaatagtatgccatattttatttctctataacatagacctaataaaccaataacaagcttggtgaggtttccaacgtctcacccacttgtttgttctttcccaagggaaagattgtccttttctttaatccaatcgctcttttgattttggaaaaaattatctttatcaatatactgctttttctacacattcatctccactccataatgaagaatagctatagctaatagttaggattcataaaaaaatctataatgactcatgggagaagcctttcccgcatcaggcactaatatttttttaacgtctaattagatcgggtaatcattcacattaagaacagaagctcgttgctttttttgtttccctataatttaattagagccattaaattaaggctctatccatttattcactcaacccaactttgaa

SEQ ID NO: 98729 - DNA, 542 bp, Vitis vinifera
  Intron number 1 from transcript GSVIVT01021185001 (locus G SVIVG01021185001) derived from phytozome v7.0 (chr-ID chr1 0; pos 2369750 to 2370291)
tcagccacatcaacactcgttcccaagtatatctctctttccctatgccctttttgattgaccttgtttctttttaaggtctgtttgctttctgagaaaaagtaggaacggaaatggaattgaaatcttagatcctttatgctgtggtgatctgaggcataaaaaagatggttttattagatttttagttgagtgatgttctttatactcttactttactctttttgggcgacatatttttccagtgaccaaaccgagacttaagctcgggctccgtttggctgctgagaaaattattaagatagggaatcttcaattttgaacctttcattttcggatctaaaagaagttacaaaactatctactcaactgagttagtaaaactactacgcttagtggagttgatttatggttttcatttacgatccgaatatacgaacatcataagactcaaaatttcattttctcagtgatcgtgttgtgaattactgaccccgattcaactttcttaatttttttttcccctttaggtcgcggggtac

SEQ ID NO: 98730 - DNA, 505 bp, Vitis vinifera
  Intron number 2 from transcript GSVIVT01028150001 (locus G SVIVG01028150001) derived from phytozome v7.0 (chr-ID chr7 ; pos 4220025 to 4220529)
agccctcactctctctcgccgctgtcgctcctcgggtaatctctttctctcgattcttctatgttcttcgattgcagattacggattcaatccaatccaattttcaactgacggtattctcaatttctcttctttttgcgcgattcgagtcctattcgaatgtgtgcttcgattcgaatctgcttgcatgtatgtcgttggtgatgtttctggtgattatgttgaatggtggtgttccttttttatttttttggtttctgtttggtttttgtaatcgataaaaattgaaattagtttcgaggggtcttgctaggtattcttttgggtgagctgggttgtaaattagtaggcacactgttatcacttcagtttttgtatccatagaaataaggattctagcatgcgtttcgatttttgggcttatccatttgtttgtgttttgatttctttgttccacatatattattatggctgggtaatgtttggcaatgcaggttttcattgg

SEQ ID NO: 98731 - DNA, 966 bp, Vitis vinifera
  Intron number 2 from transcript GSVIVT01025941001 (locus G SVIVG01025941001) derived from phytozome v7.0 (chr-ID chr1 8; pos 26936978 to 26937943 reverse strand)
gctctggtgagttgttttcagatcttggttttatctagtttctgtttggttcctgtgaaaattgtgagggaggcatggtgaaatagtttgatcgggaaaaatgggatgcacccaattactgaaaatttgtaaagataaaagatttgacctggatgtagttgtattgggcacaatttagcgaacttatttcatggaaattatgaaattcaaaactttggtatggtttgtttttcttgattttcccgcaatcaatctgaactcttttttcatgtttggaaaattaatctgagtctacttgaaattaagctcaggttggacatattgtcaatttggcataagggatcacggcgaggaaagggaaattagattatttggctgggatttgtcatataatctggcgtctaaatgacacgcattagcacccaaaacttctacgggagtccatgttattatagcttcaatcctgacaagttggatgcgacacagtagcattattttacgctgcaccttcatttgatttgaagttgcataaactagctaatagcagttggtattatcataacatctctctttcatgtacttcatagagtttcttgcattacctggtctgagggttttcaatttcgatctaagtcattgggtggtagggggttattttttaataaacttcatatgtggtatgcaaaatcaaaggattcaagagctatatgattaggcaaattgtttgtatggtttatctactaaattgggtaataattcagtcatatccttcaatttattcttgcttaaatataattttattattaatataatttatagggatgttcttcctaaatgattcaatgtctaggaataatgttattattactaatgtcagtattaatcatgaaattgaggtggtgattctcgaagatgaggcgattttcctttagtaacatgatgatttaatctgcttgtaggttttgc

SEQ ID NO: 98732 - DNA, 779 bp, Vitis vinifera
  Intron number 2 from transcript GSVIVT01023610001 (locus G SVIVG01023610001) derived from phytozome v7.0 (chr-ID chr1 1; pos 7986832 to 7987610)
cagaatagtattgggtaaccttcacaataatttcttttgttttatttcattcaattttttaactatacattctaatttaaactctaacttggtcattgatagtgaataatagattttgaggttatgtcatatcttctttatggtacaatagaagggataagttatcaatactgttttcaatgcatgcatggttcatttgactaccaggttaggtgctatctcctccctatatatataaaactatagtaaatgacatttttattttttaaggttatattattgacaatttctttatgcttccttaaatcgtttgtgttcttccatataacctgtttaaatcagttgataatattgtaatgacatggtctggttgcttaaacttatccccaattttctatgtttatgtataatcatgagccaattattagataattcaacaaccctgtaaaccaatttggtcaaatggctgtattttctatttagctgaaagaatccttgttaccatctgattgtaggtttggttgtctcgcatctatatagcaattaatactaaacttagtttagagtgattttttatggttagacatttaataagacaaaagatgacttgttcctacattaatatttcctaggggagtgttgtggaaggaaccctttaaaggaataagttccttcattactcataagctttataggtttttattatgttttatttacatcttgtggttaactgtacttctcttatctttaggagttcactgataagctgattgaggagg

SEQ ID NO: 98733 - DNA, 1018 bp, Vitis vinifera
  Intron number 1 from transcript GSVIVT01022799001 (locus G SVIVG01022799001) derived from phytozome v7.0 (chr-ID chr2 ; pos 16739517 to 16740534 reverse strand)
tcgtcggagtcccgactccaaccgttgaggtgtgtatagttgcttgctgccgcagtggtgtctttataattttcaattttttattttattttaaaattttaagatattttagaaatttttttatagtcaagaaaaaggtctcatgaatatttttattaaaatcgatctggttaaattgattttttttttaatatttttattttattaattggaatttgaattattgattaattcattatggtaggatatgtgattattggacctttcatatatatatatatatatatatatatatatatatatttaaaaatcttcatttttggtttttaccaattatattgagtgaaaaaaaatttaaattttttttgatactaattaattagtatttaatttatactaaaaatgtgtttaataataattttaaaaaaatatttttaatttttttaacatttaaatgataaaaattttcaagtgtaaaaattaaaaacgattcttaaaattattattagatgggttcttaatttgtttgaactattatttttaaaagaagtgtttagtgaagtattattagcatttaatgagtgattttcaaattcaataaaggacttgaaaattaaattgaaaaaaatatttaatttattttattataataaaattctttatataattcactcccattaattttcattttcatcaaaataaaatataattaaaataaaagaatttttgtacaaaaggcatgtatcaatgttatgtgcttgaaaacactttctaaaatatttaaaatttaaagaattattactttcttaaattttaaaattaaaagaaaagtttttaattgcacaagtcaaatttatgcttttttcataagaattattatattttgtataaaaatttatatttaaaaaaaattcaagtgccaccttaattaattatttatgaaatatattaaaacccgatgtttattatgttgagaacttgaatttgagtgcagacgtcaaaggaagaggctcctgca

SEQ ID NO: 98734 - DNA, 781 bp, Vitis vinifera
  Intron number 1 from transcript GSVIVT01025462001 (locus G SVIVG01025462001) derived from phytozome v7.0 (chr-ID chr6 ; pos 667901 to 668681)
cccaggtacccatttctcaattttcagtttttgacgcttttttcttttttttttcttttatctttttggtctgaattgggtttggtagagggttttgtgtttgtttggtttcttcttatttaatccatgttttgatgttcttaattgtgggtttttgggaaatgtgttgggtgtttttgattgatttgtggggatttttttaagggtttgttgaatttaatcgagattaccattttctgggggagatttctttgattcgtgtggttgaattgtgtttgactcggttaatttgcttgatcatccattggaaaatggtgtacttcaaaggagaggggggagattaagagatctttaattcacttgctgttctataaattgatcacagaatggtaaactgttgaacagataacgccatggactcagaagcacactgttttgtctctttctatttgggtttgtggctcaaactcatggactgtattatgatcgatattgattcggctttgtgtctgtaatgggcatggtaccttttttttctctgtagtagtaaagggaagaatggggtagtgttattttgtttattgtgggtcaattttggaaattttgatttccttctactatgtatttcctttcttgtgtttgttttgtgggttgtggcctttttctgtttttgaattctcaggatattggaagcagcttgttgttttgaggtcagatttgtagcagaaaacttatggactttagtgtatttgcagtgatactacagtgggcgttgggcacg

SEQ ID NO: 98735 - DNA, 449 bp, Vitis vinifera
  Intron number 3 from transcript GSVIVT01019706001 (locus G SVIVG01019706001) derived from phytozome v7.0 (chr-ID chr2 ; pos 2582802 to 2583250 reverse strand)
tgccacctccagagtcgctgccgagtgtaagtcttctctatctttgtgtaaagacaatctaggatggcaaactttaagattcattgcctttgcccttgttttcaattgatcaattgtcttttctgttcagtattccaattctgcttttccaaactgaggcactagatatctgtttcagatatgctagctgtatgttgaaaagcaggaaaactgttagttttccaatccatggcattgcccatcattcatgctaagcttgtttgatcttgttattgatgacaatttgtagcagggaaattatccctcctttggaaggagggaggtaggtagctacgatcaaagctactggaatctgcttatttaatgaaaacaatattccttgctctgactttagattgatcatttctgcaacaggggggttttagaccagtttgcgtggctttgacaat

SEQ ID NO: 98736 - DNA, 991 bp, Vitis vinifera
  Intron number 1 from transcript GSVIVT01028180001 (locus G SVIVG01028180001) derived from phytozome v7.0 (chr-ID chr7 ; pos 4456812 to 4457802 reverse strand)
tctctccatttcccaaaaatactctttgttccgaggcaagtttttcaccattctttctctctcttgcatctgatctgtttggggactcggaatcagggtgggaaattaaaggaaaatgtctggaaagtgctagataattatattctttccttttttttttttttctttttttttttcgttttttggatttccttgtttttccttcctgtgctccgagatccaaatggactctaaactttttgaaaccctatatttgggatttctgtcttgagtgccattcgttttgttcattgttttgattgttgtctaagggtttttatttgatttatttggttttttgtgaactggttgatggatctgcatttctaggttgaatcgttgaattgagcttttttttcgtagatttggtttggttggatggatttttcctttttgttcatggcaggatatggatctattatgatatatttgatttggcttgtagatggattcatgtcgaaaatgagattttaatgtatttcatgaaaattgtgaaaaatgcgaaatcacaggaacagattgcatgcatgtgtgtaaatatttcaaaaaatcgaggatgattattgactgcgtccatttggggaaggcaaattggataattacttttcatgaattatcattatctgtttttcatatctgatttccgtaagatttggctttttagtatttggcagaaccatgcgatttaaatttaaatttttgtggttgggaatttggaaattgaagatttgatctttacctgatttgatgcggaggtcatgtaaatttgtgcttcttttaaaaattaattttaaggttgattgaactataacttgcgttttttcaatttatataaacgttttgattattgatctaaattgtttagctgcattttcactgcaaattgccatattttgttgtatactttatggacaaagggataggcaaaataggctgagacccaattcatttg

SEQ ID NO: 98737 - DNA, 619 bp, Vitis vinifera
  Intron number 2 from transcript GSVIVT01019237001 (locus G SVIVG01019237001) derived from phytozome v7.0 (chr-ID chr1 5; pos 2943475 to 2944093 reverse strand)
gctctttttccggtatcttccccccctttctcaattatgtcttgtctatttgttcttatatttggttctagatttcttcatttttcagcttcagctatgctccgattggttactgcaaaatgcagggaaagaaaaagaaaaaaatggttttgagtctcatatgtttcattatttggaacaactagaaaagttgaaactcctctcaactgatgtcactaatacactcttttaggaacatgagtttcctaattttcttttgttttcctccttacccttggcaacaaaatgaagagttgtgttcttttccttgaagttctcttgctggtatatcatttaacaattctataaacaggaagaaaaaaaaaaaagctgattattttttgtctttttagtgaattttttttaatcatttcatgaatcttttatacatcagttccaaaacttaagacttaaaacccaactgttgttaatcttttaatggccattcagtttgatgtcttatctgttactaattttattcacaaatttaaagtagcatattgataagaatctcttttacctcttgtttcacctcttaactataggctcttgggtgataaatcacccttctctcaacaaa

SEQ ID NO: 98738 - DNA, 694 bp, Vitis vinifera
  Intron number 2 from transcript GSVIVT01028465001 (locus G SVIVG01028465001) derived from phytozome v7.0 (chr-ID chr7 ; pos 7997857 to 7998550)
agcccgacgataaaatcaggaccaccagcttgaaggtgcgtttctatggattttggttattggtttgtgctattgtgcactcctgtggcgtagtgtatgtaaaaatctgtcttctggagtttaatttcagaacatgaattcaatttgatgatgattgcttactgtattggacttcaaaacttaacggttttgtgatgaatttgactcagtgagttgactcgttgccttggatgagtggtgaatttaatttaacctctatagtttttggaaaattggcaatgtaattgagcttctggggaagttcttagcttgtaatgagcaaatctgttcaataaactgaattttattatggcaagtggattggttcagtcaattttgattctaatgagtcactgaatcatttaaaaggaaaaaaaaaatgtaagtcaggtggatcacaagatctcttaacttaatatgggtgctgaattttttctcgttaactcggcttttttttattagaaccattttcttcgttcgtaccggcaattggaattactttcaactagttatgtttcagttcaggaaaacccatgtattctttatgctaataactataatattatctaaaaggatagatctttataattaatttctttaaagagatcataatcttgttccaatatgcttgtttcttaggttcaaggaggtggga

SEQ ID NO: 98739 - DNA, 476 bp, Vitis vinifera
  Intron number 2 from transcript GSVIVT01027502001 (locus G SVIVG01027502001) derived from phytozome v7.0 (chr-ID chr1 5; pos 16172781 to 16173256)
ccgcggagtcgaaccctggcctagggtgacgccaggtatgcttgacaaccatttctccactcctgcatcttgctctcattcttctttttttctctctcttgatccttcacttgtttcagttcagattacagaatcatttgaaatcttgctgtttttttccccccaatattagatttaggcgtgctgggaatcaggaagaaatttagggtttgtttatagcggaaaccagatctgattcggaaatttgaaactcttgttctggattttgattcggaatttctaaaattatgtacactattaatggaaaatcaattttcgattagcaaatttagaactcttgttcttaattttccttccccatttattcacttccttttcatttcctcccaaccgctcttctcccaccgaacacgctattattattatttttatttttcttttcagttagacctggtggaaggttggatatttggata

SEQ ID NO: 98740 - DNA, 787 bp, Vitis vinifera
  Intron number 1 from transcript GSVIVT01025088001 (locus G SVIVG01025088001) derived from phytozome v7.0 (chr-ID chr6 ; pos 4606539 to 4607325)
ctctgaaggtaatcaggatttgtgattttatgtggaatcgttttttttggatccatcaactttgatgctctgtttcgggctgagaaaagtaaggaaaagagagaaattttgaaaacttttgaatctttggctttgtattatttagagtcgcagaagattgatactcatccaatgaactgtttcttaagcaattgcaaagaggaacaacacaaatgatggtttgaaaattttgattcttttttcctctgttttctcagctaacagagggttatttgtttttaacaaaatccatttctttactgtgatgtttaccaaaatttaatcatgactaaatctgggatccttgtgttcatttttcctctatagataatccataaactttgaatattttgttctcgtttgtgaattctatatagatggcttcacgttgttaaatagaataacctagatccatgttcatggattccttgacttgtgtcttctacacatatcatctgtttcgagtagttgtatggtttggtttaatggtttgttgtctgaaagctggtccggttatagaatggatagatgggctttaggggttgagggttattttctttcccattttattttttatttttttcaatttaaaatttttttgagatgattatgatcatcagattgtcgtttaaactgtgttttattttacatggatccctttttatgttgtctgtttaacttcttctgttggaaaatgtgggtatttatggatttgtctttgcaggatttattttgtggaatcgtcagc

SEQ ID NO: 98741 - DNA, 966 bp, Vitis vinifera
  Intron number 1 from transcript GSVIVT01019714001 (locus G SVIVG01019714001) derived from phytozome v7.0 (chr-ID chr2 ; pos 2658691 to 2659656 reverse strand)
ctcattgttcgataagaaaccaattttcacaacttcaaatatttaagaaatatatgtgcaatttagtttagatcaaataaaataattgaagtcttattcaaataaaataaaaagacgagggctcatcgagattctctacgtttttcttaaatcctatatttaatagttattaattggaataactttgtatttttgcctttaactaaaagccaaaggtaaagtccaatcataattttcaaaagacaacattaatattataaaaactttattaaatataaaaaaaattcttaaataaattaaaatagggttttaacaagattttttttttctaatttccatattatgtttttgtagccataatccctttgaatttttattttttattttaaaaaaaaaagcttaaaaattaacattttagaaatcaatgcaaacaaaaatttatatgtctatactcatttcgctttaaaattgaacaaatctcactaaaatcagcaatgagcttctagaaagactaattcagttctgaaaacattgatagaaacacaaaacaagtgcttagcattggaagctatgctattccttttgcatgaaaaagtatgacgtgtgtagaaggtgtatcacaaaaagaatttttcagcagtgaaatattccaagcaatggcaaaatcaccggtcgaatggatacaaaatgaagcagcatcatcttcagttaccatggagggattcttcttggcgtggagatcatgctccttcaattgccaccacagacgaaactctagggcactttgcaatttgtggcttaggttggttctgcttatatataggaaatgaaagtttaattaggtagtctgtcctttgtccagtatctgaaggtgcctagctaatcatgaaaacctggggtcctcatggagcaatggtactagttcacctagctaaacaagggactaaatcaaatcgtctttgtgga

SEQ ID NO: 98742 - DNA, 559 bp, Vitis vinifera
  Intron number 2 from transcript GSVIVT01027524001 (locus G SVIVG01027524001) derived from phytozome v7.0 (chr-ID chr1 5; pos 15989399 to 15989957 reverse strand)
cacagtaagtgtagcctcctttttactactgattgaagaaactttgaatctctgttaataacttaatgtaacacattgtcctctcagcttttggaagtctgggacttggtgtaacatggggttttattaggttttggagttcatcagcttcagagatttatgcccagggatcaaaccccataaaaatggcaggtttgaggtacctgcctttgggcattagttgtgcaattcacacatctttatcagattggtatttgttgttattgttttgtcatcttgtgtacatctgtgttcttatgcaagtgccgccccaaatctgttttgtttcctggattgaagattaatgaatgtcaactgaattggtataatttattgcttgtgattattcattcattggatctcggattaatggatgttgattgaattggtgaaacccaattgagatgtttggtgttttctttttgtccatttgatccctagttaaaattaacgcgatttctaaggtcttgttggtcttggatgtgatttggttgtccttttactcctgcaggtgttcaat

SEQ ID NO: 98743 - DNA, 750 bp, Vitis vinifera
  Intron number 1 from transcript GSVIVT01027524001 (locus G SVIVG01027524001) derived from phytozome v7.0 (chr-ID chr1 5; pos 15990017 to 15990766 reverse strand)
tgttcgaaattgactctaggatcgatcttgaacaggtattattccattctctgtactgggtgttctcttctttggtaagaatagctgatctgggttgattctgacaattgttggatctctggtttatcccatggggagctgtgtttgatggaagttcccaaatgatcctgtaattctctaactttgcgggtctatttcaaggattgaaatttaagcatgctcctcaattctttcttggtagctttggtgaaagttttcacttggttcaggcatggtgtgtttctttcttttgtagacttataatatgattgaccacacctttcttctggatttcatgtcaattgttattgttcctggatttagttgtgggaggctgtagttcaaattgctttgatggggtagaaatgaattagaaaattttaatggtaaggcattgttgtgaaacacactcacaatgcaactgcacaaaagagaataaaactgcaaaatctgtgaagatgtgcccatgtctaatccaatttgtagaggtttagttcctcttcaccattaatatcgatttggggttgttcttcccttcatgatttatgatgggtggcttcataagataatcttctttttgaattgcatctgcaatcttccttcctgctgcagatattttgctttatctataaaaaattttgagctttggaattgaatgttcttgtttttctgccagccagagcatcggattagtggccttgaacctgttat

SEQ ID NO: 98744 - DNA, 351 bp, Vitis vinifera
  Intron number 1 from transcript GSVIVT01025975001 (locus G SVIVG01025975001) derived from phytozome v7.0 (chr-ID chr1 8; pos 26415449 to 26415799)
tctatagcaaagtcttaaaaggtaatacctaaaaaaccggctgtctcctttcttttgaatccatttcaagcttacatgcattgttgtttgatagtgttttcatttgaagtatttttttaaaaatgtttatagacgagatataaagtatttgtcttttcttttgtcttggccttgatccatggggtaggtgaatagattctttgacgaaaaattttaaaaattttaagatagtttttcttcctcatctttccccaactattgtgaagggttgttcattaacagaccaaatttaaaattaatttttttgattcaatagagcaaaaggagattgcaaagagcaaaggtccggaa

SEQ ID NO: 98745 - DNA, 666 bp, Vitis vinifera
  Intron number 3 from transcript GSVIVT01028005001 (locus G SVIVG01028005001) derived from phytozome v7.0 (chr-ID chr7 ; pos 3130927 to 3131592)
aggatccccactttctagaacgagaaaaaaaggaagtagaagaggaatacaaactttgtagggtcagtcgatgtccatgttaccaccttggccttggtcttggctccgctgattcgcaaactgaaaaccaaccctgctcacggattcttgagtcaatgcatgacataagactacgtttgattctcagaaaatttaaagtcagaaacagaatcttgatttaggaaaatacaaaaagtctaatatcactttcaagaactaatattctttcgaagtaacaagaaactatgtgatgtcatgtttcaaaaggcatcccacctcaaaaacaatacacgaaacagaaataaatgacataaactatgaactcctggtaatgttcttgaattattccaagaaataaagcctgaatgaccctcaagaatctaaagattttagacgcaagggcattctttcttggaaattttaagacggtacaatgagtagagaagtagagcttactcagagagaattctggtgataagacaatgagagcttggcatactcgacagaagaaggaattggctccaagattttgatggaattcaagaagagacatttcaagcttcaacttccaaagaaagtcgaaaagctatggaattcaaggttgaagaggagagatcgcaggtaaat

SEQ ID NO: 98746 - DNA, 512 bp, Vitis vinifera
  Intron number 1 from transcript GSVIVT01019756001 (locus G SVIVG01019756001) derived from phytozome v7.0 (chr-ID chr2 ; pos 3019669 to 3020180)
ctatatctcctgcgttcagtattttcgatcaaacggttggtggttctcccccaggttctttttatttcttgtttgtacttgttcagttttcaactgtatttgttaatttgggttgatttagagcggtgatttgtgtggaatttgggggagagaggggggtgtttgtggtgtggaccattggaaatttctttcttcttgaggcgttttcttttgtttttggtgttttagattggtatggttgatgggttgtgtttggtttgaattgaattcaatgtttcttgtgttggcggcgctgctctgataaattgtgctgtcggaaggctgctttgtggttttcccatttgtagttcttgagaatattctggggttacgcagtttttccaaatgagatggggattttcacctaatttttaggttctatagaataattggtgggaatccatttgtagaatttaaattgttgttctgaatttccaggtgggtagctttcactggtgtgaattcgggcaagt

SEQ ID NO: 98747 - DNA, 740 bp, Vitis vinifera
  Intron number 1 from transcript GSVIVT01025407001 (locus G SVIVG01025407001) derived from phytozome v7.0 (chr-ID chr6 ; pos 1018473 to 1019212)
tcttccaatttgcatttccttcttgtctcgaacaggtttgattacttatttgatagtcagcttatcaagcttcagcatttatatcggaattcacatcattattagtaaatagttggaaaatcgattgagttgggtgaactatggaatcactgatttaatattcgctgaatttggattccaatctgtacaacaaagtcggaaagtttggagaatttaaatcaaatgacgagttcaacttaatgaagttcattttttattatttggctgaaaaatggacgagttattcgcaaatttagttggagtccagtgataaatttttttggaatgattgaaaaaaaaaaaagaaaaaagaaaaagaaaaagaaaaaaacatggatttccgaatggtaaatggtttggcaatgtgaacaaatttggcctgtaaaatcaaggtagtcatttctatggaacaacaacaaactcagtgaaaaatactattttcagatttcattaatgatgaaggcattacttctcttactcgttttaatccaaatggttcatcagttttcctattatattcatgaacacaatacccatgtttttttcggaaatttatttaggaagattttcatgaagtatagcccttgcagtttctaaatttgtgttgggattttgtgataatgggcttttgaaggtttattgatgttttgttttgttttgtttcagtattcgcgccactgattccactaattgggcataga

SEQ ID NO: 98748 - DNA, 436 bp, Vitis vinifera
  Intron number 1 from transcript GSVIVT01030475001 (locus G SVIVG01030475001) derived from phytozome v7.0 (chr-ID chr1 2; pos 5988936 to 5989371 reverse strand)
tgtttcagaattgcatcaaactcgctagcgaaaatgtctgtaatttctctcactctacctttgtataatggacaaccttttcaacgccaaccgaattctccgggtccccatttgacagatcagtttgatttctaagggaaaaaaaaaaagaaatttaaattttgattattaaaaagaaccgggaaaaatagattgaatttaaccgaagacaagtacttgggctagttggtaatgttgttattattttttatattttatttttagaaaaaggaacaagtgaagatgtaggacttaaagttatgttttctttcattttcctcaattttctcagtcaccaaacagtacgctattgtatcttgcaactcagggtttagtttgtcttttgggttgtgttggttcagaaaatcaatcaaaagaacacttgggagctgaatct

SEQ ID NO: 98749 - DNA, 452 bp, Vitis vinifera
  Intron number 1 from transcript GSVIVT01028848001 (locus G SVIVG01028848001) derived from phytozome v7.0 (chr-ID chr1 6; pos 18108470 to 18108921)
caggtctgttgtccctctgatatagttttttgtttttgggtttgctctgttttctttgaggaataatcttgcatggctgtgatgggttttgtctgtttagttgcagagaaactgaggaaaaggaaaggaaagaaaagatgttggaacctttttgaaaagcttattcttctcttctacgattagaagaattgagttttcttgttgtttcttttcctaatttttctcagaaatcaaacagagcaataaggaatttgaataaaatttatgggttttgcttgatttgagctcatattctcacttcggttggttttgtaaagatgaaaattttctgggtcttctgatatttttcttattgttgatgggtgttcccctttttctctgaatcatagcatatctcaagctgttctttattttgttgtgacagaaaataattttgaaggtggaggtattcg

SEQ ID NO: 98750 - DNA, 785 bp, Vitis vinifera
  Intron number 1 from transcript GSVIVT01020354001 (locus G SVIVG01020354001) derived from phytozome v7.0 (chr-ID chr1 9; pos 20818138 to 20818922 reverse strand)
caagtaagatgtttttaatcgaccctaatcctatgagtaatacattttcttttgtgataacttgatagatatgtacactactcacgcctcatgattaagttgatggtttgaaccatataggtataaaactttggatatgtgagactctatttcaaattttcacataaagtaagagtcatctatatatattatatgagttatttctttgaagtgttagaaacttctacccatgcaatgtggaatattgtagtaatcctctcatacatcttcaccatggcccatggaatttatgggtggcttaattactatgtttctgactaagaattaattttgatatcatttatgtctcatatagcttaattattatattttcgattaagaattaattttgatataatttacgtcccatataaatattatttaccttggatccactacctttgcaatttggaaaaatggttctaagcatgttaaatgaatcttctttagtaactattcctagacccttcaggtgacttacaacaacaagattcttatataaatggtccatattgtatagaaatattcattgtagtaatccatgaaatatacaaacaaatctaactcgagattggtagatgattagatctatgtattaaaaaaaaatgaggaacttgcgagatggtacaatggcccatttacatggggcactttttaggccttgtttatgataaacttcatggcatgcaatattattcatattttccgcagggaagtagcgctagagttcctgaaggcatccatct

SEQ ID NO: 98751 - DNA, 576 bp, Vitis vinifera
  Intron number 1 from transcript GSVIVT01025369001 (locus G SVIVG01025369001) derived from phytozome v7.0 (chr-ID chr6 ; pos 1409895 to 1410470)
ggaaaatttatttggtgacattttaaaaaacaaaaattatatgcgtgtgaaattagtttaacgtaacttataaggaaatgtatgggaattttttaaaataaaaaataaaaaattccttgcgtcatcacactcaactgcctgacacgtgtcttcaatctaaactgtccattcaaccattcaatctccgacctttctttctacccctataaatacccccttgcccaccttgttttactgcttcaaaacccgttaaggagaaattcaatctctagaaaattcagagagaacacggatctggaattttcgaaagcctagggtttcaaatttggttaatagaagacttttaattttggttgaatttagtgtttctttttcttgttgaattgtggacctagggtttcgattttgttgaatcgggaatctagggtttttagtttgatttctttgtgcgtcttctttattcgttttttgatcggaaaatgaacgaacagttgaatcaatttcatatgatgaatcagcctcaggctatgatgaatcgaagctacgggctctggccgcaacagaacccttctcaga

SEQ ID NO: 98752 - DNA, 1009 bp, Vitis vinifera
  Intron number 2 from transcript GSVIVT01022975001 (locus G SVIVG01022975001) derived from phytozome v7.0 (chr-ID chr1 2; pos 17384185 to 17385193 reverse strand)
ttggacctgttatcaccactctatgtcgtctccacgttcaccaccatgaaggggtgattctgaagtggtcacacccacatcctccaccatgatcgcactttttccgctgcgttaaaggagggtgtggcaaatctgcagagacatggtatgatgggaagccacgcatatatatttcacatatggtcccgaactcgtgatctaccgtttttctttcttcaataatacaccatccataggagatcaccagagtttggaaaccgattacagccacttgaatcaatggctggaggtaagtagactatgtctagtcttttacagattcaattcatcttacaagtgttaattttgaattgaatgtatcatatgaatttctaacatttggtatcagagcatgaaaatcttgtccctgccttggtatctattttgctagagaattgttttttaatggtttctcttctctgtaagatactatctataagttgatcatgctttaaaaagagcaaatagctttagccttgccaccacatatcacaggccttcatggcgctgatcgttgccgccatttaagcgttattttaaggcgttccgaaagcgcattttcggtgttgttttgggctgtattttcagccactatgggtaccatatttaggcaccattaaagcactgctgctggtgctagtttcaagggttgcaagcgcccattcaggtgctattttcagcccatttcaagcgtcattcaggcgctatttaaacgccgctgctggtgctagtttcagtcgctgcaggcgcgacttaaggcgttccaaaagcgccatttttggtgctttttgaggctgcagtttcagcagctgcaggtgccatattcaggcgctgttcacagtggctgctagtgctggtttcaagcactttaggtgcccatttcaagcaccattcagcccccattccaagcctgtgaatgagagaatcgggctgcactccgatggatgcagcccatcccgttggccgcggc

SEQ ID NO: 98753 - DNA, 546 bp, Vitis vinifera
  Intron number 1 from transcript GSVIVT01025642001 (locus G SVIVG01025642001) derived from phytozome v7.0 (chr-ID chr8 ; pos 13391706 to 13392251)
ggcttcgcatagaagagaccctatcaagtcttcaggcatcttcactttcattctcatgatcgtttctttgtcccttccctctccgtgtgttaaatataaagaattttggtttcagatatatgttatccatttgcgagttgtgtgcatatcagttcatttgttattttttagtcgttgaactcttggctgtcgagaaaaaaagaaagaaaacaagaggaaattctgaattgcatttcttttatattcgttttggtaacctagaactggaaaccctgactctagcacggaagctagtggtattaggctaagtttaatggagggttgttttccagggtctcgggaaataaaaaatatacgattcaaaaatttatttttttctactttccctacatttttccagaatccaaacgggattttatgcaattcaaaagatgagggttggtttatattcataaaagatttcccttggtatctaatttcataaaggagtatttttcgttgttccattgcataatttctaattctttggttggtttccagttggga

SEQ ID NO: 98754 - DNA, 674 bp, Vitis vinifera
  Intron number 4 from transcript GSVIVT01018993001 (locus G SVIVG01018993001) derived from phytozome v7.0 (chr-ID chr4 ; pos 18005835 to 18006508)
aacaggttttctcctccatctagtttaaacgatgttattgtttctgtcttgatgttggctttagtttgttggtatgtttctattcatcattgctactatggacaatagactacacactggcctaaatgataattgaattgttttttccttattacagaagaaagtctcaatcaccccatcctttttgtgtattgtagatgctagtaattgttacatctatattttcggcctgcagagttgagctagcataaccttagagttgccatcttttcattcaactaattagatctttgagatgttatttcagaactgaatgtagttaaagccttgtctattaatataattatagataattactagtttcttggtatctcagtagtttgaggtgcatcagtaagctaatggtgacattataggagttcatgttatttgaaaaatcttaatagatacgaatcatggttggatgtttttatttttgaattcttgtattttatcttgcatcgttgtgccatacaaaattgatctctggacttgtggtgtcttattattctagatttgaaatttatttgtcatatacttttgttctcaattgtcatttaatatgatctgagttttcaatgcatctgatctttcattttctgctgcagtctgttgcaacctttttcagccaggtt

SEQ ID NO: 98755 - DNA, 587 bp, Vitis vinifera
  Intron number 1 from transcript GSVIVT01023200001 (locus G SVIVG01023200001) derived from phytozome v7.0 (chr-ID chr1 2; pos 21217920 to 21218506)
tgctcctttcatccctctccactgctccatcagtatccctctctctctctctctctctctctaaatctttctctctctaaaatttcatatagacatacatatataaatttgtaaatatttattcatttgtagttttatatttttttgtttgtttgttttttttttggtagatatgaagaaattatatgattcaattcagctatttgtataattttctgtgagtaattttagattttaaccttttttggaaatgtgttagaaatttaatgtaattttagctgacttttctataatttatggtgaatttgatgttcaatgcattagtgatgaaggtgggagttggtggagcttgaattgggttgaattttggtgtgaattaagaattttttatttgggttttcggttttaaaatcaggggagggttccattttgattttgggggagggtagggaatggtacgtttggttagggggaaaatgtgggaaatggttttgaaaatgtgaatattgttgtttgggattcagtaaaatggaattgtgtgatgaaactgagctcaattttgatcgatttctctcatttatatgcag

SEQ ID NO: 98756 - DNA, 534 bp, Vitis vinifera
  Intron number 2 from transcript GSVIVT01023200001 (locus G SVIVG01023200001) derived from phytozome v7.0 (chr-ID chr1 2; pos 21218580 to 21219113)
cagacaattcaagctttcactggtcaacactgaaggtgtgttttagataacttagatcatagaatcataatatctatcttatcaaaaataaaataaaaatagaatcataatatctaattgctggtaaaaaattttggagtttgtcttttaatctatctaaaagtaaatttttgttatgattctgtgcttgaatttaaatatttttggggtgacatacgacagatgctagctgttaacttctgttaattgcatcagtgtatgttccagagttgcaatattattttttaacaagtagtttgtcggtctattttgcaccttaataactatagcatcaccgttgttttgaattattataacatattcttgtcagctgactaaaaaacgttagacgatgtgtattcttattggtttgttatcatttgaatttgattgtctctgttggacttgagccacttaagtgggtttttttttttttttttggataaactatcatgtgcaggatcttagtttgcccttgtgagggttactgagaat

SEQ ID NO: 98757 - DNA, 695 bp, Vitis vinifera
  Intron number 3 from transcript GSVIVT01023200001 (locus G SVIVG01023200001) derived from phytozome v7.0 (chr-ID chr1 2; pos 21220088 to 21220782)
ggcattgaaggtaatggagtgaagataaaatattttcctgaatcagcttatcacttaatatttcacatctggtcaccttccttttttcctgatccacttaataccacttttgggctggccaaaaactaaagaagtagggtggggttgggaaggaaatgtaagtttcaattttgatagctatgattaataggctagcagtcacgagacagttcatgcagttgatggttagaaatgattggattagtcatgtgttaggccatgtccactagttagttgatattaaagctgggagcctcatgatctgctgggaagtttatatcctctgagttccaaattgaagaaccgtataaaattggccatgttggcacagaacaactatccaccatgtttgttttatccacttcatattttttttgataggttgttctatccacttcatatgaaattaaatttcccatgaatgatgtagattgcattttcttgttgcagatgagcactttcagttatgtgttacgttcttttggtttgttctttcttgtcattcttgttggactgtagaggaattgctttattcttgataatgaaccctctgcccatacaaatgcacatatatttcctctcaaagagctttactaatactaattttatatcatctgtgttctgtattacaaatatgaaaggcattcttggggttc

SEQ ID NO: 98758 - DNA, 578 bp, Vitis vinifera
  Intron number 1 from transcript GSVIVT01025201001 (locus G SVIVG01025201001) derived from phytozome v7.0 (chr-ID chr6 ; pos 3374232 to 3374809)
aggttcatgacctcctctcattccctatgtcttggttttggttgatatgataaaaactcctattactgaactggttaattcgtgtagcctttttttgagctgcttcttttgtttttgtttatttatttatatttcgggcgttgtttattgtatgaaaatcaatggatttttgcattgtttttgtttgtttgatcttaggtattggagtttgtttgattgttcttatgtactaaattaaagggtagaagatgaatataattataaatactctttgaatggttgagatattctgcatgaattcgattgtttgatctatgtattctttcagttaactcatttggtggaaaatggattttctttttcttttcagtattgttagatgattctagtttatttctctctctctttatttatttttttgtttgtttctggtcacaaaaattattttttgcagtttgctgtctattaggtttctagcatttcagagattagcaattttctcagttatcagaattaaaacaaagacattgtttcttgtgacaggttcctgttagaagtgcaattatagattcctgtat

SEQ ID NO: 98759 - DNA, 620 bp, Vitis vinifera
  Intron number 1 from transcript GSVIVT01027912001 (locus G SVIVG01027912001) derived from phytozome v7.0 (chr-ID chr5 ; pos 9317585 to 9318204 reverse strand)
gtttttgggacgattcttcgtcttctccgtctcaggtatttcctcttctcccatttcatatattctaattctcttcttctattttatcagcagctctgtttagttgaattttttgtgattttgatgatttttttttctttttttagttttaaatttatgcaaattgatatgttgtttgatttcgatctccgattctgcatctgtttcaattttttctgatccgaatttattatccttgcaaatgtaaatgctggtgaatatgaacgtttctgaacttttggatgcttagtataaaagacatttgattattgctttgcaattttttttttttctttttgattaagggaaatccataagtgtgaagctagaataccctaacttaaagcctgttgacgccttcgcttacagcttcagtttcgtgttcatccatctctcgatttagtttaagaatcatgtttaaagttctctttagttccctccattttctaagcaacaaaccaaagcatcattggcctcttccattttaatttttaattgtgagttatattcatcattgtttgaaatgctaggtttttgaatgtgtaggccaggcctagttctaagggaggaagatcgttgtc

SEQ ID NO: 98760 - DNA, 596 bp, Vitis vinifera
  Intron number 1 from transcript GSVIVT01027804001 (locus G SVIVG01027804001) derived from phytozome v7.0 (chr-ID chr5 ; pos 7967678 to 7968273 reverse strand)
cgtttcaaggcgtttcacggcagaacaagttctaagtaagcttccttgtggtgatggactttgttattttcagatttgaattatgacaaatttcgtcccctgttttcttgagattctcatttaattaaaattcctggttgcgaatgttcggtctctgagaaaaggtgtggaaattgaaactaatttaaaattttaaactagagataaaatccaaaattgagagattgaaattagcagtgcgagaggtcggtttgggtgagttatttaaattttcttctagaaaaaaaaaacataaaactgcagtattcacaactttcttccctgttttctcagcaaccaaccaatggttgtttcatttatttatattttttaattcgagaatctggaatttgaacgaattatgttaaaaatctctaaaaatagaagtcggtttagccgttattatactttagcgggtttgataggattttttttttttttttgggatataaaggaggtattttaacttgaaagcgacgctgtgcttatggatttttcttaccggcgtaacctctatattctaagcgttgtaaatggggtgatttttcaggacatcc

SEQ ID NO: 98761 - DNA, 216 bp, Vitis vinifera
  Intron number 1 from transcript GSVIVT01028859001 (locus G SVIVG01028859001) derived from phytozome v7.0 (chr-ID chr1 6; pos 18040068 to 18040283)
ccattattctgggatctctgttttgatttttcttctctttttcctctctttcttctggcaactccatgttcatttggtcattttcccgttaaccctagttcacattgagatcattgctgatcttagccaatttttcccttgaaattggtcgccttctatgtttattgatctttctcgttatctgcaatgtaacatttgaatggattaatcaacagg

SEQ ID NO: 98762 - DNA, 995 bp, Vitis vinifera
  Intron number 1 from transcript GSVIVT01026864001 (locus G SVIVG01026864001) derived from phytozome v7.0 (chr-ID chr1 5; pos 19821362 to 19822356 reverse strand)
ggagaagagttcgacaagattcgtggtatcacctccataaattaataaagactaagacaagtatgacatcatcatagttggagggcattgttttctagcttcaccctgcaccacacctccaagttttatttttctttatttttttcttattttttgcatatcaatgtcttttacgtgcatggatcgaagctttttgtgtaagcattttgttcaccttgtgtgtttaaaattcatgtcatttttaaagttgttgtaaaataatttcatggtgggtaataaatcatgtgtacttactgtcataatatcttatttctagattggcagaaaaaaaaatacaaaataaataaaattttcatctatttctacttattttacaccccacccctactaaatcaataatcttgtaagttcaaggtgaaaaagaaaaaagaaaacctccaaaacttaaaaaaggatttgcccaagcctaaccacttaaaaaagtttgttgaattattcaatgttaccatatgttactttttcttcttttctattaacaactaaacttatcttcttttatatatatatatttataaggaaaataaattttttggctatatttgattcttaaaaattttgagggaaaatacaataaaataaattataaagaaataataaaaggaaagccagtaaagaaaaattaaaagtagatttaaaattaataaattatttttatatcatactttaaactcaatttatttatttaattttttaatataaaaattaaataatttaaaaatatataaattttttattaattttaattatatttgacttttttttatctgtcataataaaataaaatataagaaaattattttatttaactttttttttctttccttgataattttttacaatcaaataaatatagtaaatttacatactgattatcacttttgatagtaaattaatgagctgaaatgagaaacaagatatttctaaaaattggagaa

SEQ ID NO: 98763 - DNA, 721 bp, Vitis vinifera
  Intron number 1 from transcript GSVIVT01025518001 (locus G SVIVG01025518001) derived from phytozome v7.0 (chr-ID chr6 ; pos 7344 to 8064 reverse strand)
caggtgatttcagtaactttggttacattttctgatgcttcaagttaggtacctgtaaattggtttctacatgtatttatccaaaagtctgattctattttactaagtggcatcttcgatagtcaactaattttcatgagaatcgagaattcagcattgatgatgctgcatgacagctatttatattattatttattttttgtatacctaaaggaaagacttaagttaggatcagatccacataattgtaggagttatccacctttgttctaatggaggaagacttgccagttttatatatcgtatacttatcttgtattactttgactcactgagtttgtccgatttggagtatacaggctttggaaacattccttttaaaatgctctgtttttcagtgttctaaccctgctatttatggaaaaatatatctttactcgaacttttatatattgctggtttggtgtgtttcccattcacaaattttataacatgaacagcagatgatggcatatgagaaagagtgtttggttgaaattacatgcatatactcatttcctttttcagaacaaaataggcccatgatctttgaatgttttatcatatattattgtattttgtcaactgaaagatttgtccatgctttacaattcaattgatgattcaacatttgaggttctttatttgattttagacgcatactcaagcagaaagaaaaatc

SEQ ID NO: 98764 - DNA, 428 bp, Vitis vinifera
  Intron number 2 from transcript GSVIVT01024793001 (locus G SVIVG01024793001) derived from phytozome v7.0 (chr-ID chr6 ; pos 6905828 to 6906255 reverse strand)
ttggacttggagccaccaggttggtttggtttgttgttgttcctaatttctttcttggtgaatattattgctctgtttggttgcttagaaaagggagggaaaaagaaaaacaattacagtttagaatgcttttgttctcaagtattcgttactgatcaaaggaaaatgcatcctcaaactgcttgaatatatgcgtcaatgacagctttgaaataaaatttgttgttctggctgttttttagcacgatacttctctcaaggaaaactagaacattctatcaagtgagttattatactttctgaagccaaaatgacaagaaccataggaatcaattttgtttagatattctcggcaaccaaatggagagtgaaggttaggagttctatattcgctgcaggaccctaattatctaaaatgtgtgatagag

SEQ ID NO: 98765 - DNA, 530 bp, Vitis vinifera
  Intron number 2 from transcript GSVIVT01030258001 (locus G SVIVG01030258001) derived from phytozome v7.0 (chr-ID chr8 ; pos 9797733 to 9798262 reverse strand)
atctccttttccagtcccaaacaaggccttcaggggtacgtttgacttctttaccactagctttctaggtctttgttttttgtctttttttttttttttttttctcatttacttttcttcaaatcccaaactaccaacacgcaaattaaagcatccaaaatattatggattccgggggaaaaaggggagactccttgggttatagcctggttctatctggtttgaattaacaatcagacaccaattattatgaattgcataacatgtcaacttggtgggacattgattttttaaggctatgaatatggcagttgtgctcttatctcattttattatattgataatcaattgccttttttttttttttttggaaattttaattacgatttttagtatgattatccagaataacaaaaatttaggttattcacaaatatgcgcacgtttctgctttttgtttctgattttcatttttgctgttgtaacttcttggcgcttaagcagggagaggcgttgaaaacccaagcacc

SEQ ID NO: 98766 - DNA, 599 bp, Vitis vinifera
  Intron number 1 from transcript GSVIVT01028741001 (locus G SVIVG01028741001) derived from phytozome v7.0 (chr-ID chr1 6; pos 19238934 to 19239532)
atctttggcgcctgctcctgcgcccaccagtggtatatattatatctctttctcgttttggattatattctgtttggttgacgagaaaatgccggaacgaaaagagaaaaatcttcaaaatttctgctcccgttggtggcagaaattggtaaagaaaataattttcacataaaataatagacattttcattttgaaattgctttcggttttgagtatttgagttttgaagattagcaaagaagcattttaatatttttcaaaaaagaaaaaagggccaatttttatgatgatttcattatcgtttttccattctccagaaataaatagaacagacattcaagtttttttaaattttccaatattttctcgttacacaaacggacgattagattcgttttgtttcaagatctggtaattttcctaattccaaggttttatttatttattttttctgaaattacattggaattgtgattctaggaacgtttctttgtgtgattttcatttaaaaaataaaaaactgctagagctggtgatgatggagatgaatcaatattttatttgtctgtgcagggacggcaatagatcaaggaattgc

SEQ ID NO: 98767 - DNA, 537 bp, Vitis vinifera
  Intron number 2 from transcript GSVIVT01028056001 (locus G SVIVG01028056001) derived from phytozome v7.0 (chr-ID chr7 ; pos 3490531 to 3491067 reverse strand)
tgctgcaaaggttgtttcagttgtacatttttccttttcagattcatactgctatgacattggctgataatttgataactgtttaaagaatttgggttctgtttagtgggttgagtttgtgcatactgttagttgcaattctcatgatgttctttggttgatgattctattggttcttgtacatttataaaaattttaaggtggagctcttatgccataaagtcactagttatctgactttggaaatcaaaggttccagtgaaaacatgttatgcaatctgactaaatgtttcagaagtcaattaaatttatcgtgaattgggtgtttttttcaacttaaaattgcacattctcggagatttaaactgaattgcagttatgggtcacttgacctcttgtatcacttttgatttatttaattatttcagttgatgtatagttgatttttgtaacatcttcattacattttcatactggtctgagtaattggttgatgtaagatttactctcaattgcattattctattgtaggtcaac

SEQ ID NO: 98768 - DNA, 668 bp, Vitis vinifera
  Intron number 1 from transcript GSVIVT01028056001 (locus G SVIVG01028056001) derived from phytozome v7.0 (chr-ID chr7 ; pos 3491141 to 3491808 reverse strand)
gatacatttgggccgattcttgttccttctgacaagttcgttttttcttccctgattttctattgtctgattgctacgtacgatttcaatgaaagtatgttggtgaactgtaatgatccttatttggttagttgtatgaatcattttcgccatttagctctttcaagatttcagtaccagaacgaattgaatttaatctcggtagcatgaacttggcgtaggaaacgccaaacacaattccggcaatatttgaatttatataatttcctataattgcattctatatgagtttgaataacttaactaaatatctatgccaaaaactatataagtttgaagaaactgctgaaacatgttcagtttttttcttcttttattttagtatcttctgttcatgattgtgttgtttttcttgtattaaaaaaatgtgttagccatgtacaccatatgaaaaagaaaaaaaatcctgtttaaaattctggacatatttggaaagtgttcacttttggccagaaaagttggagcatcagtgcacggatgtatagaagtgatgtgatacaaaagatttaagttaattctggaataggtatggtaataacttatttttaatttttttggactgatatctttcagattgtggggtgcacaaactcaaagatcattgcaga

SEQ ID NO: 98769 - DNA, 867 bp, Vitis vinifera
  Intron number 1 from transcript GSVIVT01025082001 (locus G SVIVG01025082001) derived from phytozome v7.0 (chr-ID chr6 ; pos 4660078 to 4660944)
ttgaagtcttgcagaaaagcgggattctatttcaggtacttctctctcttaatttttttgatcttctttgattcttcagcgatttcgagaaattctctttctagccgctggcagctccagtccccttttgctgctaaaatcaatgaaaacattctgtttgattgctcagagaatataattaagatggaagaagtctcctgttattttatgaaacaaacatgcaccaccagaaaacagaaatccacatatcttcatttcccccctttttcctccattttctcgggaaacaaaaacaaataattttataagcacaacacgcagcttctctgaattttatttcttgaattaagtctatggttaggtgcttgttgctgcttcaaaatctgtaaaatacagcttaaagaaactgcaattccggttatgctgtcttgatacacactgtctcagagtctgtctccgtctgtgtctcactatcaacacagcaaatgcatgttgatgtagttggaccgctttaattatcgaactactcctgcttttggaagcaaatatggcaatttcaaaagtgcttttatcgtttttcttattttcatgttcacaccaggacccattttcctgaattacccccgcaagcgtgaggtgagggagcttccaatccctcatcaggccaccactgacattaattcgttgagtagagcaacttggaatgaccaaaatacccttcccctcctccaaaaacatctctcttgctcagcctgcctatcacagtcccctccaccttctctcaccgaaatcaatggcgtgaatacaattctctttgattatgagcttgttctggttgatttatgctatttatgtttgtgtgtagag

SEQ ID NO: 98770 - DNA, 571 bp, Vitis vinifera
  Intron number 3 from transcript GSVIVT01026953001 (locus G SVIVG01026953001) derived from phytozome v7.0 (chr-ID chr1 5; pos 19077184 to 19077754)
gacccagtgacagtaaatcttcaatacccacatatccttttgttttttggtttttttttttcctggttttcccaaattgttggtctctgaatgaaaatttgagctcattaagatgattgcttttctgggtctttgctattttgattagtttttcctgatttagctactctgaccatctatacatgtcatatatgctattctttgggggctttttggtggagaattgactctgggtgtttggtattttagtcatctgattcatttttccttttgggcaataggggattcttgatattgagtactttttggttctgatgataattgatttttgttttcatgcaccattttgcttctatgtttgtcttagctccattctagaaccattagattaccaaaaagatttgtttcttggtttgttgttttcattggtttctataatagctgcagatttgtggtttactattgatcttaatgactttagccattatacctagtagatttcagatggttatgtctaagtttgaaaaaggagaactttacccctgttgatggatcatggcaggtccttatc

SEQ ID NO: 98771 - DNA, 940 bp, Vitis vinifera
  Intron number 2 from transcript GSVIVT01023982001 (locus G SVIVG01023982001) derived from phytozome v7.0 (chr-ID chr3 ; pos 1935034 to 1935973)
ggtaagctgtatagtctgtaaaatatactccctcaaacactagcacacacattcaactttataaagcatgagggccaactcttgggattgatggacttgaaatgctgctcaagcatgcttgatcctcacccaaacccctagagattcaattttaggaatggcataaattgagttagaatgatggctaagatcaatgagcatgagatgattatagctccaaatttttttgttgccttgtttcaataacctgtaaagtggaaaagatgggaaatattcacaaacagaattaggatggcttgctaaagttgagaattggagtgtcttctcaagctattgccagccctttttctttctctcatcatttttgagatctgaacagtatgttaaatttccataaagaaaaatttagctcagtgcaaatgttggccaccctgaaatggcatatattcctgtaacataggtgtgatgttctgaagattttgaggattattaacttatttacaaacatatggaagataaaaaaaaaaaaaaatagaatgagctcaaagccctagtagtaccattagattttgagataatcactatgttcaaatatgtattaataaaaataaaggcaggactggttaagagatgtggggtagtgtggattgaagataccaaataagtgggatgaaggctttttgatatatgcttggtatcctatgctgctattatcacttattatcttgtccaaatgctcaaaaagttgttgagaatcttttctttctcatataggtagaaattagttgcctaataaataaattattaggtagaagtcattgcagtatgaaaaaggctttgttaaacatggttggggctctatataatattgactagaatcttcctcctttatgtgcacatcacagagtacagaactgtctctggagtcgctgggccattg

SEQ ID NO: 98772 - DNA, 947 bp, Vitis vinifera
  Intron number 2 from transcript GSVIVT01020999001 (locus G SVIVG01020999001) derived from phytozome v7.0 (chr-ID chr5 ; pos 15653892 to 15654838 reverse strand)
tggagtcattggaggcagacgatttgggtgcgtgccttttctcttttctttataaaaaatttcgggattttcttcctgaaagcaaaattttttattttcacaaagccaacaaaaaaaaaatggctgtcaaaatgttctcggtagttgcaagcttttgaaagaataaattgaaatcctcaaacgctgctaattgggggctgatgtgttgaattgtttttgattgatctatttgatatgcttgttttcgtactaatagttggtttggttgtttgaaaacatgttagggaaaaaggaaagaaagtgaagtattgaatttgggttatttatttatttttatattttatgtttgtaattttgtttggtacactggaaaaagttaaatctctacttataaatggctactacggctattttggtcaattaggtgagaaaccaactactacatttagcacaagatctcaattttctttcttttccaaaagcaaagggaaaaaaatagatgtaaaattttggagattgtttaaatatgggttccatcctcaaactacttttgggatttcccttttcattctctcaatcttttggagatttaaaaaacaatggaggaaagaaaaataaacatgaatatcaatttctcttgtttggttgctttagaaaataggaaggaaaacaaagtaccatgggaattaggaggctattcatctataaaactttaagttttccagttaaaaaggtgagagcagttggttaatgagtggatggcaaatttattcagctcaaacttaattttcattttccttccttttacttcctctctgcttcccattcttttacttttctcctcctttgccctctgaatagagccttagcaaccaaagctagggtaggttatcgtggttctattgtatttacctctttcttctaaattgggtcatttttcaatgtag

SEQ ID NO: 98773 - DNA, 471 bp, Vitis vinifera
  Intron number 1 from transcript GSVIVT01021009001 (locus G SVIVG01021009001) derived from phytozome v7.0 (chr-ID chr5 ; pos 15363428 to 15363898)
cccttaacaaatcctccggtcgcaagcgttttgtagtaagttttctcacctaaaccctaaaccctaaaccctaatctctttgccccttgtttgctttcccagaaaataaactgagccctaaggaaaacgaaagaaagtaaattccaatatgttctcttttttctgaagcagccaaatgctgctctctgctgcctcctgtccaaggcttgaattttccgttgcttgcttcaatcctaataatgaaaaattagaggattaagattttatgacctttttttttgcccctttttgagtttccttcagtttcttaaaatccaaagtagcatatccgttcgtcttctgtttcagaaacttcatatacatttttgtttctccaattatgtattttcctatttttgtttggtgataactggttaaaattggtttttgtgtatagttcaagaacttttctcagcggctagaggaaattga

SEQ ID NO: 98774 - DNA, 855 bp, Vitis vinifera
  Intron number 1 from transcript GSVIVT01021457001 (locus G SVIVG01021457001) derived from phytozome v7.0 (chr-ID chr1 0; pos 5599217 to 5600071)
gctgcaaggactaacattgaggttgttcttctctacacaatgcatcttttgcaattttgattttctttatttgggaataatctttggagcggatttggagtgtctaggagtttaatttctgtccaaccttcaggtttgctttcacattgtaccctttctatttcatgaaattaagggtgacatgtctcagtatacaattgcttcctcgattttcaaatttggcaacacaaaatgagtaaatgaaatcaaattgcctccctttccgttcatgatttaaaaatgttccctgtcatgggttttagtgtaaatatgaagaaagaaaataggcactttccaactagaaatgcatcctagttttccatgatattgtggaacacaaaaccttgaaacagaaatagcattaccctactgcaagctcaattcttcgagtttctggatcaatttaacaagtctttccctgtgcaatgttagcaattgagctcaattaaagtgtaggccctgcaacatatttagtctacctaagaaattcagcatgaattatgcgtgtgaaaaaaaaattaaggcttgcagaaaactcaagagtaattgaagtttctaaatatgttgccatgtactaatggtatacatacatacaagggtgaagataccaagcacaaatctgagtgtaagattgggtctgtaaacaatcttcactgctgggctggcttaatttgataaggcatgagctcaacctacatgaatgaaacttgaatagagtctcttaagggtcaagttccagctctgttagagcacagccaaatcaatcttgaagaccgtcttaattgatgacatttgtgtttgcaggtgaaaaccgca

SEQ ID NO: 98775 - DNA, 747 bp, Vitis vinifera
  Intron number 1 from transcript GSVIVT01025882001 (locus G SVIVG01025882001) derived from phytozome v7.0 (chr-ID chr1 8; pos 27507257 to 27508003 reverse strand)
tcctttcaaaggtgccaagctcagctgcggtgaaggtctctctctttctttcacctctgcactcttgcttgtttttgcttcactgtacatgcatatattgctttggtcatatgcttctctcttttcccaatttggttttttctttttctttgatgggtatataggggtttttctttgtgttgaatttcctttatcatcttctctttattgcttgctttaaagctttattgctcgtttttaattgtgttgtttattttctatatatacacacatgagctgcagtcatatcactctctctttcttaatagttcttcgattcccaatctaggtttctttttcgtcaatgatagatgtattttcttcttctgcatgtataatattctttatctggttctctctattgcttgattttgattgtattgcctgcgatttattttttctgtatttggttgtaggatttgattttatgattccttgctatatttaggtttgattccttgctataagaaaatttcattttcttatgctcactactggttatgctgatgattatgtggttcaagtattacagatttgaatagtctcattattcaattgtttcctaaaattttttacacattcaagattatgattctgtatagcccatcaaaaccctaaaaaaaaaaagaaggttgctgatatcttgatatgttttctaactttattgtttcaggtggttgtggtgcttgcgttgtcctactttccaag

SEQ ID NO: 98776 - DNA, 640 bp, Vitis vinifera
  Intron number 2 from transcript GSVIVT01027864001 (locus G SVIVG01027864001) derived from phytozome v7.0 (chr-ID chr5 ; pos 8773128 to 8773767)
ctgtgggctcagtcactgcttttacccattaaaaggtacttttattaaagtgtgatttgatcttttatttggtttttcttccatgatgttgtaatgggtctgctcttcttttcactttggtggccaaaatcatgttttttgatgatttatcatgtgggtggtggtgaattcatctgggcgtggatagatttttgtgggttgttgaatcttttttcccctcttttcgcacacggggtgtgaccatcatggttttcaagggtagtagcttgatgatgtttgtgaatcaatgaagtggggttgcagaattgtatgtgggttgtccatttcaaggggtaattgggatgttccaattctggattttagggttttaggctagtttcttttttctttttctttttccttaaatgaagttgatttggaagctggcattaaatattgattagctttttgtaccagcttcattttcctgacaaagtaagatgttgaatcttattacccaagaattttgggtacttctgttgtgttcctgttttttgagttgattaacagtgagggtgctctgtttctttagaggacattgatttttacctgttttgtgggtgttggtacttcagaagaattttaagtgcaagagaacggt

SEQ ID NO: 98777 - DNA, 1057 bp, Vitis vinifera
  Intron number 2 from transcript GSVIVT01027190001 (locus G SVIVG01027190001) derived from phytozome v7.0 (chr-ID chr1 5; pos 17148575 to 17149631)
gcgaaactttctgtccccgaagctctagaccccacgtatgcattataagaatagttataattttgtcttcttttcatacaccaatttttatgtttttctgcaacattttatcacgatttttgcattcattttttcgttttcgaagtatctgattcaacaatgtctttttttcttttttctttttttgttaatgctcttgaaggccctgaaattatgtcttctggggatccagtatttgtatgtatatgatcaagatctctgttctcaaatatttatttttatttttaaagtttattacaaactttagcatttgaagtgcatttactgattttaaaggcaaaatttgctttgattttgatcaagaaaatccagaaagctttttcaaaattaccttcttttggttacatttattctatgtggctgttaatgataggctaattctgaaccatgttcttgtcggtcttcattttgaatcgtataatatcacctgtttggtttggggttaaccatcttgtaggatgtgtgctgacgaagattgaaatttgtgcccctatgaataatctgaattgatacttctctattggttcagttttgtgtctgttaattgtttagttgttattgatttcaatcttcttaatgatgaaattttgaatatttcatatttgtctgtgttcatggtaccaaggatggtttaaatggaggccttttttcattttttcagcaacttggaggcagtgtcctcttgtaaactattgtgggtgttttatcagcaatctttgaatttggggtctagtgatttatgcatttaggtataatttctttgctccatgaatttttcaagaagaaaaaatacaaacaatgtggatttgttctaatatgttttggttattggtaattggaaattggtagcagaacacttcgcatttgaagttaaggtatagattattgggtgatttatcactttagttgaatgttgaaatcatttttagtaaacaccatatatgacatctgacaatatatatgcagagacaggcggtcatttacaaggttacagcaa

SEQ ID NO: 98778 - DNA, 909 bp, Vitis vinifera
  Intron number 1 from transcript GSVIVT01028256001 (locus G SVIVG01028256001) derived from phytozome v7.0 (chr-ID chr7 ; pos 4980395 to 4981303 reverse strand)
taggtggagggttcagtaatacagagaaaaggtacaagttgagaaccaacccagatcccataactgctaccttttttgttttctttaactactcctcctgatgttttggcctgttccatgtctatgtatcattcctgtttcagccgacctgggctgcgtcttttgttttggaggtggttatgattagcttgcatgttatggtttgtgtgtttttgcagaggctttttcagtcaaaaatagagcaaagtttcatttctttctctctttttgactctcctacttgattagcttccttgttttgaattctccagattcaaccctgcaaagaaaaacccagaaaaaaagaaaaagaaaacatcatttctctctctgggatacttgtgtttttatttattcttttcttttccctgttctctttttcttttctgtataattgatgtcatatgggttttcctcaagtcagcctttttgatagtttgtacctggtatgtaccaagcacgggagattggctagaatctcccaactgttgatgcagcttcatggacattttatcctctgttcatctaccttttgagtgactttgtttgcttttgtacttgtcggatctactcactttaattctattcaataaggcgctgccgactcaaattattaagttatttgtatctttcttctggttttttgcttttattttttctgtttgaaccacccatgattcaggatccattgaatcgtctgctcatagaatttctgggagctgttatttttattggtttcaattctctttcaatattaatctattgaaatctgccattggctcaacctttgaagctccgtctttaatgattctgatttcgcccatcaatcttgcagctgaagtttgaagtccgatcccttccagataaagt

SEQ ID NO: 98779 - DNA, 967 bp, Vitis vinifera
  Intron number 2 from transcript GSVIVT01027670001 (locus G SVIVG01027670001) derived from phytozome v7.0 (chr-ID chr1 5; pos 14493110 to 14494076 reverse strand)
gccctattttcctctgccactctcaatcctcccaggtactaatctaatcttgttatttatttttatttttctgcaaccccgcttgattcccaagaaaatccatcccccattcgatttccgggaaaattcatcctcgtttgatttccgagaaaatccatgcaaaacccccaaggaaaaccagaaagattgctgttttttttttgcttcctgtgttttctggatctgttctaggggtcgctttgcttttgtgccattggatttaaatttcacaaaccctaaatccacgatttttgagccaggctaaaaaacacaatctttgcctgcaaatcatgatcagattttgtatcctctgcgcgggctggactggtaggaaatatcgggaaattttccgaaaaatcggaaaaaaataggcgatacaaaccgaaaattcgccgataaattgcagtgtccggcgattttttgaagatttcgccgatttttcgcctgcatccatttttcggcgattttttcgccgattttcaccgaaatttggcgaaatttctcccatcgacatttcgcccccctctttctatcgccggccaccgaaacccgaaatttcggccaaaaaattggaaactttcatccgtggtgagttggccatatgtcccatgcagcctgcctagggaagccggtcccccactcgtccaaggtgctgccgctcctccccgggaaccattaaaatgtaaaaaacaatgcaaactccaatggtctaaaaaaaaggggtctacacccatcttatcaatacccactttcatcagagccctctagtttagagagagaaaaatggctcaagttaccagaattatcagtggtggtgtccagaacggccctctcttgcccaatctctccaagcctcacaaacccactcctccattcactactcccttcttgagatcagggcctaatgtttcttctttttctttgaagc

SEQ ID NO: 98780 - DNA, 836 bp, Vitis vinifera
  Intron number 1 from transcript GSVIVT01025716001 (locus G SVIVG01025716001) derived from phytozome v7.0 (chr-ID chr8 ; pos 12697558 to 12698393)
tggagagtttctgcaattgggttgacgagattaaggtgagttttgtcactttaacaagtttaagttgggggaataatggaaaatcaaattttggtgttgtgctgtttgtgggcatgactagaaattgagtttctgaaattgggtattgagaatagatgagtgttggttatgctgttaatctataaatgatgttttagaaattggaattaaagaagcaaagtatatgattgtcagcaacacaattgtttttgttagattcattttgcttgacttttaggttggtttcagggaccattatttagaaattggattattaaaaagtagtggattttctgtggaggaagaagaaaatgagaattgtgttctagctgttgatttatcaaagctcttcttcattttcttcttttttgaggtggtttgtttgaccattgtgggtgttggttttgattaaattacctaaaattggggaagtttggaagcttatatagtaatatcttggaggttggaaaggaaaatggagattcctttaagaatttaattttcagtttccatttttcgtttagttcaaatttacaatcatatgttttctattggttatttgtagggttggagttttaaatggctgaaaatagccagttttttttttaattattattattattattatgatcattttttgggattttttgaagttttatcttatatgctatatttgcagctaatgatttccatagttttggaagtttttctcttttaatgactttgggattctgaggctctctcctttctaaccttggatatgcagtgggggaattggcatttttgattgtgggact

SEQ ID NO: 98781 - DNA, 509 bp, Vitis vinifera
  Intron number 3 from transcript GSVIVT01020005001 (locus G SVIVG01020005001) derived from phytozome v7.0 (chr-ID chr1 ; pos 11728761 to 11729269 reverse strand)
ctctttcgtgagattcagagatctttcttgtctttatcagtattctaagtcaaaagttgcatatactctctatctatctcattaatcaaattttattttcatctatggtgccaatattaacaactgtcttgccactcctctgagtttgaatttggcatagaaagacttgttgctcacttgataacctgaacaaattttctctttctaattaccattcttaaactcagagtttgaggtaatgtttttgatgcacataactgagggggccttggatgtggtttaccattataatgattataataggcccccaaattctttaattttttcatgggagccttttgaaacaaatattgactttggcttcctaagaaactgggtcttgtggggacttatattaccttgaaagcatacctccctctaggcttgtgttaaagtgttatttatttttgttgatttgccttggttactcttgtgcaaatgtatgcatgatatcatcattttcaggtaaa

SEQ ID NO: 98782 - DNA, 994 bp, Vitis vinifera
  Intron number 2 from transcript GSVIVT01026963001 (locus G SVIVG01026963001) derived from phytozome v7.0 (chr-ID chr1 5; pos 18982991 to 18983984)
aggaggtatcggatttgtgttgttgttgtttttttttttttttcaaattattatttttatctggttggttgccgagaagatgcagggtttgattggaatggttgaaattaagttacgtagaaaatgactcagttttgaagacagcaacagaaatcaccgagtggaaagagatcttcctcttccattcatcccacatctcctcatcaaccaaaaagagggttttattcgaggggtttggtttggtgggaaaatgtgataaaagaaaaaaaaaaaaaaaggattgaaacttataatttacaacctgcaaaattcaggtcttcaataacttgtgcctaataccattacagtgcacgtgacttagttgaggtcaggcttcaatctcctggaaacataaaattgtaagcttgctgtttggtaattgtttttgaaaatagtttcttgtccttgaaaacagttagaaaatactacgggcaacttttgacaaaaaatagttttttcaaaatttgttcaggttgtttttgagaaccaatttcaggtgttttcagtttgttttttgcagagtgttgttaacaacaatggaaaagatatagaatattttggaagcttttgcacgatgcttaagtgtacaacaagaagaataaactaagaatataaacggtcttaataatttagaactatttttaagaaatgttcttaattactgttttcagcccttatatttttaatgccggaccatcaccatcttggacccaagaaaccaactatcagtttttgttgaggtgaagtttccttgttttggatgctaaagcaaaatgagcctaaaatatgaaacattatctggttataattttgctcagttttttcagcaatgaaatgcagagttgtctaattataaatttgcttcgttactgtctttggtctggtgttattttgttcttattagccaattcttgtttcagctgtgcctttgcaaggagcagtttaaggaggaggc

SEQ ID NO: 98783 - DNA, 746 bp, Vitis vinifera
  Intron number 2 from transcript GSVIVT01023143001 (locus G SVIVG01023143001) derived from phytozome v7.0 (chr-ID chr1 2; pos 22078384 to 22079129 reverse strand)
tttctggattggctgtgaagtttggattttgttatttcgtttcattcttatatgatcagtgataatgttactcttttacctagctacatagtattggctttaataaagttttgttgttaaaggttgaatctattgcattactttcatgatcatcatgtacctcattggtgtttggatgtgacatcataacatcatctatatttccacaacctgattggaaagtaggacttatttttacttgaaaacgtgttgaaatgtttccttcaaaattttattatttgtgagaaataagattccgttccctgtaagtgccaggtcagtagaaaagctgcatcatgtgctcttagttgctcgtgttagacctaacaacagtcaaaataaacatcggtgcatttaacaaaaaagagtttttttccctgactttttcaaagtataggttttaatttagatatcaatcttttttgataagcaaagaatatgttagaaagcataaaaaagatggtgcatcaaaatacacatgacgtatacaatgagcacctaaaggcacaactgattaatttggatatcaatcttgtaacttctttcttttttcttcttttattttattttatttttgggcatgaatgcttttggatttgaacatacaagtagttgaacagttacattgctttttatgtaattctcgttccttgttttaatatggcattgcagtcttgcacctttggtcaagaaggtcagtgagacac

SEQ ID NO: 98784 - DNA, 689 bp, Vitis vinifera
  Intron number 2 from transcript GSVIVT01019215001 (locus G SVIVG01019215001) derived from phytozome v7.0 (chr-ID chr1 5; pos 3294452 to 3295140 reverse strand)
tgttaactcatttgtaagtttccttttgtggattatgtattatttatattgattaactatatggtaattgaaaagcaaaacaatatataaagtatgatatttattcatttttctaaataaattctttgtaattagtttttaatttataaaaatgttatatgtttaagaaacaacatataaaattgtgtttcacataattagactttcttgatgcaaagtgccaagtccttcttgatgtaagttgcatagcagcagctaaatgaaccatctcgtgaatccaggcatgaacatctatgctatttttggttcttgaaaagtactaagaaagggaaaaaaatattaaggaaaatgattctctcatgtttggttttaccatgtaagatacaaaagaaaatcaaatataagtaaaattagatagaagcttatgcattttcaaattacttaagctttttataaaggaagaaaaataatttaaataagtttgaagaagcatgtaaaaataatttattaactttataactactttttatttttctgcattttttctttgtttttctttttcctctctatttttttttccttgcatttctcctcaaattttctaagaatcaaatataaggctacaatttttatagtggtacttgatgtcggcaaaatctaacactaaagcacatgtaggcaggttttgg

SEQ ID NO: 98785 - DNA, 747 bp, Vitis vinifera
  Intron number 1 from transcript GSVIVT01023283001 (locus G SVIVG01023283001) derived from phytozome v7.0 (chr-ID chr1 2; pos 20149683 to 20150429)
aagaggtggtgggtgccctagaaatttagggcactttggggggtgcccctttgaaaggctatttttaacattccctttacaaagaccccacgagtgggcttctgctaatctactactgaggtctgaggtctgaggtctgaggtctgaggtcccccacctgctccaaaggccaaccccaccaccccaccctcactcttaacctacgcaccctccctttctctctctagtctccacctcttcagaggggggtggaaagacaacagtcaatcagaaagcaagaaaccccacaaactcttagtcctagttaggaggcccagaccagaccctgcaagcggaaaaaataaataattttttttctttttatttaaggatttcttcgctctccttttcatcagtctttttttttctctctctagaaaaacaagctgagcaagatgaggctgctgaattacagaaaaaggagaaaagcagcatggattttgatataagaatttgagattttcgatttttggttttttcttttgtgggggggtatttttgaggaatattgattgggaattgagaaaatttttacctgggtggatggagttaacagatttgcagagtggtaagcaaggcaatgcaactggtaattcgcagcagcagcagcagcagcagcagccccaccaccacctccaccgtcagcagcagcagcaccaccagctgcttcatcagcaacaaaaatcgggaggatcttcatcgcagcag

SEQ ID NO: 98786 - DNA, 538 bp, Vitis vinifera
  Intron number 4 from transcript GSVIVT01021825001 (locus G SVIVG01021825001) derived from phytozome v7.0 (chr-ID chr1 4; pos 6865776 to 6866313 reverse strand)
tggagcaggttctcgtaattctaatatgattatctgctccttttcgttcattttttttttcttttttctttttttgattaaaattttctttgctctctgtttggttcccgagaaaacaggaaaaaggaaaatcaaacatttgtaacgtgttttgcctatctttcggaaacaaattggtggcaattttaatacctttttaatactttacgcactataaagctgaggtgattattgcaagaatggttttgggaatgcactgccatttgacatattgaaatcattttttcttttcttctattttattttggtatttttttttgtttttttgtttgttgaggatgcgctaaaattgagttttttattgttcatgttttctgccattttgttttacctaaattgagtgggaacttttgattttctttgttaatattcaaagtagttacttattttcatgtttccttagtaaaaaaaatggagcactatgtttttattttagaaaataaataaacgtgataacttgacatgctcttggtctagt

SEQ ID NO: 98787 - DNA, 387 bp, Vitis vinifera
  Intron number 4 from transcript GSVIVT01022282001 (locus G SVIVG01022282001) derived from phytozome v7.0 (chr-ID chr7 ; pos 18182581 to 18182967 reverse strand)
ttcaaccaagtgtccggtattgtgttatggcataattattaaactttaaaacatctattagatgtgtgtttgggcatcccatgaaaaatcgaatttctcctgtatttttttcttagcatttggagctacaaacataccctaaaaatagggtcagtaaaggaaagtcagaactatgaaagattttataaaaccagttttgggatttattggaatgcttgcattttctaacacgtctcattcatgatgatgaatttatatataaaacataatggtttgattcaaattctaagggatgtgtaaatgcactctaattgtttcatttgaatagtctttctttatccttcgtccagtgaataagtaaaatattgctgtacttcaggggaagaa

SEQ ID NO: 98788 - DNA, 830 bp, Vitis vinifera
  Intron number 1 from transcript GSVIVT01029282001 (locus G SVIVG01029282001) derived from phytozome v7.0 (chr-ID chr1 1; pos 17646865 to 17647694 reverse strand)
cgaccgcgtcttctacagaggctggcaagctgttggtaagcaaagttctatgtgtgtgtttttctttttgtgcgcttgtggtgcgtttggtttccgagaaggaagatggactttgtttgggaagatgcaagtgtggcggcctgttttttcagcgggtgacgtgtaagattttgtctcgtcatcacgccggcggtaaaagaagaattggtgaaatggaaaccagtggtaaagctaaattttgagttttggtccaaggaaactgaaatcttgaatttttcctttcccagaaaactatgatcgtgtgtttctttcttcttcttctttcttatttatttcttttttccgagaaaacattattgagtttttgcgagaaattaaatttttgaatttttttttctccatgaaaactaaaatctggatttgttttttcttttgtccgaactcccgagcagcaaaacacaggaacgatattttatttctttgtacttttggtttgctctgtttggttgctgagaaattgctctatttggttgttgagacaatgtaagaacgggaaggttttttcccccttttctctttccagatactgatacaacatgaatatatatgatttaggattcccccaccctcttttctcagcaaacaaatgggtgtcggaagaaattttagagtactgagaattttcatgctaagtggggttttaattttgaattatagttccaagagttattctagagattgttagagtattaattttatcagatccctcagggttttttatctctcgattttcaggatatactgaacagataaaaaatccccgggacttt

SEQ ID NO: 98789 - DNA, 478 bp, Vitis vinifera
  Intron number 3 from transcript GSVIVT01024433001 (locus G SVIVG01024433001) derived from phytozome v7.0 (chr-ID chr1 6; pos 2510503 to 2510980 reverse strand)
gatatgtaagtttcaattcctataaattttcttatatatataatttggtaaatttggagttgatatgatcttagtgattcaactttttatatatagataaattataaaattaatgtttgattagaagtgtcttgagatgattagtaagtttaaaaaaaaactagaatatcagttataagagattgggacattgatatcacctttacagcatgatccaatgtcattttgttgagtaaatagcaatttcgaaggatcttgaggtggctcaatagatagtaagttagatgttcacctttcttcaaatttcactaagaaatgaattgttgggtttcagattacaaggttgtcaaaataagctatatgtaggtgtaatcatgtatagattgtctattataatctcaattgaaatttttagttgtaaagacttattttggcatgtttgttgggcttatagtgttagtgctcggagggaaggatc

SEQ ID NO: 98790 - DNA, 517 bp, Vitis vinifera
  Intron number 1 from transcript GSVIVT01023252001 (locus G SVIVG01023252001) derived from phytozome v7.0 (chr-ID chr1 2; pos 20552021 to 20552537)
cagcagtttcaacaaaggtaatgaaaccccgcgattgggtacgactttgtttttctcttgtcttatctcaatatgggtaccattatccagcgagttaagcattttgtgaaatggttgtgagattcatgtttcagtgactaatttggaattcatttgggagtgattcttagagggttaaaaaatgcttactaatgcaaaattatgcattttgaaaaattttaaaaatctagagaatcacttgaagtgcttttgaactagcactggccaaggacttcaaccaaaaattaccttcttttttttttaaaaaaaaaattcaaacacatggattcttcatgaatgtgtttctgatagaagtgattccaagagaagtgcgacaagctaaaactgcttttacaagaatcactcccaaagaagcccttggtggcacaaatgcctctgacattttcgaggtatattcaagcattatgccctttgccttgtattctcataatttcacctcaattacaggttgaggttg

SEQ ID NO: 98791 - DNA, 644 bp, Vitis vinifera
  Intron number 1 from transcript GSVIVT01027545001 (locus G SVIVG01027545001) derived from phytozome v7.0 (chr-ID chr1 5; pos 15871073 to 15871716 reverse strand)
gcaaggtaaaggctctcaatcaaaacccaattcttattattacttgtttcttgaagaaatttgcaggaatatcagggttttggctgtttgggttttaatggactgaagaaataagaaatcaagaactaagttgattgtcaagaggggtctttctttggtttttattttttattttttgtgtgtatgcctatttatagatagacaggggaaacaaatatggaaagtgattttgatcaagctttggaaattatcgggaaaaggaaaagaaggagggaatttcaagttatcttccacccatccagcataggataaaaccggggaaacaataatcaattcatgccaaagctcaattcttacatcaagtgtcaactaatttttggatttttctatctcatcttgatttgccttgggaaaaaatggaattgttgtgaaagtgcctattattttccagccattggggatcttccactatgattaatttcagggtttatcctttgaaccccaaatttggaggttttgtttgttaatttaattatttttgaatcgggaatggagttcaaaacctgaggttggagctcaaaattttggttctttgaaaactttgtgcagggttcctataactataacattctgagggatctact

SEQ ID NO: 98792 - DNA, 643 bp, Vitis vinifera
  Intron number 1 from transcript GSVIVT01026258001 (locus G SVIVG01026258001) derived from phytozome v7.0 (chr-ID chr1 0; pos 15030104 to 15030746 reverse strand)
cgtacatattgctctcatctctcaagttcacacaggtgaggagaagggctgcttttgtccttgcgtcttatactctcgaaagggttagacaaatctgcttgtgtctgacatctttccacttcctttttggtccccttctcatttcccaatccccccattaatgcacttctgcactagattcttgtttcttttcaatctttcggatatcgggccttggttttcatcatgataatgggttttggttttgccgggaaattcacctttattatttttttatttttttattttttgtgaggggttcttttcatgcatggtgatgcttgctggattttatctcctgggttttgttcagaattctgtttcttttttattgtatgtaatccaatttgggaatcagatgatgagtcttggttttgatgatgatcgcggggttctggtttggtcgaaaacttactttttctctgtggggtcttttcatgcacggtgattttgactttatcttctgggttttcttcggaattcagattcctctgttcatgacgatccaattttggattcttacagtcatattcgtattgttttggaatgaccttcttgttgggtttcagatcaaaggggctcttcttccctaggcacttttgag

SEQ ID NO: 98793 - DNA, 883 bp, Vitis vinifera
  Intron number 1 from transcript GSVIVT01026467001 (locus G SVIVG01026467001) derived from phytozome v7.0 (chr-ID chr4 ; pos 23107548 to 23108430 reverse strand)
gctgctgctccaaaaaactcttccgtccttcacaggtctgtgcacctctttccagatgatcatttcatgccatatgtctctgttagtcgcttgatttattctaaattcaattcaatctttttatctctttcaaaatcacacccaaaaggaaagagaaatgaaaaattttgggagagataagcatctcttctagttccatttctaccccaggtttctgtgggtagcttcaaagttcttttttctagtgaacaggctgaagaattaaactcttattccaagttgtgatgaaaaacatcatcaaatttcaatagatgctcaaatatttgagttaaaaacagagtgggtgttccaatttttattttttattttttaataaatcttgtatttttttgcaagtctaaaccaaaacccagaaggaatgattcaattttcaccgttaattgatttgattgggatgcagaagaggatggaattttggttttttttcaactggggatgtatttccaagactttagcctgttgtgtgagtttccaactttgatacatgtgtttgtaatgcagattagaaatcacaatataccctgagagcttaattatttctcagccatgctgcataacgtctgttagatacaattgatgcagtgaagcatttctcattagttatgacccactaaatatgcttgagtaggatctcacattgcctggttttgcctcattacgatctttataggtgtatctttgaaacttgtattgtctcagttatacgttctagggttttgggttcaattcatagtgaaaattgatgctagctgatatttatttttcaacaacaaaggtctcaattctgcttgtgcaggcagtttagtgttattggtgcagcata

SEQ ID NO: 98794 - DNA, 604 bp, Vitis vinifera
  Intron number 1 from transcript GSVIVT01024811001 (locus G SVIVG01024811001) derived from phytozome v7.0 (chr-ID chr6 ; pos 6689637 to 6690240)
ttcttaagttccaacacctcgaaaacgatcctcaggttttcattcttcacttttccgatgcagattcgtttgttcacaaatcgataaaggatgccggtgatcatttggttttaaaattgaataaatcgagagagcatcttagatctttgacttaaattgttttgatatatggcattggcacacttgaatttttagggtagacttgtcacttaatatggaatcagatgcctttttcctgaaagatttaattgccgagagagaaggaacaatctttttgggagtttatattttctagtttcattagttctttgaaacattttgatcttatatttaaggttggtttagattttgaaaagtttgtaggaaagaaaatagacaaaattttaaaagaaaaaaaaattatagaaaaataaaaaatcaatttaatatttataaattctaatttaattatctctttcctcttcttctagttaaataaacaagaatttgaaaatgatattcaaacatagatttaggttttattttagggctcactgggtgttttttttgtttatttttcctcaatgcagaaactggtttacagtgggagtgaagtaacagagga

SEQ ID NO: 98795 - DNA, 803 bp, Vitis vinifera
  Intron number 2 from transcript GSVIVT01019110001 (locus G SVIVG01019110001) derived from phytozome v7.0 (chr-ID chr4 ; pos 16651220 to 16652022 reverse strand)
tttagtcttggtgagatcaatattaatgttccttaatttccacttcttattcttaatatattcatccactctagaacaagattaaattcttatttgaagtatcaaatgtttgggaataattattatacagccgtttttcaatgtttaatgtctttgtaaatagctctttgctgaagtattaatccaattatcattttaagtggtattctttcaaaaatggtttttaagggtctgtttgactaaaacggttttctatttgtcgtaacagaagaccaggaaaacatgtttagcaacctattttttgttcttaaaaacaaaaaatgtagtgtttttggatgatatcttttagttattttttattataaaacatccaaaaacaattttttaaaactattcttaaaaattagttttttaaactattttcaaaaattattttttaaaactattttcaaaagtagttatcaaacatatcctaaaattttatctaatattttatttttttagagaaataaaaaacccttttaagcatttaaaagtgcttctaactctcgtatgtctttcaaacaagttttcaatttattaaagcctagggctctgacttgatcttctttgttctctttctattaacataatttgtattatgaattatcttaaaaagccacttactaattcatatttatacgtctaacaaagaagatgatctaaaattccatgtagacatgatggtaatgaatggaagcatctttaatcttctttcttaggcttagtttgattagggttttgaaatatatgcagggttcttc

SEQ ID NO: 98796 - DNA, 542 bp, Vitis vinifera
  Intron number 1 from transcript GSVIVT01024349001 (locus G SVIVG01024349001) derived from phytozome v7.0 (chr-ID chr1 6; pos 1293062 to 1293603 reverse strand)
ccgccgcggctacactgtccacgccgctctccacggtccgattcttcttcttcctctttttcatcatttttctcctccatccaattttttttttttttttctgattttttgaatttttgtttgagatttatggagacaggatatttccacctggttgcttttttgatccagcctgttattttttttattttattttttatttttttatatttatttcatattaatgtccgacccacctcgcagatgcctctatgtttcttttcttctggataattttttttccttccaaactttctttatttcatttcatttattattacttatttaaaaaaaattaaaattcaataaattaattttttttcgaaaatgatttagtaaattaatttaatatttcaatgtcaccatacgtgcttggcagttaaacgatctggctgaagagccagtcacctacaaatctaattggtttgaccattttgtcctcggttttaatttctctgacaaaaaatttatatatttatttatggtgggttttccaggtgaat

SEQ ID NO: 98797 - DNA, 510 bp, Vitis vinifera
  Intron number 1 from transcript GSVIVT01026428001 (locus G SVIVG01026428001) derived from phytozome v7.0 (chr-ID chr4 ; pos 23692036 to 23692545)
caaggaagcatttaaatagtgtaagcttgttctgcaatttaaactatttctttcaatcatatatgtattgctttcgcattattattggtgagtggaggcctacccaaccaaaagatttaactaattcggttttgtgaactctgcttaattagtcaaatgaaaggatgatactcattttgaaggttggaatcgagctcaagtcttcgactatccatttgtgtttcctttcattttcatcataattacctgtggaatgtaaacaaagtacccttgcccacaagaacaccccatttgcagactataaatattccttcagccaactgcattggactaattctaatacaaaaaagtcattcatagactcatgacacatgtagttgggatctcaagtaccttatttccaatcatacacctgacatttcttttgattacttaaaaggtgaaaaccaccctgacctctgtcagatttgaacaggttgtgttttttgttttcaatccatcacttgttgc

SEQ ID NO: 98798 - DNA, 1005 bp, Vitis vinifera
  Intron number 2 from transcript GSVIVT01021520001 (locus G SVIVG01021520001) derived from phytozome v7.0 (chr-ID chr1 0; pos 6529798 to 6530802 reverse strand)
gctcaccctgaaggtatatgctccttttcttagagcttgtcctctctttcaatgaactgatgcatatgttatatttggagttggtacttacatgctatagatgcatacacgtctacaaatgtacaagcattgttatgcatatatgtgtacataatcaaacaaacacacacctgcacacatgtgcacgctcacacacacacacgtgtatttgtgtatgtgtgtatgtgtgtatgtgtgtatgtgtgtatgtatgtatgcttgtgagtgaaccaaaatattcatatattcaaacatacatgtgtacgcatataaatacatgtaattatgcatgatgattgttgggtgagcagggagggtgaggtggttgtgatgttgtgcagaaatgaatttaaggaagaaaggtaatggccattgggacaaatagaatttagtgtgcagtttgattgaatgttctaaaatcactttagtatgaaaattagcttggaagtcactgttgccgtcacaagtggaaaaagtaggtactgcctgcttttattgagatgtataaaaggtcattgcagaattgatggaaaaatatggttgctggaatatacatttccaagacgtcttttcatcttcattattcttcttaaagagttctcagaattgatggctcctattccctgcaattacctttttctttttgcaactcttcgagttaccaaccataagagttattttggaaaagattacccttgtacctcctaggaaccactgaccacttggaaggagtgtagtatccatggtctataattgcaaaaatttcaataggagaaaaaaaaaaaaatggttacaggtgatgtttgcctcaaataggtaagtaggatgatttcaaggagctcaataatcacatacaaaggttaatggatagttcatttagtctttcatttttgaaattagtacaactctatgaaacatgaagaaatgcaacttgaacccacaaatttaattcttatgcaggtgagt

SEQ ID NO: 98799 - DNA, 758 bp, Vitis vinifera
  Intron number 2 from transcript GSVIVT01027206001 (locus G SVIVG01027206001) derived from phytozome v7.0 (chr-ID chr1 3; pos 18319344 to 18320101)
taattcataataacacaggtagagtgcgtttttcagtgtttttttttataaatatttttagtagaagtgtttttaaataaaggcatagctaaaatatttgtagtggaagagttttctctaaaagtgataatgacactggcaaagtatgtttaatagtgtttttcttggagtttttatgagaaacattttctctttatttgtctttaggaaattcacccatcaaatgtttatctaatatcactataagtgaattttcaatatcttaaaattttttaaattttgttagacagaattttttcaaaaatattttttagactaaaagtacttttttaaaacacatgccaaacgaagctgtaatgtgcatgttgtgatttacaatataaaagttaaacgagtgtgtttgatagtgtttctattgaaagtgtttttaatggaactactttttctaaaagtgtttttaagaaaataacctcttcaagcatttttcccaaaaacattataagtaattttataatgttataattaatttttaaaaattttaaaagtatttttaaattttcttaaacacatttttttttaaaatattttctaagttaaaaacattttctagaatagttggctaacaaattaaaaaatatattatttttctcttcttttgtgtatccttacatacatttagatagaaatttattatttctttgcttaaacctattatcattagagttttgtattcatttattaattaatatcacctcaga

SEQ ID NO: 98800 - DNA, 593 bp, Vitis vinifera
  Intron number 1 from transcript GSVIVT01026414001 (locus G SVIVG01026414001) derived from phytozome v7.0 (chr-ID chr4 ; pos 23815408 to 23816000 reverse strand)
cttaaaggagacagcgcattgcggtatttttctttctcattttctggtcgtcgatctatcttcttttttcttcatttggatgccaaaggaaccatctttttttctcagaagtttatgattttttgttcaatacattcatcagcgtctctgtgtcactgtgtggtggatcgttgtcctgcttctgattttgatttcttcaaagagaaagtttcttttattttgatcttttatctttcttaatttgggatctgatgttgcctcttttcctcccagaagaaatataaattatttttcaaggttgaatagttaatgggtttgtatagatgttgctgctgttagttgaatggagtctaagtcgactgttttagttttctgattttgtttccgcagaattgagaatattttgtgatttcttataattgggttttggggggttcatttcaataggagcatttgtaggtagctgttttgaataaagagaatgatgatctttgcagtacctcttatttgtctgcgtaattaataagatatatcttatgttatcaaataaatttgcagcttttgagatatcatccaagaacttaaagggtaca

SEQ ID NO: 98801 - DNA, 697 bp, Vitis vinifera
  Intron number 3 from transcript GSVIVT01020204001 (locus G SVIVG01020204001) derived from phytozome v7.0 (chr-ID chr1 ; pos 9118233 to 9118929)
cctgcttttaccttcatactcgccatcatttccaggtatgtgtttgtatgtatataaatagttctgggtcaaatggtagaatttatcatatgggtttgcaccataaatttacatttctttcttaagactgagtgaagatgctcatccttccacgaattctgagtataattcagaatttttaacttcaagccagttagattactacactttcagaaaataaaaggggaaaaatatacttgtccatcctctttcatcaacagctgcagcggtcactttccttgggattcactcaatctgagtcactttccttttgacgcattcaaccgcgccagctcatactcccactacagtgtctagacaggcccacttgaaaggacttttgtttgaaaaatggcaacatatatatttttcaactttcaaagatgcttacattttttattttgagctagactttttcctccatgtctcaattaacacatcaacttcatctagtaagaagattttaatttcagttttgtgaccatcatcatgatgttaatctagttgcattaaaaaaaataaaacatagtagagaaaacccaagtcagtctccccaaatttctgaaaaatcttaatgcgacttaaaattttaagttgacatatgtaatactcctgtgctgataactaatcttgaatcaaatggatggtgattattagg

SEQ ID NO: 98802 - DNA, 971 bp, Vitis vinifera
  Intron number 1 from transcript GSVIVT01025827001 (locus G SVIVG01025827001) derived from phytozome v7.0 (chr-ID chr8 ; pos 11451801 to 11452771 reverse strand)
tgctggtacaatctcgccctctccctctctctatccattactgggtgctttttaatttttttctgggtttgttttgtcaaggtggtcactagttattagagaaagcagaggttcttgtctgggttcttgattatggacgtgagtttgacagttttgtttttttgagtttagttccttgacatgacccaaatactgaggctgaaagggatagggaggttttttttcttgggttttgccatattatatataagaaaataacttagaaaaaagataagtattagcgaagttgttgactagtctttcggctctcagaataggtctttatataataggagatccaacataaccatattaagccttgagcaaccaatcagggttactcactgccagaaaacaaagagagcccttaactggaaatcaaatgagtctactgtgtttttctgttggaatttaatgcatatgttggtggtagaacatggaaacatcatcagaaatactcacgtgagactgcaatttggaaattgatcttgtttcagacatgttaggtaatggaaatagactcatccagatgattatggaacaatcgaattaacccattttaccccaaattttgaaaaagttatgttctagtttcggatgtgggtctcccctaaagcaagtttcctagcaattatgactaggttgctgcttccttaaaatagtcagatttttttttaattaatttttcaaactattttgcagcattttcccatgctttactgttaattacttaaacttgttaagaggagcaagcaggaaaaacacatgttaaatgtaattattatttgttcctctccatatgtatgaagaacaatggtttcttttcctagcttagtactgttcgctcaggtattgttccctaatatatctgtatttttgtggtgtcaaattttgcagctttgccaatatcatctcttttcccattcctttat

SEQ ID NO: 98803 - DNA, 630 bp, Vitis vinifera
  Intron number 1 from transcript GSVIVT01021666001 (locus G SVIVG01021666001) derived from phytozome v7.0 (chr-ID chr1 0; pos 8946454 to 8947083)
tcggtcgtttctcatctcatctcaagattggcattgtacgtttcaattcattctcacacttgctcggaaactctggttttatcctttgtttggttgctgagaaaattgctaattttttttaataaaattttttgtttcaaagtccttccttttattagcatctgaacgaggatttgaagtttgtgattagttttgcgtgtttctttgatgttggtgaacttcatgttgattgatgggtgtagttgctttggttgtgggatggaaaatggtagttttcacttgtttctattatttgtatggggtttttgctatgataaaacaaggttatgggaattgaatgaagtcttaattctgtatagttggatttcagttctcaatttgttgatatataaaacgaccaaaaatttgaattggagctgggcttttcaattcaatgtctatgcaaaaaagagcagcctaaatgagattgtttgaaatggaggagcaaagtagtgattgttgacggtctaggaattttttttccaagattgcttgggtttctgtcccttttactctgtgaactggccggcttttgtgatgatgactgtagtgatgtttttcttgtcttttcatttcaggttggattgccaa

SEQ ID NO: 98804 - DNA, 832 bp, Vitis vinifera
  Intron number 3 from transcript GSVIVT01023131001 (locus G SVIVG01023131001) derived from phytozome v7.0 (chr-ID chr1 2; pos 22264338 to 22265169)
ggtgtaagtttctgtctttatgtttatatatagttgatataattttggccaatgttgctttcttcaatgtttaggagggtgggtttttttttaactttctttttttcttgattattatttgaaacaatgatgagttgctaattttcccaaaagcttaagccatgtttagtccatggaaaatttgtggaaaaatgtggaagaagaggaaaaatagaaggaaagaaaatgtgaaagaaaaaaaaaaggatttgaagtcaataaattaattttatatgccactttcaattttaactcctctatatataaagattaaataatttgaaaacaaataaatttctaactaattttaattttatttgattttttgtttcgtatttttcatagtatgagaaaatcattatccttatttttatttattttttaactttccatcgtactttcctacaaacatagtgaagattataggatttgagttcacgatatatgtcaagctagacaacactggttgcagataaatcacacatttaggaacacggataattaggccggtaaataatgggggaaggactcaaacttgagaccttagggctcacgatgtatatcatactccatcaaatgacattataagattttcactgattgattcatttgggcccagtacaaatcaacccttaccatgaatctgtcagatttattgttatattgtaggccactgagttgttctaacctttgtcctcatgcttgcaattggttcaaccttaattgtaactacatctgagaatcctttctaattttttgttctttcttgttatgtttgtgtggataggcaagc

SEQ ID NO: 98805 - DNA, 451 bp, Vitis vinifera
  Intron number 2 from transcript GSVIVT01018860001 (locus G SVIVG01018860001) derived from phytozome v7.0 (chr-ID chr4 ; pos 19160096 to 19160546 reverse strand)
ggtttcaaacacaaagtcaccgacaatcttcaaaggtcttttctttttagatcaattatctttttacctccgtttggtttctgggagaaacgtggaaaacggacgaagaaaaaaaagacatgatctaaattttgtatctttttatttactcttttgattgctgagagaagtatggagggcaaacaaaaatcaacctcaattttgtatctttttggcttcctaaaaggggagaattatgtaaaatgtgtattttagcctcagatggtgaaaactacatggttcaaacttttcctggtaaccgaacagatggttaagggaattcttttccttgtccacttcctgaagattaataatgtcaattttgacctttgagaaattggggtttgatcttcatcttattcgtctatttattgggagttggttttgataaaaaggtgggtcatagaagtgc

SEQ ID NO: 98806 - DNA, 695 bp, Vitis vinifera
  Intron number 2 from transcript GSVIVT01023418001 (locus G SVIVG01023418001) derived from phytozome v7.0 (chr-ID chr1 4; pos 12362866 to 12363560)
caaggtcggaaaactcatttttcaatcataaggtatgttaaaacttattaaccaatttctttggttttatttatttttttacatggctttacatcaatataagtcaaaggaaaaaactaaggtggtcccgcatgccctttccaaactccaccatgttaaacttatttgagcatttaaatttaaataatataaaaataattaataatatataaaatatgaagaagttgaaaactaataaggttaaaagaaattttaattttaaacacattaaatattaataggaatgagtataaaaataaggaaaaactataagtattattttacttcaaaaaagaaaaaaattcaagttaataggaataaatatagaataaatttaggagtgaaatcgttgtaatcttttaaaagaaaaaggaaattttaaaaaggcattaacaagaatttattaatgggagaaaataaaagagtgcatgtgatttaaaataataaattatttatatgaataaaattattttgtggcatgagaatcccttatcatttcattttaaaaaaatatataattaaagtaaacttgtgaataatcctaagttaatgaattatatttaaggaatatgtttatgtttatcacaaatttccaattgatgatgttatattatattataggtttcattccctaacttagaggagttgatactcaa

SEQ ID NO: 98807 - DNA, 714 bp, Vitis vinifera
  Intron number 1 from transcript GSVIVT01019750001 (locus G SVIVG01019750001) derived from phytozome v7.0 (chr-ID chr2 ; pos 2946672 to 2947385 reverse strand)
gcaatcttctggtcaatttcaactagacaaccagggtattcagcttcccatctcttctctttctttctgttcctagttattttttatttttattttcccttaaacctgctttcttgctccgtatgatatgccttctgaatttccacctagaatttttgtatataattattttgtcttcatcttctgcattgtgtatgcacaagtttatgggaaatctttagaaaatggggagctgattacatttcgcccacaatgaataaataaatcaaatagctttatcctcttttcctcttgatatcagcctcaggatttaagtatggtatatctgtcatgtaaagtgaggtataatgtagttcctgtacagttgaaactgatgaaatccgccactccttttaatctatcatttgtttgatctgctgatttctgaagggaatacaatttagtgtcatggtagccatcattttcctacattgtttcccatcttggcatactgcccagacaaagatttacaggtcatttcttctttgtagcattctggaagatgttaatgctgctttgttgttgcaatgatttatttcggtttctttctaaggacttcttaaaaatatattgttatattcagcccctcatggttatagtactaacatgcatatatttcttttcctgttctcatttattgcaaatgtgaattccttagggtactggagtggggag

SEQ ID NO: 98808 - DNA, 882 bp, Vitis vinifera
  Intron number 1 from transcript GSVIVT01026933001 (locus G SVIVG01026933001) derived from phytozome v7.0 (chr-ID chr1 5; pos 19288851 to 19289732)
tcttcattgtcagctaacttctccctgaattcaaggtgaatatgtttcttaagggcttttatggaaggcttattgtctctccatcttctctcaacccaaaaacatgcttgtacagaaatagctattaagtatatcgtttcaaaatttaatttggttcatgattgtatcaatgtaccatggcgtgcacttctaatcataacaaaaattaattgttttacttgtacttgctgatggctgagtacaagtgttcattgcttgtccatatttttggtgattttattttatgatgtattttcatgcaactgcgtgctgaccatgctaagaaattagggttgtttatattttgcataccaacaaataaggtatctatttagagaaatatgctaatttgtgttactttgcattttcataatttggaagtaagatggcaatggtggatatttctttacatttccattctttgtaaggcatgttatcatggtttattaacttcataaatgaaggaagcagtttgaatcataggctagctctccagctctcttgattttggaagttttttgagatgtgagtatggaaccttatggtccttttccagctgcagtgcattaactgcatgcctgttgttggacacttaggcaaaaagatgttctcacatgcacaatgccttgtcattcttgatcattgtgtgtattttttcttatttcaagattcaaatgtcacttatccacatcagaaaaagaaaaacaaaagtttgaaatgttggtcaagttagattgttattccttcttatctcttagagcttatttatctgaatgtactttaaatttagcaaattttgatcatgtaggcgacaatctcagctaacaccatacaagttgaagt

SEQ ID NO: 98809 - DNA, 844 bp, Vitis vinifera
  Intron number 1 from transcript GSVIVT01027018001 (locus G SVIVG01027018001) derived from phytozome v7.0 (chr-ID chr1 5; pos 18546835 to 18547678 reverse strand)
tggagcgcagcaagagcttcgtcaaagcccttcaggttccgttattttctcgtatttgtatgcgtgggtttcagatctggtgatttgggttttggtcatttgatttgttttggtgctcggtcgatttttggagttggatttggattgttttgtggcgttgcatgtgtgtgggttgataatttccttcatggatttgcctatgaatgcatttgttctgttttttatttcgtttgttgatgaaaagtgtttaattttcttgcttctgtatgttggttcttgagctataattcattgataaacgggttttatctgttgattgtgtccctctgctgttcagatgttaggcattgtctctagtcacaaggtgattctgcaaacagggttgattgggtttgaagtaatttgcatgttcacgggttttgtaatggattcctgattgcatcatacttgtaattttttccgaattttccgtaggagtaaatgggcggaggttgaatgagttcaaaataagtccttaatgaacttggttggttttgttcgttttgcagttttctccgtagttctgagtataaacgcttaatgaacatatatactgactgagcataaaccctttgatcagaaagttgtttgctgtaatttgtgttgctagatgtactcattcttaacagatatttgtgtttgtgcctgttaactattttttcaaggtattttcttccaagtagtttctccatgccacagtgtgtattcagtatgggacatacaaattgctgtttgagatccattttaaatccttgtgttgtctgtttcaggagctgaagaacttgaggcctcaactttattctgc

SEQ ID NO: 98810 - DNA, 689 bp, Vitis vinifera
  Intron number 5 from transcript GSVIVT01025173001 (locus G SVIVG01025173001) derived from phytozome v7.0 (chr-ID chr6 ; pos 3726521 to 3727209 reverse strand)
caattaaggtactgccttttccccacttgattttgtggaatgtgttttctttggaaaatactcttgttgtcagtttctttttgcctttttgtggttaggatatttgctacttcaaaacaaaggagattatcttctgctggcagtttaaacttttagttattttgtctggttcatatgtgttttcttattctaaggtacttataatattttgtgctgcaaaaaggataaaattccagctgttttactgttaaactgattttaccacatggtagggtgataagctgggcttatttgtcaacgcacaagtggctcatgcggtgtggttttattttatcattcttagaaatgttaaaataaaataagtgtaagaagtgataggtctgactctgagaaccatgagaggcagaagttttcttgataaaagaaattggttgggctagttttcttcctctactttcttggagggttattttgtgtttgattaatttatgcaggaaactgggaaacactttttggtgatatggtcttaatcaagtactcaattaattagggatgtcttagaaacataatataggtattttattggatgttttgtggttcgtatacaatggaggtttcagttattatgtatgaatgtaattttttgaattgtaggcctttcacaagtctcatttgttaaagctgcgagt

SEQ ID NO: 98811 - DNA, 947 bp, Vitis vinifera
  Intron number 1 from transcript GSVIVT01025178001 (locus G SVIVG01025178001) derived from phytozome v7.0 (chr-ID chr6 ; pos 3674272 to 3675218 reverse strand)
actccgatcagttgagggattttctcggtcagcaggcaagtggggtgttttttttggaattttttttgctgttgtgtttcaaacgtttactgcctgtttggccgccgagaaggcgagaactaggtgaaaaaggaaaaaaaaacgaaaatttaaatcttctcttttattttgttttcgtaatgtgggttttggatttagtttctttcctttactgttctatttggtcagccagaaaatcgaggagaagaaaaagaaaatgcaaacttccaagttaactgatgaaagaaacaacagtacccaacaatgtgcaaataaaccagtagcttatgatcatgagttagcaataggtcaattttggatgattgtttctttgttgaaaattattatacttttagttatataataaggagcagcaaaataatttcctactgcaagtcaaatttcccacaccttaatgtaactcctttttttcttattaacgtacttttttttttttttttttgtgcactatattcattcttatgcttttgtgatccttttacttaaaatcaaatggtatactggtctcttggaaaattttgccataatgttgctgtcaataaatagctaagaacagaaagaactggtggctctgtgatcattattccaagttgttaaccaaattcaggttgtgtttctttggaatttttgctattttattagccctttcttaagaaatatccagtactttgagaaagttttcaagtttactttctgttgtttcttttctgctatcttacttagcttgaatcctttttttttttttttttttttttttgaggttttcatattcacaattttttgttttatataagatggatgagagttagcattgtcaaattataagttggttgcaattgttgcctttgccagggagttatctataaatcagccaagaaaaagaaagg

SEQ ID NO: 98812 - DNA, 698 bp, Vitis vinifera
  Intron number 1 from transcript GSVIVT01024647001 (locus G SVIVG01024647001) derived from phytozome v7.0 (chr-ID chr6 ; pos 8070977 to 8071674)
gcctagtctattgattcaggtgattgagattgatgtttcaattaagattgataatggaaatcttcatctgccaccaaatgagatctctttgagaactcaaaaccttttctgtgatgttctctagttttttgttggtagttgacctttcaattatgaccgatgaatcaacctttatttttctcttctttgttgaggagaacttctattgattatgatgaatgttcttaaatctaaatcaagaacgctgctttaaggggaaaataatgggggaaaataggattccaaattattgatgtgagactgagggtaaccatcctctcctatcacttaggaggctaacttctagctatggattgatttgttatcatttctttatccttcaatctgaaccaaaattttaaggtaaaccaagaagatctaaaattttgaggttgggggtggttttaaaaatgtgggaccattcttcctctataaaaagtagtatagcttttattcatactcctgtgtatccatgcattgctctatctgatgcatgtgtttctgtcatatggctccttgttgataaaagcttttatctcaaatttatgcatagccggatctaactggatcatactagttgcaaattttgatatgtctaaaatatccaaagccttctgcttttaggttgttaaggttgctgattttggtttttgctggat

SEQ ID NO: 98813 - DNA, 331 bp, Vitis vinifera
  Intron number 4 from transcript GSVIVT01023585001 (locus G SVIVG01023585001) derived from phytozome v7.0 (chr-ID chr1 1; pos 7658098 to 7658428 reverse strand)
gtcaggcaactgacccacacagcatcgctgagagagtacgcttcaccctcatctttaccattttttttttgtttttttcattcattctgtttggctgccgagaaagttcaggcaaaaagtataacaaagaaaactacggacgacatttttttttataaattttttgatgggaaaaattaaaggagttctagacatgaagctgtggatcacaatttttctaataaataataattgataatgggtgaaaatttgaaaaggtaagttgttgagttgtgaagaaacggattctgtttaaacgtggcagttacgtagagagagaattgcagagaga

SEQ ID NO: 98814 - DNA, 914 bp, Vitis vinifera
  Intron number 1 from transcript GSVIVT01027846001 (locus G SVIVG01027846001) derived from phytozome v7.0 (chr-ID chr5 ; pos 8586341 to 8587254)
agtaccatagtcccagaaatctactacttgctgtaatcaaaacttcctcaatactcgtatatttgaacaacttaatttttctgcatgcatgcatgaatttgtttatgagttttctgttgattaccaaacactgaatattttatttatttatttatgcgtttatttatttttcattttgccttgctgcaaaaagcttacttttgtttgcttccaaaatatatttgaatgtttggagtttattatgaagagactcttccacaggaacacactttacttttgaatatgaaagttttattttctctggctatgaagtatgtgatttcatggtcagtgttttcttgctgtttctgagtacaatcaaagctgcaataaggataaggtgaagtagggttatgatcagtctctctccaagaattctggccttttctgaaattctataatatatgggttaaaagtttggcaagtcatcatcttctccttggtcaagtataatcaaaagccaaatgcccaagcatgtgccctgtctcaacactccagaggcaaaatgaggcgaggcaccaacagggaattccccaacaacagtccacatgaaaagtcagcaatagatgaatattttctacggttgcggtacctgcattgcatgctttgtgatattttctgagttagtactagagaatttgggaattttccttgatggtgaccttgttaaatttgatgcaaattctcttcccttttccacaaaaaaagaataaaaattattgccaaaatggattgatggagtaatagatggaccaaataatgctaaaactggtggttgctattaattctgaacatgtttcttctgcactaaaactcatatatgtgatgtggtgtgtaaaggtgggagaagtaggagagctatcagaaatattcca

SEQ ID NO: 98815 - DNA, 436 bp, Vitis vinifera
  Intron number 3 from transcript GSVIVT01029109001 (locus G SVIVG01029109001) derived from phytozome v7.0 (chr-ID chr1 1; pos 19600278 to 19600713)
tggtcatagttctactagcatttcagctggcttaggtaaagtgcgaattcagaagtttctttttgagtatgtattatagaatcaaccattggatttcttactataaagtcatggtatgggccatccattggtcttaccagtctcatcaacttctcttctgtctgttaagaagatcccacttaattgtcagcatttttttaggtgattcagaattaagaacttcttgggagtactgttaatgacacccaacccatgaacaaaccttggagatatatgttctggacattctaagtgatcccaacccaattaagagttttatatatatatatatatatatatatatatatattaatcattaggctatttcgggctagatgaatttaagctaactgacatttcaatttctaaattttcttttttccattgattttcaggg

SEQ ID NO: 98816 - DNA, 763 bp, Vitis vinifera
  Intron number 1 from transcript GSVIVT01027857001 (locus G SVIVG01027857001) derived from phytozome v7.0 (chr-ID chr5 ; pos 8699308 to 8700070 reverse strand)
acaaagcggacacaattcaggtataaaagtgtgaacatattttgatacgattaaactccattaacttcaaccattataattcgtaccggagattaatgggttcggattccggttgcttttatagcttctccggcagttttacagagtgggtttagcttattcttgattttccggcgagttcgaaacttgaaacttttctaaaagttgacgaaacttgcaaaattcatatttttccaaccgaaaaatgagggaaatccggttttcgtaatttggggaatggaaaaatgcaaaattgaggtcatttgcaggcataagtttcgggtatccggtattctgatacctaaactgatatgccgacactccctctttttttggcttcttaaacttactctctcatccttttccggttcttctcaccaaccccaaactctctctctctctagacttgtgaatgacttttgaaacttggttgatttcacactaaaaaaaaaggggaaaaaacaaaagggttttgtctctctctttttctttctctgagttttcatggcttttggggcctgccatctttttgagttcctcgctgtctcacgaaagcaatgaaacggttggttttgcacctatgatcacgaaatcatcgtgaacatttggaaataaaatacaaccacaacacgtaaaaatatcaatgacagagacgctaaacaacaagaaatctgttggtgaatatgcaggtgaggagcaacaaagccatagaaggaggagagaa

SEQ ID NO: 98817 - DNA, 400 bp, Vitis vinifera
  Intron number 1 from transcript GSVIVT01028902001 (locus G SVIVG01028902001) derived from phytozome v7.0 (chr-ID chr1 6; pos 17678519 to 17678918)
gcaacattgttactggtaactactttactttcttagtttatgttttgcgggtacaagttcacatatggataaaggttgagctgtttttcttctatcctaagaatgctagctcaactttttagaaaaactatttcatgctcattccttgttcttcatagaacttcttggcattttccctagtgcctccaatttttgatgtgtttgcatatgctcgtatgattttgaatttggacgaaccgtttcctagctgttttaactgatcattgcgagtttttctcttcaaattccatggaccttcattttcttcttcttaaaagagtctgttgatacaactctaccaggttttatagcctttgttttttcttgtggtttgacacaggagtagttaatatcagcttaa

SEQ ID NO: 98818 - DNA, 523 bp, Vitis vinifera
  Intron number 4 from transcript GSVIVT01022644001 (locus G SVIVG01022644001) derived from phytozome v7.0 (chr-ID chr2 ; pos 14028638 to 14029160 reverse strand)
ttgttgaggccatcaaagaagctggaaacattaaggtatatatatacatattgttttaagtcatgtagttcctttttgcatatagtattttgatgagcgcatcaaccatatctgtagtacaaaggtataataatcctttttgatcagattagaaagcatagtaatggataagatgaaatagtttatttgatttcaattaaattcaggttaatggaagcactgcaaaagtataaaaaatattcctttgaaaatcatatacgaatttgaatctgtatttttcttttctttcatggcttcccgaagatcatatccctcataaatgaattagtttttttggggtacttttaatgttttttagggcttaattttttgtaaattaattttttctgaaggcaaccactcctagtaatttcctcacccttttgatgggcctgcctgtatttattctatcaacatcaaaatctaagattgataataattgtgtacaaaattttggcagcgattcttgccttcagagtttgga

SEQ ID NO: 98819 - DNA, 1040 bp, Vitis vinifera
  Intron number 1 from transcript GSVIVT01030374001 (locus G SVIVG01030374001) derived from phytozome v7.0 (chr-ID chr1 2; pos 5079598 to 5080637)
gacgattacgattcccgagctccgtaattgctttttctccttgagcccctttctttggttgctgagaaaatggtggaaacaagagaaaacgaggactgaattggtttttttttgtttttttggagtttctgaaaaatggaaatgaaaacttgggcaagtgggtggattagggacagttgagtgcaggacgagagaatcttcggagcctctgtttggtggctgagaaatggaggaaaattgaaaatggagtcctacttaatttgaatgcgagaaaacaacacattgacttaattgagagcctagaatttacttcaatctaggtgagccttttgttagtgctgggctaaatcaacatttaagaaaatattcaaatttctattttattttcttttcataccttcagttttctcatgagccaaactggggttatggttttcactttttcctaattttctctctctgattttgggggtatgagcgtatttagtttgaatttattggcagaagggtttttacgtggtttatggagatataattaaatttctattgtttgtctgttaagagggtggaggaaaaaggtaagaaaatggaactttgaattttatataatcaaatgttttggttcctgcgaaagatacaactaggccaaataattctatctggtgcagggtttgtttaactctaagacctaaatatgtcagttgggaaatgagtgaacttggaggcttttctggagttgcttctgtgtcttgtgtccctttccaattgaatggtttatgtattgattttagtgggaaaaagggttttgtgattcaatcgtagagaggaatgctgccggacttaggatgttttcttattgcatcctgcttttgtaggaggaagatgtttcttgggttatgctttaccatttcacgagtaaagtatcttttgataaagctgattttgtgtatacttttgaagcagttgctaaatctttttcctttttctttttcatgtaaaatgcaggttcatctacacttttcttggccttggggcgacat

SEQ ID NO: 98820 - DNA, 402 bp, Vitis vinifera
  Intron number 1 from transcript GSVIVT01019468001 (locus G SVIVG01019468001) derived from phytozome v7.0 (chr-ID chr2 ; pos 886370 to 886771)
cttttctcttcagcagagaagacgaaagctgtgtggtaagttctttcagttttcttctcttttccactcgattttctttcttgatgaattgaactcagctgatatggtcgaaatattccatattttcaaatattttttgcgctttgaattctttttcttttttagatgtatgatttctcaatttaatctaatatgtgaaattgtatgatttgaattctgtttgagagatggagaagtttcttatgagtagttgttgcttcttttttttggtaattgcataatgatgttttttagaaaccttccaacttaggtcattgggacttcttacgaacatcggaattgtgagattgaagcaaaagctgttgttggaaaatcgtctttcctaacaatctgaagaagacg

SEQ ID NO: 98821 - DNA, 691 bp, Vitis vinifera
  Intron number 2 from transcript GSVIVT01019499001 (locus G SVIVG01019499001) derived from phytozome v7.0 (chr-ID chr2 ; pos 1130970 to 1131660)
ccatatagcataagtcttccgatccgaaagaggatgtaagtagtattgttatgtcctagccatcgaagctttgatattacatttttcaactcatgcaattcccagaaataccaaatccgtggtgcacaaactgacacacttttagagttcttccaataaaccatgattattgtgataaaatggtagtcattaccttaaatggatgtgatgctagaaatttattcctaaaataaaacaaatttcggtatgtttctacgaaaattcaacagaatcttagaatctttgacaaataattggtgtcccaaacaattcatctcattagttcgtgtttcatgctttgccctgtaccctgttttcgttaataatgcaatcatgattcaattgcctgatggttaaaatggggcgcatgactgtaagaattggaaaacctgttgtctttgtttacatattgattcaattacatttttgtgatgaaaaagagaaaacagcaagcaataaagatgcacaaacatggggaacagccatagatcttaaacagtccacaatgaaggaaccttttgctagcattctgttattatatagtaggtagaacttgaaatccgcttaataatgttcttttgtgtaacctaactttattcattcttttctcaacttcaaatacatcctttgaaatttccaattttgttttcag

SEQ ID NO: 98822 - DNA, 710 bp, Vitis vinifera
  Intron number 2 from transcript GSVIVT01026043001 (locus G SVIVG01026043001) derived from phytozome v7.0 (chr-ID chr1 8; pos 25358739 to 25359448)
gtcatcctgggaagtgcattagatccaaggtgctttctagtgttttaaaacagtatctaaatacaacatatactgtatctcatgtaatgattctgctttatgtctttttaaagcattgggatgaaggcttcctagttctaaacattgaggggcacttaaatgttccatagaaaagaagtggttccattgtgtttttgcatgaccttctgaatgttttaatagcatttgtaataaaattgtttcatggcatgcataggatgatatttaagatttcaggaatgatgtgagtccaggtttttggaaacataaatcattattgtgccactttggtcttgttatgggtttcaccttaaaggtggatttgatttccaaggaacatttaagtggcccccacttaatagattattattcattactttaaatccttttagtacaaggagatgggttaataagacaagtactagtgaatgttcttttctgggaaactagtatgaggaatatacttctggaacattaagcatgaacctaaaacgtatcatgcacttgaagctctgatggacaataactagtgttgaaactattatttcaactgaagtctggccaggaatccacaacttattttcttattttaaaaggctgattgactgatgtagtcagtatttaaatcatctcactgtgcagggcagctgctattggtgcttcagctagtc

SEQ ID NO: 98823 - DNA, 988 bp, Vitis vinifera
  Intron number 1 from transcript GSVIVT01027445001 (locus G SVIVG01027445001) derived from phytozome v7.0 (chr-ID chr1 5; pos 16680484 to 16681471 reverse strand)
accataacctcagaggtagcctcacgctaatattaaactgcaagtcccttcaacccccttttatcatttgatctcctcgtatgcttaccatgccttttagcactttgcttttgtttttttttttgtttggggatctatggaatcaactatatgcgaatattctaacatgggctggtggatatggtagttttaggatgattttgatagggttttgaatttggtttatctggaaattaggcagaaacccagaaacccaggtaagtacatttctctattttaggtagagttgttttttctcttgtccccatttcatttcaggaatcatggtctgttcatcatttaaatctatttctttgctaatgatggaattattattgagtgtttgatggatggagttcgatttgtttggatttgaaaattgaatattatgattttttagaattgggagcaatgtggtgttcaagttagggatttgggttttggtgtctttactgtaatatattcttcacacggtttgacaaattcattcatggagtcaaacttttgagatggggcagctacaaaccctgatatgcccattgctgttcttcattacttgaagagacagttgtgtggtttacctaattgggttgactgggtatgatggaaaaggcatatccggattctgtaatcagttcaattgcctaatgtttttgtctgtaattgttctttatcgtttatttaagtggcatccactcatctactgctggcgtcttgttcagtgtagttaaggtgtctatgcagttgggcctccttaggagaggtgtggcatgacttccccttcttagaactttgatcctatcataacatgccaatatttgatatcataattgtaatatgcattgtttcttatcaatgacacaattattttttacattgtagtatgcatagatttacccttaagagtgcaattatgattgttgttttgtgttgttcctgttaccaccag

SEQ ID NO: 98824 - DNA, 184 bp, Vitis vinifera
  Intron number 2 from transcript GSVIVT01029421001 (locus G SVIVG01029421001) derived from phytozome v7.0 (chr-ID chr1 7; pos 17032813 to 17032996)
ttggagagttgggtctaaaattcttcttgaagtaagtaaaattttccttattcttctctacacattgataattaccttatttcttgatatataaaaattgaataaagctttggtttttgattgataagggttggattcaatttttgtagaatatttgagattgctccattaactcaaaaactgt

SEQ ID NO: 98825 - DNA, 541 bp, Vitis vinifera
  Intron number 1 from transcript GSVIVT01024079001 (locus G SVIVG01024079001) derived from phytozome v7.0 (chr-ID chr3 ; pos 1286555 to 1287095)
ttcatatagcagcatttgttaggcaaattaattatgtgttcatggaacaagcaacatgagatctgtcaaggaacaatggtaacaaaaatcaacagtaaagtacagtccagagttttaccaaaagcataagcatttcagcaattcagctttctataaaagcaaaatttaaagtatgctggtaagtaggtttacagataatataaactgcagatgtgcagtggagagctgattcaaagaagtgaatggccttaaattgattaaaaaaaactggtgaggctgttactgtttttctctcccctattacacaaatcataataaagggtatctaacctcatgtatggccctaaagcatggtgttggtgagcccattaaatcgattcctcaagatcattatacaacaaggtctttaaatctcaagggcctaagtcaatgaagcttaacatcaacctatagaagctcatggcttcttcatttcattgtcttttcaatttttttgtttgtcattataataggggatcataagggggctaggattcccaat

SEQ ID NO: 98826 - DNA, 878 bp, Vitis vinifera
  Intron number 1 from transcript GSVIVT01029826001 (locus G SVIVG01029826001) derived from phytozome v7.0 (chr-ID chr8 ; pos 162172 to 163049)
attgttctccaatccagaaaggctgtaagtaattgtatcaccattcccctttttttatagcttaattatgtttgtttttaaatcaattaattcaaactggaagcagctttggtcttttggccttggtgggtattttagttattagtctctctcaattctgtcctaacataagttattttctttttatagatattaaggggaaatagcttgtgggcctgcatactaatcacttaccctaacttcatccaattaaatttcttcacctgtttatcattttaaacaatcagaagcaattggacatacatctggaaacctcttcaatgtgatggtttctccatctataagcttttgatttagggaggtgctcttaatgcacattgtgcctctcttgtctgatatggttatccatgtgagttgtactattatctttgtaagcaaaaactgtgtttaattctcttctaaaaccaacatgcatggatagtgctttataaggtgaaaagattcttattttactttaagagggaagaaaataattttagagtgaatgtcattaaaattctcatttttcagtttgcttgtagttggctaatttgtcttctaaacttaaccaactcttaaattttgcattgaatttagattgactcatttaaactgttctatgaagttctgtcctaaagaattaggaatttagaattgatgaaaagcttttatataagatatggctttgaaccgtttccaattctaggatcagtaaaagagtatcttcatattgctgaattttgattattttctttccctgattttaattgtgttcaccctgagttctttaccttttctgtttgcttagtgtggttgatatttgacgttcaccacagcca

SEQ ID NO: 98827 - DNA, 287 bp, Vitis vinifera
  Intron number 4 from transcript GSVIVT01025562001 (locus G SVIVG01025562001) derived from phytozome v7.0 (chr-ID chr8 ; pos 14035929 to 14036215 reverse strand)
tatcaaagacaactgtttctctgctagcaaatctggtcagtatctatatttcctggcttttagggtgtagtatgcactgtcaatggatggtttctgtgactttatctaattttgtctgatttgtcttttcatcatcctgtgatcctatgcaaaacatgtatggaagactcaaatttgcatctgcaaaaactatccatgtgctcaattgtgaataataataataatatgtactctgataaggtattaagatgagaatcatttttctgtttgttcaggggagctccaat

SEQ ID NO: 98828 - DNA, 985 bp, Vitis vinifera
  Intron number 2 from transcript GSVIVT01025090001 (locus G SVIVG01025090001) derived from phytozome v7.0 (chr-ID chr6 ; pos 4587352 to 4588336)
attgcggtgcgaattctgcttttgttgcattagattctagcagttctgaatttttatttttttatggatttacccttggattgcgtggaaatgtacttgtctgatctgtttggttgctgagaaaaatgtgagagaagtaggtaagtattggagatattgaagttggagtggaagtaatgttttagcaattcaaatcagttgaatactttgtgataaataggaaattttgttaggaagcgactttatccaagcaagatagtttaaattttttatttcttatactctgtttggccctaggatgaaccagggaaagagaaggaaaaaagttgaaatagcttgaggaaataatccatagtttctgcattttcctttccttcttttcaatattcaaacggagtcttaacgaaaaactattacagctgtgatgtgatcaatccacaagactctctagtaaaaggtctagtgcctgaagcgaccttagaaactaattatatataaaatgattatgctggatcttttgtacattagtcaagttaacatgattaccaggcactccaaggcatactcctgaatttgggattagctcggcatcaaaataattcaggattctggagtactttagaaaaaatacaggcatgatttggggaaaaaaaatcaagatgaacttgaaagtaagaaaagcaatagctgttaaaaaaatagtgaagatttgcgatgatctatcacttcatattattaagaagaaatgatgtcagaaatagctagggaattaattatccatgaaatttgtatgttggactaagtcaggaattgtttacatgcatagaagtatatgggttttatttatttgatgaagtgttcgtaaatagtttgggaattactcccaagacttacttagcatttaacatttttatccatcattaaactcctaatactctctttcttggcaggtaaattgaagattccctacattttcttgacaaat

SEQ ID NO: 98829 - DNA, 282 bp, Vitis vinifera
  Intron number 2 from transcript GSVIVT01025065001 (locus G SVIVG01025065001) derived from phytozome v7.0 (chr-ID chr6 ; pos 4819885 to 4820166)
agaggaaccagagaaacttcaacaagaagattaaggtttaactttgttctaaatctaaatcaaggcttcttccactagagcattaatgctatataaaaacagtaccctctttgtaattttacttgatttgtttcaaaagtgtttcagtagagaaaaagaaaaggccacttggtattaaaagtaaacaattttcctgctttgcttttcctttatatatatatatatatatatatatatatatatatagtagttgaagaagttgattttgtttgttgaatcagt

SEQ ID NO: 98830 - DNA, 481 bp, Vitis vinifera
  Intron number 1 from transcript GSVIVT01026477001 (locus G SVIVG01026477001) derived from phytozome v7.0 (chr-ID chr4 ; pos 22950297 to 22950777 reverse strand)
ttctggaagagggtgctgtgattctgggttcccaggtaccaaaattctaaaataaaaaattactgttttggtttttcctattttatgaaatgggtttatttatttattttttgtttttatgttctctgaagtgggtttatttgatttttgtttatttggatgatttaattgaattgagggttgtggttggatttgggttttcttttttcttctgaaaaattagtgaaatatgtttaggatgttgtttgttttggtgattacggtgatggtgtttcttgagtgctcagaccataatgcagttgtgattgaatcagttgaaccagtggtagattaattaaatccaaacacttccttattgattcttcttttcaaaattttctgggtaagcatctgtttgtgggtgagttactaaatacttctgtttgtttggattgtattaaaaataggatttggaggactggccaatcatagagcctttgcc

SEQ ID NO: 98831 - DNA, 943 bp, Vitis vinifera
  Intron number 2 from transcript GSVIVT01023878001 (locus G SVIVG01023878001) derived from phytozome v7.0 (chr-ID chr3 ; pos 2762632 to 2763574 reverse strand)
gcaggtgattcaaataagcaaagaatgattgtttttcatttttttgggatttctatgtgtttagaccttataattattctctcccttgcaatggtttaactgttcaaatttagttcatctttggctcatcttagatgattactaatataatttaattgatcctgggtaaatgcatgtttggtattcaagaaaaagtatatgcatttagtcactcttaagggattataacagccggaaaaggtgtgtgtttctgacatcaaaaagttatgttaaagaggtttccaaaagatgtttccattatcactgaacttaaacttattgggtggcagttatggtccctttagatatcctttttttaaacatgatggggtggggcaattcgtttataattgtcaatgcctgaagattcatatcggttttattaatatgatatcatcattatctctatcttttagcttgtttctttattatttctccttttttttagctttcttctttcatagttttgcagtaggtgagatgtggttcccacttgtaaatttgcttatcatttgggttcctgatattttattattcttgcttctttttctacataccattatttgctgtttccttttttgtggaatcacaaagacaattacataccaggagggctaaaacctctaattttaggatggtgttctcagttcatcaaaagaagggggaaaaaagggtaatacaaaccactgtgaattatgaatcacatagttgaaaccgagctgtaaaccagatgactggggctgagatgaaattgtgttgtgaatcttagtttgatatttttgatttcttacaaacacacatatatgaaaacttgggaacctgttttctgtccattttctttattcaagtggttcattttgttggtgcagtctgaggtcaatttcttaggaagactttctcatcc

SEQ ID NO: 98832 - DNA, 657 bp, Vitis vinifera
  Intron number 1 from transcript GSVIVT01023878001 (locus G SVIVG01023878001) derived from phytozome v7.0 (chr-ID chr3 ; pos 2763865 to 2764521 reverse strand)
cataactcctatcaccactggcaatctcagtacaggtatgggattctcagtagatagattgattattttgttctgttttctcaacatttttcattgatttcttcatttttctcacatgggtttctctttttctttttcattttgattgtttggtttggttttctcaacattttgcattgatttctttcagcttctcatatgggctttggcttttctttttatttggatcgttttgtttggttttctcaatattttcctttgatttcttcattttcctcctatgggttctggattttcttcttatttttgaatcatgtctttttattctctcgtgtgaatttgttctgtataatctgtgttaaaatattcccttttggacttcaaagagcttatgttactataattgaggaaatctctggttatttcttattgtttttgttaccatagtccattgatttcatcactttctcatatgggttttgttgtctttcctttgatcctctggaaatatcttgaatctgcttacttttctaaatttaattcaattttgtgtacgatttgaattgaagctttgttttgtgttttttttccctacttgtaataatcaatggtgtaattgcagctggggtgtctcagacaaccaccaacactacatct

SEQ ID NO: 98833 - DNA, 811 bp, Vitis vinifera
  Intron number 1 from transcript GSVIVT01028264001 (locus G SVIVG01028264001) derived from phytozome v7.0 (chr-ID chr7 ; pos 5030381 to 5031191 reverse strand)
cgtgtagctgagttctatcttattgagggaattaagcaagtggtgcctcattttgagggaagactgtccttcaattgtgaagtacccactggtttcttctttaatccttgacttttggtctgtaggcctccctcttgtccctctttgctctgcaatgtaatatgattttggttccccttgatcttaaaagaaaaaaaaaaaaaaacctgtgaaaatgtggtgcaaatttcattatccatttcaaaattaataataattataattatgtattctattgattgaaaatgaaaatggaccaaaaatataacagggatgacaaaatttgatataattcgtgaacactaacaccttttctttcaagggttttgatgaaatagaatggtatgtttggatcaaattccatctagatgtgcagtttttttaataaacaacattacatataaataagatttaaatagaactacttaatattatacttgttaatttgattttgatttaattcatattaaattttaattttgagtaaatagattaattaaataataaaaatatcaagttagattcaaatagaacttaatttatacgttacataaattaataattaaataatgttaggttatttaatcctggaaactccatgctgaatataatgcatcttgcagccctcgtcgcctcgcaccagaagtgcccgaaaagggaggtaattctctctttccccttaatctttctctccgtctcctggtcggggaggaggctgtacggttgcaaagccccagttggcggagaggggaataaataagggaaccaaaat

SEQ ID NO: 98834 - DNA, 947 bp, Vitis vinifera
  Intron number 2 from transcript GSVIVT01025154001 (locus G SVIVG01025154001) derived from phytozome v7.0 (chr-ID chr6 ; pos 3934155 to 3935101)
tccattctagggttttcacttttcatctacaccaggtataatcttctctcttctctatatttcccttcgctttttaacttggcttaaagcgtttggttgcttagaaaatgtagaaagagtaatataaaattcacatccaaatcgaaattcaaagtctctacggtagttttttgtctgtgagttagtgaaataatccagagtttttctttttaaggcattggtggatttttcacttcggcgttaatataggcattattgctgaaatccatggttgagtatggtgtgtattctggatcctcgacagtgtcttaatctcctctttctttagctttacacacaaagcattttcaactgtgtacagtatcattttattttcttttgatatttgtaatcaaatcattgctttttgtttttcctaatttgttggaccggatcttcaatagtttaagtcctggatgatttataccggcggttccatgaaaaaccttgcaactttattgtttgatgatgaatgcaagcttttggtgaatgataaaccaacaacttgtttgatgaaaaaccctggctgtgttgaatttgatattattcagtttacataaccaattgaaatagttgaatttcagatctattggttccaaatccgaatacatcatccagatacttcataatgattctctaattaatcatggtgaaatgtgcctaattgtacaaaaatccaaaggctgagaagaaaattgaatatttcaagtttccagctataattgggtagtctatccacctacttgttcattggtggcctcatcaaacaattagtgggcatatcattgtaatgatctatacttcccaataaatgaagaaattttattctcttgtttcacatgtatagtcccttaacagaaccatattgttccagctccctttaattgcatcttttgttgttggaaagc

SEQ ID NO: 98835 - DNA, 773 bp, Vitis vinifera
  Intron number 1 from transcript GSVIVT01023961001 (locus G SVIVG01023961001) derived from phytozome v7.0 (chr-ID chr3 ; pos 2123269 to 2124041 reverse strand)
aactttacatacagcagagtgccacgatttggtgacgtcacctctttagcattcatggtcaatttcttttccttttaataaacaatcaaattcgttaggaatggcgaaggggcacaaatcaacatctacaacaactattgttaattaattggtgataaaaagattttgctcacagtgttgcgaacatttttaagtgggtcattctggctgttcttatggaagctgctaaagctgcaatgtggtggcctttttggagtggttttgattgagagaatcctggatattactcatttcttcaatatgaatgaattagaattctcgattgtatttctagatattacaggttgtttcttaaatctaaatgaattagtgatattaattgttatttcttatatgtaacgatcatgttgttggaatccgtgtaacgattaatggtaaaaaatagaaaaaaaatgagaaagaagaacacgaaaatttaacatggtttgactaattacctacgtccacggaaatagggaaagaggattttcactatattaaaattagggttacataaaaatggtatttatattaactcttaagaatgaaatttcaaaaataccattgaacctatcgttcgtcccacaacaaaagaagtataagcttgaatgacaaaatgtcgtcgctttgttccgtttcactccacttcgctttgccattttacctatttttctccatgtcttttcactcaaatatgagtcacatattataacaatattctactattctttgat

SEQ ID NO: 98836 - DNA, 521 bp, Vitis vinifera
  Intron number 2 from transcript GSVIVT01030181001 (locus G SVIVG01030181001) derived from phytozome v7.0 (chr-ID chr8 ; pos 10771201 to 10771721)
gaaagttttaggtactgttctttgattttctctctgttgctttttaatgaaatagttgggttttggaggtaatttgtgtgttattccaatgctcatgaggaagaaacacgagacactgaatgctgtaattgattcagtttctaacaaccacattgtgggaatttgtatgtgttgttgtattgaagttgctgcaatctgagataacgtattggctaaatggtggcatctcagtgaaaagtttattacttttcaagaaattatcgggttttaaattcccaaaaaaacatcaaacactgatgttgaatatctcttcttcttctttttttccctaggtaatgtgacctaatggatgtgttgcaatttgcactattagattctgagtcctgtatgcactgagaccctgtgaaaggaatttggtaggaaatcatgaatgtgcatattctttttgcatgcttgtccgggactatatctattgtgattatttattaattgtgtcacttccctatatgcagagtttcttc

SEQ ID NO: 98837 - DNA, 478 bp, Vitis vinifera
  Intron number 1 from transcript GSVIVT01022461001 (locus G SVIVG01022461001) derived from phytozome v7.0 (chr-ID chr8 ; pos 3295426 to 3295903)
ccttaactgacgacaatattaaagcagtcatcttggttagtgctcttgccttaatgccttttgatttaattttggtaaaatttaacatttgttctccataacaaacgcagcttcattgattaccctcaaagtcctgaccaaaaaagacaagtagtaatatttcgttgctaaggggggcaaaagaaggggggaaatcctttattcatctggccaacaacttggaagcatctctgatcttataaaaactacaaatagatcatatacttcaaaaccaaccgaaaaaagtaattgatcctctatatctgaaagcttaagtagtagactaatcaccaattatttccctcaaaggaaaaatatttggtggatatttgctcttcactttcagtgtccatctgatgctgaaaagaatccttggtgccatggatctaatccatagttcatttattgttttccaggacattttcagtggaggaggggc

SEQ ID NO: 98838 - DNA, 613 bp, Vitis vinifera
  Intron number 1 from transcript GSVIVT01024802001 (locus G SVIVG01024802001) derived from phytozome v7.0 (chr-ID chr6 ; pos 6839271 to 6839883 reverse strand)
gagccgatcgtttggcggcgttgttcaggtgtttctttctctctatgaataggaacagtttggccggcattttggaggttcatttcagtgattttagaagcaaaattttctatggtttttgctcaaggaagaaaaaagagaagcaaggaaagtagttgaaaatgctatccaaacattaattatcaaattttgaattcctttggatgacatattgtaatgcactctgttccaattgaaaatttgcttgacaagggatttgatttgttgtttagagattggtttcataatttctctgacattaagggactttaactctaactccagtagcattgtgttggaatacaagcgtggttaggctatgattcaaactttctaggacattgctatgatggatttctttaaaattcttgctactgcgtggatatagcttatttattctgcttgaatgttcaattcacatatcagtcgggctgctagtgaagtgttctgattatacacactttgttaagcttatgaaaataattgctattttagaaattatttatgctatgaaaatattggcttttttgtatctctgattcattaatagcgactaatggcagtcatctttcct

SEQ ID NO: 98839 - DNA, 423 bp, Vitis vinifera
  Intron number 1 from transcript GSVIVT01027076001 (locus G SVIVG01027076001) derived from phytozome v7.0 (chr-ID chr1 5; pos 18144599 to 18145021)
tgaattaccaagagatcctcactgtaagtgtcggtttttttctttctttattctgttttctcagtagccaaacaggatatatttgctccgtttttttggctatttttaatttgtaaggaactcaagagatgtccaaggttttggaaaatacctctgcatgcctttgtttagttgctgagaaaatgtgggaagtaaaacttgattaaagttttcaattgcattgaccatatgtaagaattttagtcctcactctgtaaagcaccaaagcctaatcaaattattagattcaatgtcttacttttcaccctcagctctccaatcaatctgctttaatttcattttgcaaaagagaagttttagatttcttccattttgcttgctaatttgtaagaaattcaggagaattccaaggtgtccaagaac

SEQ ID NO: 98840 - DNA, 738 bp, Vitis vinifera
  Intron number 1 from transcript GSVIVT01020014001 (locus G SVIVG01020014001) derived from phytozome v7.0 (chr-ID chr1 ; pos 11584053 to 11584790 reverse strand)
tagagcaggtaattcgctttcattgcttttggtatatggctgaaatgttgtgtaacttgtgttaatatgatagtttagcagtgtccagaggaatataagagatgcctttattttgctggttatgctttctcgcttgggaacactaagttctagatattttcttctgtttaaaatcctgaattaaacgtttacaatgctttatttctactaggcagcttgatgttaaggctgtttttgttggcagactgcttatacaccttatcaactatattgaagctcatttatatatcagaccactatggttttagatattgaagcttgtgatatttgatatttggtgctttggagataagtaagtaagtggtttcttggattcttgttctaaatttttagtaattaactcgtgtaactgttcccttctcattgcacctgttttcttccttcaattgtgatattttcatctccttttacttttgtaattacactgtacatctttaccctgttaaattatgcatattaaagtaatcatgaagcaatattttagtattgatagtggtgaataaaaagcattgggttctttgatggatcatttaattttttattttattttatttttatttatttttactttgatctgcttgtactcttgcataatcacctttagctcatggagtggaactccttttatttttttaatttgtaggccattgtagctcttaagaaaggtgcatatttgct

SEQ ID NO: 98841 - DNA, 984 bp, Vitis vinifera
  Intron number 1 from transcript GSVIVT01022566001 (locus G SVIVG01022566001) derived from phytozome v7.0 (chr-ID chr8 ; pos 5157019 to 5158002)
acctctcactctcgccgtcgacgtcacctactgcggtcagtttctcaacgattatactttttctctccttatgactttctgatgttcgtgtcttctctgccctttttcatttttgtccgtgttggtgatgattcgtgtttttgtgcggttgttgctgtttggttggaaatgattcgtgtttgcgttagaattagggttttgaatccgcaagtgtttgtgttagaattagggttttgaatcgcaattgtttgtgcttagtttttttattcagttttggaagaaattattagcggtcgttggttttcggttttgcttgattccggagatgaatatttttcaggctctatttatcttgatgagtgttatatctgaatattgggcttcatctatgcttccggacatatttttgtttgaattttgagctttagctgatgattttgtggctggttattgattcgtggaatatttcttcatgggctaaatgtggattctatcttagaatggtgaattattttggtcgtgaaattgttatatatggttttgttcaattccttggaattctgaagctcatttttaaaaaaaaaaaaaatttatgagtattttatacatatatgaatttggctctgtttatgttactggataatttattttgaagactgggaaattttatttatttatttatttaggttaggttggggaaagtggtcgtcactttaatgctccaattcataattttgtttggggggaattttcataatgcttatcttcgttaaaacaagtgaatgaaattcatgtgttccttggttctcattaggggataagtcgtcagcaccttgaatattgtttatttaggggaataacttctatgggaaatcaattggtgtgtcattggaaatttatttttgttgttttctgttattattgttttaatggagtgaatctgctgttgatgcatgctaaggtttcaaattaatgcagataaga

SEQ ID NO: 98842 - DNA, 995 bp, Vitis vinifera
  Intron number 2 from transcript GSVIVT01023259001 (locus G SVIVG01023259001) derived from phytozome v7.0 (chr-ID chr1 2; pos 20501261 to 20502255 reverse strand)
aagtaacaaaacttcaggtatgttttcttttttccttttgggataaatttggactcccttttaggtatctttattttcttgctaagttgaaagaagagaaagcctagtactacttgtgttagaattttgtttctttttgtgtttctggcagttctttcccaaattaagttataaattaagagagtgtatggtaaatcaactcaatgacttaatttgatttaataacttaattcaagtcattaaatagattaagcatatttggtaaaacaacttaatgtcacatcttgaagtaaaaaaataactttaagtattaagttaaaatagttaacttattcttaatctcaaatatttttcacctcattggaccatgtttagtgagactatattttacctcatgaccttatattcacaacttatcttttatagttatatgttatgcatctataatactttaaatatgagggtaaatatgtcaatttgatgatttagaataaatattaagttaattttatcaaacaaccatattactaaaagtaaaaattaagtaataagttttaagttaataatttaagaataatttaacttaaagttaacttaagttattaagtactaagtattaagttttaccaaacatcctttaagttctaaaagttcttaattcatcccaagtgcttagaaatgctaaccaagcaaagaacactattgttagcctagataggccaaggtgggcggggatggtgaatataaatccttttaaacttctgatgaatttaaccataatttagtgctagagaacttcaagatgctttgacaattgcttagtattaaaaggaaaactagagtgaggaaggcaaataagtattcatgtgcgtgcacatatatcggtgtgtttctttcggttattaaagtagcatgggtaactttcttgtaagccttcatgtgatcatatctaattctcttgcagggagagataactaatcttcttatattgtgta

SEQ ID NO: 98843 - DNA, 536 bp, Vitis vinifera
  Intron number 1 from transcript GSVIVT01019825001 (locus G SVIVG01019825001) derived from phytozome v7.0 (chr-ID chr2 ; pos 3666054 to 3666589 reverse strand)
ccaaatctgatcttatcggttaggatttcctttcaatttagcgcgaattaaaccattatttatttctgtttgtgcttttgtttttttgttttttaattcttacgggtattgttgtctgtgggtgaaattagattttagaatgagtggaattgaggagtggttgtgtggaatttctgaaattaagggaaatgcgtttgaattgtcgttggcttttgtctactgggagtggttcagtgtttttttggttgtgacaaagtaatgatctgttctccttccaagaaaagcaacgaattaaatttcagattatgttgtttgattagcatttcagaactaatttttcttacttgcatgggttgaagtctgcaattttggaatttttaatgatgatatggcttaacttgttcacataggttatatatgcttttttgtttctctgattaagtccttcctataagtactttgttgttgatggacactcttccttctaattataattttaagggccctcctggaactggcaaaaccacgagtgtatt

SEQ ID NO: 98844 - DNA, 572 bp, Vitis vinifera
  Intron number 2 from transcript GSVIVT01020638001 (locus G SVIVG01020638001) derived from phytozome v7.0 (chr-ID chr1 2; pos 3587396 to 3587967)
caattttactcaaggtatgcctaagtttctcttatcagttactaactttgtcaggatctcaaagaatgagaaaggttttttttaagtatgtaaagaatcatttgagaaaagagagccaatttgaaaagaatttccagtatctttttcttcctattattctatgtgagattcaaaaaacaaaatcagtttgtattccttgtccgtaaattatggttcaaatatactaaacattatggctcaaaaggcgtaccctatgaaaaggagtcacccatcacaaaatactaggtgtctgaaatttatggtgaataagagaaaatgttggggaaaatgagatcaaacacctaaactccactggccttctggccttaccttctcttcattcatcatgtgcctttcatagttggtttttatccatggacatgaattgaactggatttctcgttaagctttctccatccgtacctaattgaaatgtattttcaacagataagatcactcttaggaaatgatatatatatatatacacacttccatttctaactggaattcaaatgacaagcagtggatattgc

SEQ ID NO: 98845 - DNA, 936 bp, Vitis vinifera
  Intron number 1 from transcript GSVIVT01027761001 (locus G SVIVG01027761001) derived from phytozome v7.0 (chr-ID chr5 ; pos 7469492 to 7470427)
ggccttgacccccaagaattgccagcgatctgcaggtacgcactttaccatatgctggtgcttcaatcttactgatttagatgatctattttatatcatactattgtctaattcacacgatgcttggagccttggacttccggaacattgctgcagtctagtggtagttgggctatggttttgtaggttgttggatcatcactcactcagtcaaagtggatggtgtttagcctgtagggtagtcttttagaaatttctgacagatcttttttatttatgtttcaattaataagttctgcaaacaaaaaaacaacagggttcagggttatggaatgttgaattaaaccccaaattcaataacgacagctgcattttccacctagtaatcttgaaagcataatcatcgcatgggaagttgaaaatggaggatattgaagggagctcctcccgtgtaagagcttgtttgatagtggttttagaaagcacttaagccttgagaagatctctgatacttggaaacagaaatttacctaaaccttgagatgtgttagggaagcaatttagttgacacatagtttcatggtccaaataccagggttatcagtatgattttgtaacgatggcttctaattggttctctcttcaattgatacacctacaattagtttcaaccgtttccatctcatttattgtccatgattctatttccaaaatgttctttttttgttccttaaaatagaaaactgtttttcatactaatttgatttttttaaagaaaattttgttgttgaaataattgagaattgtttttaaaagtagttttgggaaatgttgctaaacgagtcttatttcttaaattgtcgaactctattccttccttatctaagtagtacctttctttaacttgaagagaggcaacaactgagtacataaagc

SEQ ID NO: 98846 - DNA, 407 bp, Vitis vinifera
  Intron number 1 from transcript GSVIVT01022329001 (locus G SVIVG01022329001) derived from phytozome v7.0 (chr-ID chr7 ; pos 18543489 to 18543895 reverse strand)
agctggggtacaagcaagaactcagaagagaagttatttttgtgttcttttttctcctccttttcttcttgtttgattagctcttacacttcttttttttttcttttttaatcctgagacgtactgatttgggtttagggtgggtggaaatattagaaactaaaaaacatgggacgtctcatagttcttttacctgtgttccctttcctcctttggttgaatcaaatcaagtatgtgttttttttgtgtgtggagtttggattttatttatggtaactgttaaggggcaaggcttctgtaataagacttgctcctctatgactatgacaagagtattgatttggggtggcttactttattattcatttgcagactttgttcaaaactcttgctatatcgttttcaac

SEQ ID NO: 98847 - DNA, 971 bp, Vitis vinifera
  Intron number 1 from transcript GSVIVT01024611001 (locus G SVIVG01024611001) derived from phytozome v7.0 (chr-ID chr6 ; pos 8426621 to 8427591 reverse strand)
agcacgcatcccggtacatgcatcttgatagttaagaaccttagggtatgtgcagactgccatgtctttacagggttgatctcaaagattgaagggagggagatagttgcaagagattccagcaggtttcatcatttcaaagatggagtatgctcttgtggaaactactggtgagggccaaatcaatattagtgattgcagtatgatacaactgttgtatatttacagaggagaatgatagaaatttttttctattcaatatctatttggctgtcatttaggcacacttcagttttttactatttagaaataaaatatattcttattttttcaattacgtctttaatttttatacataccaagcatatttggttgtccttattttcttccttaataaaaattagtaatttttgcaatgtttcaatattcagataggtgttgtataggatgtgggaacattaggaatgttggcggctgtttggcaacgtacacttctttaaaatagctcttaattgattaaaaatgattttctcaacttattttttgtaaaagtactatgcacttataggcaataaaaatgctttcaagaaaaaattgaaagcacttccaaattattttagaaaataagaaactttaataataacattgtctttagtaaaaaaattgctatacatgtgtttttagttagaaaactatttttgaaataattatgtgaaaaagacctttggtttcccattttaaaatttatttagaaaaatttacgaatgaaaaattttcttttcttatcagaaaaacaaaaatagaaagaaataatcaaacatgctttttaaaaatgttttcaaaattttaattttgaataaaaattgaaaacccatctgccgggtccaaacccaattccatttgctgtaacttgttttcaaacgcggccggcgaaagcatccgattctcggtcatctttaaccgaccaacta

SEQ ID NO: 98848 - DNA, 786 bp, Vitis vinifera
  Intron number 2 from transcript GSVIVT01023327001 (locus G SVIVG01023327001) derived from phytozome v7.0 (chr-ID chr1 2; pos 19696556 to 19697341)
gaaagatattagtaatataaatgttcttggaactcgtttagagtgattttaagaaacatttataatatttttaacatttaaaattttttattatttaagtgttaaaagggctagaaatattttttagaatcattgtcaaacatattatttatttacaaataaaagaaagtttttttcggtagttgcaatcatacttagtttgattgtgtttttagaaaatatttataatataaatagcatttcttaagaaatcaaatatttaaaaagattaatattttgacagtaaggtaaataattttgtcgtatatttttataatataataatgatgtgttaaatagtaaagaaataaaatttaatcatttgaattttaaaaaaatgaattttaaccatatttaataaaaactcatattaaaataatgtatttaagaaaaaaaaaagaatttaccacaactaggagtgcaactttggctggttggcctgatctatccaacatatgagtaagattggacaatcattttcaatacttgggttgggcttgggttaagcttttttcaactcaagttcattttttttagattttttttttaaatattaagttatattatgtcatatattttttttcatttttagtgaagatatataaatttttttttattactatcttgaaattttgttatttctataacctgatcaattcgaacttaaagaaatgatgttgggttgaatacgatgggttggaggtcgagttaggttgattttgatttgattattgtgggaccccgcat

SEQ ID NO: 98849 - DNA, 813 bp, Vitis vinifera
  Intron number 2 from transcript GSVIVT01026159001 (locus G SVIVG01026159001) derived from phytozome v7.0 (chr-ID chr1 0; pos 13143910 to 13144722 reverse strand)
cggttccatctgagaactgcagttgagcttttcatgtgtgatgagaagacactagaagattccctctgcaaatgtataattgtaacccgtgatgagaccatcacaaaatgtctggcttgtggataagattaatagttcaactggtcaagaccctgactcaatgtgtttgattggggtgctggataattatggatttgagagtttcaacacaaacagctttgagcaattttgcatcaatttgacaaatgggaaacttcagcaacattttaatcatcacgttttcaaaatggagtaagaagaatatacgaaagaagaaattgattagagttacattgattttgtcgataataaggatgttctagaacttattgaaaagaaacctggtggtgtaattgctctactggaagaagcttgcgtgttcctaagatcaacacatgaaacattttcccaaaagttataccagacatttaaaaaccatatgcgcttcagcaagccaaagttatcacgcactgacttcaccatttatcactatgctggtgatgtcacatatcaaactgagcacttcttggataaaaacaaaaattatgttgttgctgagcatcaatcacttctgagtgcttccagattctccttcgtggcagacttgttctcacctttacctgaggatttttccaaaacattgaagttctcatcaataggttctcggtttaagtgacaattgcaatctttgcttgaaacactgagtgccactgagccatattacattcgctgtgtgaagccaaataatcctcttaagccatcaatctttgagaa

SEQ ID NO: 98850 - DNA, 642 bp, Vitis vinifera
  Intron number 1 from transcript GSVIVT01022112001 (locus G SVIVG01022112001) derived from phytozome v7.0 (chr-ID chr7 ; pos 16671766 to 16672407)
tactggaaagccggcaagcataacgaacgggccgtgtgagtgcattttccttttccttgactctgtttggttactgggaaattggaggaaaaggaaaagcaaaagcaaaaggatgttccgatccttcttaactgttttttttttttctttttactgttttagtttcctgtgctcgtgaaaaagattaacttggttatgctactgtaaattgaggcgaattcttcttttgatcgtttcattaaattttctgagaaaccaagcagtggcctttttatttttttattttatggattttgatttcattgctcgctgcttgttgcttgcgtttgtcttattccataagattgtctgtattgattgtttgctatagcgggtgataagccttggaaaacattccgcacaaggagttgtgagatggttgagttggtacaaattcaagtggttttgaaaagtagattgatttttgcaaaatatgtgaacactagaattgaactactagtcactggcagctttaagggccatcaattttcttttagaatcttatttgctatgttttgaagctgcttgcactgtaatatcttgttttctaattgctataatgtttcaggtttgatttattttttcggaagaacccatttggtg

SEQ ID NO: 98851 - DNA, 975 bp, Vitis vinifera
  Intron number 1 from transcript GSVIVT01028483001 (locus G SVIVG01028483001) derived from phytozome v7.0 (chr-ID chr7 ; pos 8180035 to 8181009)
tacctctatccggccacaccgctgctcaccgccaggtcctagtcctttatcttgctctgcaactttttctctctacaactttctctctctactatgcttcaattttttctgtcagtagctttttgccactcttacgatctcgcacttttcaatgctttgtttgtctctctctaagactttctctctctagattgccttttcttttggtctgctgtactcgcagctttctgaagcaaattgcaaatctcgattctggacttctggttttgttgttgttgtgttttttttggggagccgggggctaattttgttctcagtaatcagttttatgttttcattgcagtgattttaaatagtagttttggtttggcttttttatttttatttttatttgattatgagtttagggtttcaaattgaatggattgcgcagtttgagtgaattgagggccttacagcgacgtgtgatgtgatttttcatgggaattattctctgcggacagtagaaatgtctctttattcttattctttctcataaatctaggtgctgtgacctgtgggttttatcctcctgcatctactacgcgcttagaacttgcagattttgaattctcagccttggatttgtggttgatactgtctctattgcaaagaagactgggttttatttttattttatgatcttttatttggagtaaacctgtggtctatttggaggttggttttgttgtatatgctatgcaaatattttgaagttatcttctttgtatgaagtgtactactattcaactattccgtggcttgaatgcagctgcacttcttttcctgctgttggctgtagtctgtactttctgtttcttgctgcattttgttgattttgctgactggtcaaaagaaacgagttctttccaaatttgtatattataggcattaattggtattaactttgccaactttccgatctcagttgctgaa

SEQ ID NO: 98852 - DNA, 787 bp, Vitis vinifera
  Intron number 2 from transcript GSVIVT01028483001 (locus G SVIVG01028483001) derived from phytozome v7.0 (chr-ID chr7 ; pos 8181127 to 8181913)
cttactgacagaccccatcagggtgaggttttctttgcataggtttcctttttcttattattttttcattcccaccagaatttctatttagtttgcagaacaagcttgaacaaaaatttgtgatatattgtgtttaggttctcctaccttcctaagtgttcttacatgttgagagggtataggggaattaaagtattgattgggttctaatgtgattggttgatttggtaaattatttaattggttgatagttactctgaattccagcagaaagggggtagtgtttgcgtggtatacttgggcctgatcaaattttgtgctccaaaattggctcagaagtcataacaagaatacatactccccaattttcttatattttaaatgactgaaaatagaatattgaagatttggtttatttatgataatttctctggtttctttgtaggcgtttctcttagggcttaaatatttacaggttgatcttgattgcttcctttgattagttgctcccctttcactctcttgagggtataaatgcatgagataaaatcaatttttagacctgaaaagcttctgattagaataattctctcagttaaaatggtactaaattcatgattattgccttctttgtagctcctatgataggaaggttgagtaccatgaaggctactttccttatgacatcttttattatcttcagttttatattgctaataacaatatcaagtcaattgttgacatgtccattgattatcaggttctccactttcaagaagtcgatctg

SEQ ID NO: 98853 - DNA, 470 bp, Vitis vinifera
  Intron number 1 from transcript GSVIVT01022400001 (locus G SVIVG01022400001) derived from phytozome v7.0 (chr-ID chr7 ; pos 19680910 to 19681379)
cctcacagatcctgttctcctcctgccactttctggtgagacaccctctccctttgatgttttggttcatctcaaatgattttccccctttttatcttgattctgaaaatgggtttttgtggactttgaatttgatgctgtttcatgttgttttgagatgtactgcactcagtggagtatcatctgattttgatattagttcatgttagtttcgagttaattgaattctaaattgcatttctgcttttccatcttgattctggacatgggtttttgtggaatttgatttgtattatactgagtggagcatcatttgattttggtattaatttgtttagtttcgtgttaattgaattctaatttgtatttcttcttttccatcttgattctggacttgggttttagtggaattatgctgttttgagttgtattctactgactggagtatcgtttaattctgatagtggtta

SEQ ID NO: 98854 - DNA, 963 bp, Vitis vinifera
  Intron number 2 from transcript GSVIVT01022400001 (locus G SVIVG01022400001) derived from phytozome v7.0 (chr-ID chr7 ; pos 19681453 to 19682415)
tgaggggagtatcatttgatttgacactgcaagaggttagttttaagttaattgaattctagtttgtatttccctttttaatcttgattctggacatgagtttttttgtggaatttcattttggttttgaggtcaagtgcattcagatttgtacatatattgaatcaaatatcacttaattttgatattttctcttgttagttttgagttaattgccttaagatctgtatttctttgtctcttcttgatttcggcgattggtttttgtggaattgattttgatgctgtttcatgttggttttgagctttattacattcaaatttgtgtaaatatattgaagagaatatcatatgggataatatctcatcttatttgagctaattgctttcaaatttgtatatatttctaaattttgaagttgtatttgaacatagtgaaaggattttagaaggttccaattatgtggttggaggcccattttaaatgtggttgttgttgattatttggctcttttgtgtatttgtattctcattcaagttgattgcatttagatttgtatatatcaagtggagtgtattttggtactatttcatgtttgttttgagttaattgcattcaaatttgtatataattcccaatttctgagttgggtttttgaatacagtgaaatgattttgatacaaatttcatgctaaaatttgagttaattgcatacaaatttgtctatatttctcaatttctgagttgtgcgtttgaatacaatggaacgattttgatactatttcatgctaactttgagttaattgcattcaaatttgtatatgcttgtcattcttgaagttgggttttccagtatagtaggatgattgtggaagcatgcaattatgtgcttggagggtgaaattttgtgtagtttttgttgattatgtggttctgttgtgtattttgtagtctgagaggca

SEQ ID NO: 98855 - DNA, 705 bp, Vitis vinifera
  Intron number 1 from transcript GSVIVT01024938001 (locus G SVIVG01024938001) derived from phytozome v7.0 (chr-ID chr6 ; pos 5887094 to 5887798 reverse strand)
cgaaattgttagatccagaggcctcttgggacaaggtgaggactttgatttctatttttttttttttttgtttgcctgccgagaaaacggtggaaagggagagaaaaggaagagtgaaattttggatttttggagctgatgctgctccggtttcgacctgttatggccatctacgtttttaaggattgtttggccctttctttgagaaattaattggaggacgaatgttatctgtgtgggatttctttagtggatctgatattgagcgtgcgtcacacggggaggtgttggtgggatagcaatgtcgaaattaaacgaaagtcagtaagattgcatctatttgaagttctcaattagcagtttttcattgagcaagcttttatggataactcttgcttcatcctcagtttttaaactaccatgaaatagaaaaatgtgaactctttctaacgttacttgcaaatgatttattaacttctgaatttaagcataatttatttacctaatccactcattaactcctgagtttgaatggaatttatcaattgaatctataattttcagataccttcaattatttaatattaaaattatgttcgagggtcatcaatatggcctgttattgacacaatcttaagttagtgatttctacactttttctcccctgcaggatcaattgggcgacgttttgcactggattcgaca

SEQ ID NO: 98856 - DNA, 913 bp, Vitis vinifera
  Intron number 1 from transcript GSVIVT01020397001 (locus G SVIVG01020397001) derived from phytozome v7.0 (chr-ID chr1 9; pos 20139552 to 20140464 reverse strand)
ccgtgggcttccaaaaccctagaaatcagttaattgtatgcccatcttctctttgatttcttcgttattcatacatttctagattcaacaacacttttgtgtatatatatatatatatatatatatatatatatttcaattttgcacttggatttctatatgtactggtcaatcatttattcttaggaactcagatttagctctatacccttttcatctccttcttctcatgtagcagtttcagattcgtggttttcccctttcgggacccatgttggtcctgaaaacgaagtcaaaatgtcagattttgtgttgtttgattgttttgattaatgggttgccttgatttggtgaaaatccgtggtcatgattttggtttcagtgtttgaagctctgaattttagtggatttttttttttttttttttttttttgtgatttggttacaacttccctttggttctgatttgtccgtctgtatattagaagaaggttttgatgtgttgtagtggacatgttttgactgctttttcatattctgtagtgctagtttagggttgtaaatgggcaaaactggttgtgatatgatttgcctccgtgattttgtgcttcgataacgcactggattcacgtttttggttcatttgggaaaaatagcttatccctcttggggttctttattggtttaccactgccattgcattgtatttttggatttttgcttacattctcatttctttttgaatgattgcccctccttgtactttattattgctttttttttttttgatatattttcagttttctattgatacaatgaaaatttcattgttttttcactgttatttctcccctaattaagcatcttgtatggtataggtggcgtttataaacaccttgtatcaagaatagtt

SEQ ID NO: 98857 - DNA, 651 bp, Vitis vinifera
  Intron number 4 from transcript GSVIVT01018941001 (locus G SVIVG01018941001) derived from phytozome v7.0 (chr-ID chr4 ; pos 18516828 to 18517478)
atcctcggtaagtccaccattgttttcttagcaactcacaaattttaaactagtggttggaaccatatctgatattattgttttcttctttgattgcttcaatgctcaaattcattacacaggaagcatatagatatagggatacaaagttaccagggcttagactaagacattttatgataatatcattcatatacttggaaaccactcacttttctgcccacctgctgattgtgagtcagtgatttccctttcttaattcacataagaaagcaacgaagtagaaaaaaatgaaaatgtttagttcctatacctagatggcatttgttattctggtggaaatgccggacaaaataaagacatgatgaagaactaagccacagggtagtcgtttgaacatggtgctcattctattttatgaaatgggcaagggagagttcatcacatgtgcttgaaaaatgagattacttgaatctacagtttctgaaatgttaaagattttttttttctttttttgaaatttcagctggaggaaatgattgtctagtttttgactttttacaagtcggcatgtgttaatattccttctgagtacaattttgatttatttcttcctcaatatttggcagggaaacttttgtgaacactttt

SEQ ID NO: 98858 - DNA, 995 bp, Vitis vinifera
  Intron number 1 from transcript GSVIVT01020452001 (locus G SVIVG01020452001) derived from phytozome v7.0 (chr-ID chr1 9; pos 19190154 to 19191148 reverse strand)
cctggcaatcatataaagctgatagagtttgtataacatttcattaaggaaaccttttgatacatatttatctcttggggcctgggttgagccgttgtgaagaaaaactaatgtagcattgtgtgcctgaaagatcattacaacaaaatcattttgctggcctaaatatttacagttatacccatttaccactaatatcaagatgttgcaattaaaaaagaaactacactggcccacaagataatcttttcctctttctaatcctcgaatcgccaaatcatccctcttcagtcacttgaaaggttcttttataaggattggctttaaaaataaataggtcttaacaaataaatggaaaaccatcttagtgaacaattttgttgaaaggacttattagttttctgtgacctaccttttatcaattattaataggacatattaagttttcttgacatagatagtggattccctcttgagaatgtgttcccagagttccagtgtggattccaaaatatcaagattttggtccaatatgacctcactcttttctagaccaaagaagccaagattgatgcattggactgcctgttctcacatgattaagaatgacaccattagttgacactgtcaatgtgttattacgatgatccatttctatgatttcaattacatctacacagaatttgaagattcaaataaatcatgctatcacatagttcccttggcaccataataccattgttgtctattagtttaggtttcttgcataggactcaactttcttaattgtaagtttctttcctctaaaagagagattgtggacaatattattcaaagttcaaatgcttttccacatcatttgcagtgacaagtgttttttgctttaatctcatattagctttgaaatcttggagctctattctttgtagtttgaaataaaagttaacatgcttgttatgtttgttggtgcagtattggagcccaatccatactac

SEQ ID NO: 98859 - DNA, 961 bp, Vitis vinifera
  Intron number 3 from transcript GSVIVT01022084001 (locus G SVIVG01022084001) derived from phytozome v7.0 (chr-ID chr7 ; pos 16468424 to 16469384 reverse strand)
gtggtgcggtatattttggtaggggggaagattgattgttgcagttgtatctgtagtcgttgattctgtggcaatatcatttcaactatttttattatgaaaccttatccgaatgagtgtactggacttctgaaataaaaatggctgtggacttcaatattgtggtactgagaatgtagccccttagggtgctcagttggctagggttaatgtcaggatgcggagtagacgcacatggtcctaggtttgattcctgttgctggttgaatgccccaattacccagtgctgtttgtggtgggcatggttagcatttcgaggtttgggttcccacggagagtctgaactcggttgtcaaacgtatatatatagatatatattactctcagttggcccaatctgtgcccatatgttcctgtagtgttaactgtttaacgtatttcattttaaatcattgggcgagttcctaaaagaaactcctgttctagttggcatatatgtgagcaagcagaatgtagaagggaagacaaccagtgatatgtgcgagcgtttgtctaatatattagagtttgtctgtatagacagaagaaattgacctttagatgggatttaggtgtggctatggttcaagcgatacaatatttactgcttacaaggatttattcatggataagtcttgttctaatgcctcatataattctaagcggagtgtaagtcagttagatgtgttttttgaggcatgcctaaggctgatgcacaagaagaatgcatcaatgaaaccacagaggcaacctctggttacttgactcaataaatcatatcttggcaaagaatctctctctctctctcacacacacacacacacagagaaataactcccaattgctgttttttattccttattgaaaaaaccaacttgtggatgaaccttatattggttatcttgaacaggaaaaccgtgac

SEQ ID NO: 98860 - DNA, 392 bp, Vitis vinifera
  Intron number 1 from transcript GSVIVT01019282001 (locus G SVIVG01019282001) derived from phytozome v7.0 (chr-ID chr1 5; pos 2076922 to 2077313 reverse strand)
gttagcagttcggaacaagtttttctttctttggaaattagcattttcattgattttagctacgaaaagcaagaaaattaattatagaatgatagccaagtaccaccttagatagtgacgggagctttgattggtcatatactttcccctttgctcctcagagagttttagggcaaaaggggaaaatgcttaagaaggaagccaatttcccaaccttctcatgttccccccttttaagaaaattttggaaatgttgtctacccaacaaaaatttagaacagagaagagctagtccatttcttttttattccattgtttctttaatttctactcttaagcaaacattcttgtgttcttcgatcaggacagtggggagaacagccctaaaaaca

SEQ ID NO: 98861 - DNA, 988 bp, Vitis vinifera
  Intron number 2 from transcript GSVIVT01022183001 (locus G SVIVG01022183001) derived from phytozome v7.0 (chr-ID chr7 ; pos 17259474 to 17260461)
cgaattggtgctggaaaggtatgaaatcttcttcataattatactgcttctttgattcaatctcgttgtcaacgattagggcggtgattttattgggttagatcctatttagcaattgatcatgcttagaattcttaaagtaggatcttgcagtgcataaaaggtaaaccacaataattatgtttatccttgaatgtgagattatcttcaatctaaatgatacgtttgaagctatggtgtatgttgtctgactctacatgttatacatgtgatttatgcaatttaaatggaaagaagttttgaacggtaaccagtgaaacattctttcttaatgggttgttatctcttgtttagtttaccaatcctataacaattacattatcttggtcctcaggaccttgattatcttgtttaaatgtagattttgatgtatgtcaagttacaaagagtttggtgtaatttagtacttgagttacatttagcagaaagacctccttgattctttttgtactaattccttgtttatgtaagactcatatttaaatctcgggaaattgcaacattcaacttgttcttctatgcaatctttatcttgccatgaccaaaccaccttctcgtaatcacttcttaataatatctctattgctaatacctttgtattctatgcagagtataataatgtgctgttgataatgcttccatcaattcttaatgactcttttgtgaaggatggagtagtgtcttaggatggagtagtgtcttcaaatgtaatacttgttatactgaataaaatagaatattttgttacaatgtgtccttgtacagtctgataaaatgtatggtaatgagaaaacttttctgtctaaaacttgtgaaaaactatgatttcatttcctgtattctggatctacctaaattgttttttgattcattttttatctttgtgtcaccagttgattaagggactggatcagggaattttaggggg

SEQ ID NO: 98862 - DNA, 565 bp, Vitis vinifera
  Intron number 1 from transcript GSVIVT01020837001 (locus G SVIVG01020837001) derived from phytozome v7.0 (chr-ID chr1 2; pos 1265268 to 1265832 reverse strand)
ttgctccagattttcaccaagcctttgggtgataggtatgcccgcaacccatatatgctgttattcattccaattaagtgatattttttgtttcaggaaattctgattaaatccttgtgttggaagagtggcggtgcaggggatctaggctttaccctttctttaccctttttccctttcttcttcattttttttttttctaaatagaaggggctgcgacagagagatgtaatagaataaatgggtagaaacagaggatgggagaggcgcctctaaactgataggagggcaggattctaaatctaatgcagaagggagaccctataaagctgatttttttctctcagaaataatcttaagttgctaattgatccatactttattaattacttgtgataccccttttggataccttttgttttgagtctgtcttccctatttttccaattcagaagatagctatggcaggaactggagaaaaaaaagtcgtattgctggattaattgattttatttgtatcttttgtgcaggcccacaatatttattgagataattcagagattag

SEQ ID NO: 98863 - DNA, 964 bp, Vitis vinifera
  Intron number 1 from transcript GSVIVT01019306001 (locus G SVIVG01019306001) derived from phytozome v7.0 (chr-ID chr1 5; pos 1509097 to 1510060)
acaaacccatttcacccttttcccaattttggtgggtaaggccctctctctctctctctctctctctctctcttctcgtttttctactctccttttcaggattttttaatttttatttatttatttatggttgtaatttgtcaccagtcacgaaaatcacaagattatcaaaaacccacttcaccaatttcctaattttggtgggtgacaactcttttctcctttctattctctttctcaagaatctgtttttcttgggtattttttttttcttctgggttagtgtaatttctacatgttttcttgttacctttcatggtgtgagactttgacggtaatttttctttgatgatttttttaatgagattatgttaatatgctggcaagctgatcgggttaatgatcaactcgatcaagtcgaatttgaattaaatgagcaatttgattagacgtttctattctaatctataaaacctttccttggttaattgatgcatggctaccttcattttctttttcttcttttgttctttgtttttctcatgaattgattgatgggtttatatactcagatctctttgagtgaattatgaaggcctgaatgttcagaaagattgttcttttatgcttcctttggcggcagagaaaccctaacaaatattattaattgttacttaaaagtttctttttttgaactcttttcttaggaatcaaacgccaaaaaagttgttctactgcattttatttcctcagatttctcattaaatgattgaaaattacgggtttaatttctattcttaactgtgtttaatctttgtttttaagttctatataagaacaataatagattttttttttttttttttgggtcaagaattttccaaaactgacagaagatatcacaatcatcactaaccaatcagtgtttctaattcatgcagcattgatttcaatttgaagaaaa

SEQ ID NO: 98864 - DNA, 202 bp, Vitis vinifera
  Intron number 1 from transcript GSVIVT01018870001 (locus G SVIVG01018870001) derived from phytozome v7.0 (chr-ID chr4 ; pos 19071922 to 19072123)
tttcagaagcgctccaatttctgcgttaaggatccgtgagttctctgtttggtttctgaaaaagagaaaaaaattgtttattctggattttgaataattgaagagtgaactgagctggggcaattggtttaattaaactcattttaagtgtttgattcttatcaaatttggtttgactttgaacttgtattgcctatcaggg

SEQ ID NO: 98865 - DNA, 850 bp, Vitis vinifera
  Intron number 2 from transcript GSVIVT01018870001 (locus G SVIVG01018870001) derived from phytozome v7.0 (chr-ID chr4 ; pos 19072164 to 19073013)
ggacttattggctacttgcatccagaaaactaaaggtatgagtagtttttacaagttacatttgagcttgtttggatacctagaaaatccgagtaaaattggaaaaaatggctttcatgggggaaaaaaaacatctggaatcaatcaattctaattaaactagttggttacctgagttgagtttctcattcttttttgattctttggaaggaagacaaaatggaatttgaaactcaaatcttaatggcttttcttcaccaactaaaatggagggtcactagaaatacccgttgtgtttcttggtcagaaacttcatatttgagtgcactgttataatattgggaagaattataggagcattattaatgtgattcggctactgagacttcataggaaggtggtttggaccgggttggtgtgtattccagttttttttttctcacttgtcctggtgaattcttagcaatgagactaggatttaagctcaaaaggttatacttatccattgtttctaactcttttaacttgttataattgatgaggaagatgatagtttctttccgacccattattggaaagtttctctttgaggcaccatcatgctctttccttggcatctctttctgtaaggatctgttttggcccaaagggcagtaagcaataaagaaggatcttgtaaaatatcagacagagaaaaccgagtgctagcattttatgttgcttttctttcagtagtattttctgcaactagtgggtcattttgaatcataagttgcattctcatgtagtacaatggtttgaatttccacaacaagagatattacccgataattgtgtacatctgcagaaa

SEQ ID NO: 98866 - DNA, 465 bp, Vitis vinifera
  Intron number 1 from transcript GSVIVT01026895001 (locus G SVIVG01026895001) derived from phytozome v7.0 (chr-ID chr1 5; pos 19593937 to 19594401 reverse strand)
gcatttcctgttgctctcaaggttggtgatgcttcattttatcaaacacgtgttgtgcaaattttatagcaatccatatagtgtggttttttgttgggaagtaagtgaagaccctagaatctagattgaattgagcgaatcagcatttgaatagaaataccaagaagtgcacattaggtataaatcgaaaaggattttgcttttgaaaacacttgagaatggttttcaaaaattattcttcaaaatcattttttgataattattttcaaaagtatattatcaaagtgaccttcattctccactaaaaattgatgaccctttggcttgaaggttggaaatattcctctttggaatcagtcatgctacagacacacccattttcttatcatctactatgatttggttggattgagctcaaatgtgagataaaatgatagtgctataaactttctcaaatgcagtgtc

SEQ ID NO: 98867 - DNA, 873 bp, Vitis vinifera
  Intron number 1 from transcript GSVIVT01023409001 (locus G SVIVG01023409001) derived from phytozome v7.0 (chr-ID chr1 4; pos 12419501 to 12420373)
ccacttttttgccataaaaaaattcacagtaaaaagtaaccttttttttcatgaaatataatttttttgacaaaatatattttactaaaaataaataaattattcttatgcaactaacatgtttcacctttaattcatttcccctatttcaactgtttagaacctcatatttgtttcaattttgattcatctcccccatttcaactttttagaatctcatattttttcctgatcaaaataaagttgaaggtctcttttttattaacagtgagtccacatggtaagcatagatttatttttggtaattacgcttgatattaaaataataataataataataataataataatcaaaagcatcattacatgggaaaactgattgcattgaccactgtggggcttctgacatcgtgcttatctgagcatatgagccttccaaaaagactcacctccctcatcacctctctttgcctccaatgccaccttcaacgttttctctttgattactcttttcaaaattaaagcgtattgggttccaccttcaccaatattccacatggcacctccgtttgaactgtggatgtagctggttccaacattcttcaaggtcccactcattgttaccttgcctgagagacagggacagtaatggaggagtagtttgaatccaaataaatttatttatttggtactataatttgtaacccaccttgcggatttctggagtgattggattagggcccccgggacaaaaaagaaggcatgatcggtgctgctgctgtacccacttcagttgcaccacttatgtaaagccacagggtacctgaaagtgaaaagacaaaaaactaagataaaaattccttaaatactaag

SEQ ID NO: 98868 - DNA, 486 bp, Vitis vinifera
  Intron number 2 from transcript GSVIVT01023723001 (locus G SVIVG01023723001) derived from phytozome v7.0 (chr-ID chr1 1; pos 10114606 to 10115091)
tccacaagactaaacttaccacaaaatctcgtgaggtaagggtttcacatcgctagggtttgggtttttcttcaagtttcttctctattcttagttctctctacgggattttcgggttcaaatattcttcaatttttttttttttaatgcgtacgccttctggactcgcgtttttttcttcaacgactcaaggcttttttgccacgcctcgccctttggcgcgcctgaaaacacctttcaaaactttggataacatagatatagttatctctgggttttgaactgattctaatttcacagccaacaaatccgcgaaaggcaattccaatgtaaattccagaattttttttgagctaagcaagcccttaattttctgcagctcgcaggacttgcaaaaactttctcattctatctttatatatggaatttcatctgcccatcatgattgtttgactctttggttagttcacccaattacggagacaa

SEQ ID NO: 98869 - DNA, 603 bp, Vitis vinifera
  Intron number 3 from transcript GSVIVT01026989001 (locus G SVIVG01026989001) derived from phytozome v7.0 (chr-ID chr1 5; pos 18774599 to 18775201)
tgttcaatctattttgactgttggtggcataggaggtaagtttgaagtgccaatttcatatgcactttcatttctaattgcataagagcaattgaatatattattgggcattccatcaattaggatgtttcccgcaaccagaacagcagctcaaaagcatctctaacttgtatatgattgttgttggttggaccaagtgagcagtgtgtctctaccgttgggtaacatgctaacaagacattccatcatacgtacaaagtttcttgtctgtttcaagtgactcccctgaccttccacatgactgcctccttccggttctttctttctttctttcttcttcttcttcttcattttttgatctcatgattaacatggtgactcctccctcttatcaccaactcaaggattattgttgcagttaactatctgatgttaggaaaaataatttctttattttggtattgttcccgagactttggttgtagttttatgaaaataaagcttgttttatctcctcataagtattatcctgagaattgacttttgtctcttcatatcttgtatgcaggagtggctactgcttttgcatctagagacattctt

SEQ ID NO: 98870 - DNA, 935 bp, Vitis vinifera
  Intron number 2 from transcript GSVIVT01025883001 (locus G SVIVG01025883001) derived from phytozome v7.0 (chr-ID chr1 8; pos 27504713 to 27505647 reverse strand)
aattgaaaagtctggagctgcgatccaagcttctggtttgttatatgtaacttggtttcatattatgacattcataagttaattttctatttaatttttattttacttttacaattacctttctgctggtggttgacatggcaggagacatgaaactagttaaagataattgattttattgatggcctagaagtatggagcaatttaatttctagtagtgaatgtttggctatatgcttaagtttatttttctgttcatttttatgatcaagatcatattggtgatattatggtctctgatgtttcttttgagggaatttacttgtaatccgagctttatattcataaaattgatgctttctttcctgccttgtggatgacctttctttgactttctgtttgtgctttttgtcatggtacaattcactgattaccactctgctaggacatttatggctggaaaaggccatgtgttattttataatccatgataatgattagtgttggtcacaaattcctattggcaccatttgggttatagaacatatgaaggaatatcaaatatcatgaaaaattatgaagaatttatacattttaaaattcgccattctttacatagaagaggaaagaagaaaaataaattctgataaacatgttggaaaaatttattaaattcaaatttattatttattttccttcattttttcttgccttccatttccccttctattttctttccttcctactttctcccgaactttccaagatccaaaaagagcctttatttttcctacttttctttttttgttttttccccaaatttccttttacagatatctatccattactgcaggctactgatgataaacctactagtttttttctgtttttagacaacttacatgagttaaccaataatgtaggtgaggctgttt

SEQ ID NO: 98871 - DNA, 941 bp, Vitis vinifera
  Intron number 1 from transcript GSVIVT01020578001 (locus G SVIVG01020578001) derived from phytozome v7.0 (chr-ID chr1 2; pos 4108848 to 4109788 reverse strand)
cagcaggtaggggaagagttccattgttttttcttcacaattttttcagtgtatatgtatgtgtttatccatgtgttaatttgttcttgtatggatctttgtgaattttttgttcttgtatggatctttgggaatttttggttcttgtatggatatgctgatcatagctgaattggatggttctgtctatggtgggtttgaggcctcaaaaaacttcactattatggttgagccactgctcttcacctcatatttatccctgcaggcactcacagccatcacggcaattcatggatttaaaacttttgtcctggttcgagggataagacccttgataaaagcttagtaaggagaaaaagggctagatgagccaaacctgaatagttatgatacatggctttttggggttgattttagttggagtttatctgtttgttgactgatacagtggcttgagaacttttttcctttccctccttttctgtaatttggctcatctttcttaatgcataaccagaaattaacttgagccaggtacaaaagaaccaagtatatagatcaatccttcatttgaaactcaaaacaaatcttgggtgctgtttgggtggtagcaaaattgtaaaatggtaagccctataagaggacttgacccttatatataagatttatgtaagtcccatcatctgaattcagtgttgatttggggactctaggactctatttctctgtatgatctggtgactcctttcagttgtataaagatggaatccaccatctctgttgcttattttataattgttcaatgagctatggccataggtagcattgctctttcagtgtccaaaatcaatgagaaacaaggaaaaagaagggcacacagtatacttctttagctaaatcaatcacttgcagattttacagtagtgggtattgcagattcc

SEQ ID NO: 98872 - DNA, 569 bp, Vitis vinifera
  Intron number 1 from transcript GSVIVT01028918001 (locus G SVIVG01028918001) derived from phytozome v7.0 (chr-ID chr1 6; pos 17567340 to 17567908)
gcccggaggtatggataatgtgttgtttggttgctgagaaaatgtaggaaatgaaaggaaattgaggctttggattatatgtttttgcgttattggaattttagaaaatgaggattgtttgtttattagcttaatcgagttatattttcatttctggtaaacataaacaaggttcaaattttctttactttcatccactttcttggcgaaaaaacaaatgggaaattatgttccttatagtttcatcatccaataaatttctcgttactttgtttagtgatgggagcagttaattatcttgtctaggttgtgtgttgtatggaattaaaggcactgattttaatctacacttatctttttcacaacaatagattgcgtgaacaccaaattccatgaacttcagagttgagacaactaagtgtaatttgctagtaaaagaccaagatttcatataattggaattccaaatcaaatccaattctgagcagagaaacaaagcctatagggcccatagatcttttctgtagattgataagtgataacacttctaaagtggtttactttcagga

SEQ ID NO: 98873 - DNA, 746 bp, Vitis vinifera
  Intron number 1 from transcript GSVIVT01021225001 (locus G SVIVG01021225001) derived from phytozome v7.0 (chr-ID chr1 0; pos 2731239 to 2731984 reverse strand)
ctgttgagaggcttggtggacaggccagtaagttttaccttaaagatactccatgttcattcttcctcactagaattttctttctttctttctttcttgtcctcttaaaacctggaattttcaaaagataaaaaacatttataattaaatattactgatctcgataaaattttatagaaagaaataaaacattgtacaaaatcaattgaaatcattattgtaatttatttgttgttatttcaatatatgagaatttttttttgttctcatgagttcttcaagtaatattgatttttttttttacaattttgtatttaatattttattgaaaaagtttcttaatgcatgggagtactctttggtttttaattttaaaattttaaaatatttttatttcatattaaattttatgttgtttattttataaatttagtgttatttaatgacagtgttattataaacaatcaattaataaaatgcttcttcgctttcaacttatttatatttggctattaaaaaaaacgctaaaaattctctataaaatttattgaactctttgaattttatttttaaaaaattattaaaattattgaattttatagtgaaatttgtgttctaatttatatataaaacttaaattcttcgcattaaatatccaatattgccattcatcatattcttcgctttaaagtagtactttcttttcgagaatcccaggagcgactccaaagctggttcttgagttg

SEQ ID NO: 98874 - DNA, 427 bp, Vitis vinifera
  Intron number 3 from transcript GSVIVT01022534001 (locus G SVIVG01022534001) derived from phytozome v7.0 (chr-ID chr8 ; pos 4486172 to 4486598 reverse strand)
gaaagtatgctatcagctatctaactagaagcatcttctcagtcttttttttcccattttgtttttctggtgcaccacttttatttattgtggctgtttattctttacccgaggaaaagataaaagcgatgtcttggtataccaacgtctatgtttatagtctttttctttcatagttttaaattaaaaaggaaaaaaaatgctgattttgacactatgttgtggattttgtcttgaaatttccaccacttctggtcttctgatggctgaaacaattttgatgaaattttggaagaatatacccaatacatatgtatctctctctttcttccttttttttttttttctgtttttatggtcactaatataattgaagctatactattacctttggcagttaaaacaagataacaaagagtaccgtgtt

SEQ ID NO: 98875 - DNA, 727 bp, Vitis vinifera
  Intron number 1 from transcript GSVIVT01022534001 (locus G SVIVG01022534001) derived from phytozome v7.0 (chr-ID chr8 ; pos 4487068 to 4487794 reverse strand)
ttcttgtgagttgagttttgatacatttcatgttttctgggatgttatttgttttaataaatgctttttctttggattcatatgggaacggacggatttttttccttcattctttatttttgggttgattttatcaattggctgtcaattgattttacggtttatgtgattagagatgtgaattttagtgttcatggagctatgtagtggtggagttccatagttttgtcgatcctttatatgcgggttggtgaattttgaaatttgattggttttttatatgctaagcgagctcgagaagcaaggaataattgttgagaccctttcgatgagagtaattgatgttgagttgataagattagcagcttttatgtctcatatgctgcagaagatgaaataacatgggcggaaaatttataaatcaagtttctttcatggggtttgctaatcaagtttccaggaaacttaaaaatgctctttttatatggtaggacatttgggtaaatgatccacttcatggtggagatgctggaaaatgaaacaaagttcattaattattatgattctttttttttttctcgtcttccaaacaaactgaactttaaggttgtttcctgtttatcccccttgtgatgtgacaattactaaaaacggttgtttatttaatcatatttggttgttctcaatgtcaggggtttatactaaagccggtgtttatattaaagtc

SEQ ID NO: 98876 - DNA, 593 bp, Vitis vinifera
  Intron number 2 from transcript GSVIVT01024228001 (locus G SVIVG01024228001) derived from phytozome v7.0 (chr-ID chr1 6; pos 10700 to 11292 reverse strand)
gtcgaaagacaaagctctcctttgggactgcagtgagtgtttcatttctaatatttgtgattctcaagttcttttcttccggaaaagggggaaaggcctaggcttcacctgttttggataaagtgaaatcaggaagaaaaaaaaaagccttttcatgctcatggatatggctgctcattgttgagattgtaagatttgcatatatagtacataacctgagctgactgaaggtttcatctcccggcaatttcatagaaatctcatttcctggaaattggcatccataaaatagacaaggaagccattttccaatattttgagtgtgtaaattattcccaaatgtcaaataaggccttaagttcaacttcccaaatttagagatgtgatatagagttaacaagaatactaattcatttttcctaatccaattggcactagatttgctctttgtttttgtgacagtgataattaagtcctacgttttccttgtaattggttctgctttttgtggttgtcttgctgaatggtgcatactttgaaggcagggttatactgatattatgtgctgcaatctcaggcctacgtgactcaag

SEQ ID NO: 98877 - DNA, 592 bp, Vitis vinifera
  Intron number 1 from transcript GSVIVT01023173001 (locus G SVIVG01023173001) derived from phytozome v7.0 (chr-ID chr1 2; pos 21654501 to 21655092 reverse strand)
aatattttttccaagcctctcaagttgaagattttaaaagactaagaatactacttggagtcacaaatcaactttaaggggacatgttggaaagttaaacttgatttagaaactttctaaatattagaatagattcagtttctaaaagttaagggtgaatattttattgagtaattattttaatttctatttttgagttacccagtccgtatatatatatatatatacatatattattaggagtttctattttgttaagtatgagtatctataaataagagattatgtaatatttgaataagagaaagcaatgaaatacaataaatttttaattcttccctattttatcttctctgtaattgtttgtgtttctctatcaaccctatttctccaacacaatcaacatcaagtatctctcccattgattatttgcatatgggtgctgaatattcttgtctttgtgcttctatatatacttatgataagaggctaacttttacaggtctagaactaatccactgataatgacttttccttgtttctgccacacacacaatcagggacagagctttgagactgaacaggaagaaag

SEQ ID NO: 98878 - DNA, 656 bp, Vitis vinifera
  Intron number 1 from transcript GSVIVT01027636001 (locus G SVIVG01027636001) derived from phytozome v7.0 (chr-ID chr1 5; pos 14807185 to 14807840)
tctaatcttcaaggtgggttgtggattttagtggaaaattcactgccttaattcttggatctatggtttttggtggaaatattcaatcttggctttgggttatatagtttctagataaataaggtataatattgtaagttagagaaatgtttccagcttatttcatctgggcatatgggtggacaataaagctctagccttgtttattactgatatcacaagattatttcatccggggttcttttatatgaacaaagggtgtccagtgaagctctaaacttgcttgttactgaattttttttttcccacacgttttcatctgggttttcttcatttgggctccatgttacccaccatgctaaatggttatgtcgcttgcttggtttttatttgcctcatgttcagttccctatttgcttacatattatgttttgaactttctttgtttgtgtagcagtaatgacatcctgggttagatgcaaagaagatttgattttctttacaattattttttcagtatcttccaccttaccatctgattaaattaaattactaggagaactgtgttaaaactgaatagtagagccttgatatgttttttttttttctttttgtatgcagttttacagctctgttacaacaagttaactgggggc

SEQ ID NO: 98879 - DNA, 349 bp, Vitis vinifera
  Intron number 2 from transcript GSVIVT01028373001 (locus G SVIVG01028373001) derived from phytozome v7.0 (chr-ID chr7 ; pos 6772274 to 6772622 reverse strand)
aggtaactgcttaaatttttaggaaatttgtcaattccatatgccgatgactgagatttcagaagaaattggttgggggaaatgaaaagaatgtgaaatttgaacattaggcgatatgttctttttggtttatgaaagaatgtaaattcaactcaaccaactgatgtgctgggtcctgctgaataaaggctttttattttgggtctcaaattattgaagattaatatttaagtttttgttcatttcccttctctaaatttcctcagcaaccaaataatgggaaaaaagcaatgctaactttgattctggtgcagttggtggtaaaaagccaaattcttgcaggtgggcg

SEQ ID NO: 98880 - DNA, 292 bp, Vitis vinifera
  Intron number 1 from transcript GSVIVT01022319001 (locus G SVIVG01022319001) derived from phytozome v7.0 (chr-ID chr7 ; pos 18443572 to 18443863)
ctcagcgaccgttgcctctactctgctgccaagtatccggttactttcaaaccctaactcatttactaaatccatttctctgttctcggttgcccattaatggaagaaaaaacggaaaagagaaaccatttttgttaatcctaagctgagaaatgttcttatacgagtcttaatgggaagtttaattttgaggtttgtttgtgttcgaccaaaaggggcggagctgattttggctttgattcgatttctgttttcagggcagcagagcagttggtggggatcgagcaggatc

SEQ ID NO: 98881 - DNA, 821 bp, Vitis vinifera
  Intron number 1 from transcript GSVIVT01022468001 (locus G SVIVG01022468001) derived from phytozome v7.0 (chr-ID chr8 ; pos 3416793 to 3417613 reverse strand)
caaactactcctcagaagctccaatttttctaaaggtttctctctcttcatctcacttttttgtctcggtgtttggttgctgagaattttggcaaaacaaaagaaagtttgaattcatgttttaaaaatttggttttcattctctgggaccccaggaaacaattttaaattcagcgttctttttattttcttcagtttatgcaccgaagcagtatacatttggtttgctttatttaattatttgcttacattgttgtactaattcaaatttatatgctcgtttcattgatttggaattatgctttgctttttcaaaatctctgtgggattgagtcagttttacattttgactatcttttgcattctagatgaggtgggtttctgtatttcctttatttactacatgctctgtttgcttgccgagaaacagaagggaatgaaaagaaaaaaaaaacaaaatgtttgtaacatcaaatgctgatgttttggttctctagggaacaacaattgaactcagtgtagccttgtatgattgcctagcttagatacgtgaaagttcctcttttccccctaaagtactcataaggacaaaataaattcctgttcattttcttttgtctcttcatcaatcaaacagaaacttattgttttcaccatttttttttaataaattctatcttattttcaaattcagtccgaagtagggatggcttatccccagttccattgattattattattttctcatttcacctctttccaatgtgctgtcctaaaaaaatgcaggttcatacctggtccctgcagcggaaatctaccca

SEQ ID NO: 98882 - DNA, 784 bp, Vitis vinifera
  Intron number 1 from transcript GSVIVT01024769001 (locus G SVIVG01024769001) derived from phytozome v7.0 (chr-ID chr6 ; pos 7113877 to 7114660)
aaatttcttggctgcctctccttcggatctgcaaggttcacctatcataactctctgtttctcctcctttgatttaattttttaattggtggggtccttttcaagaagggtcatccgattattgggctctttttgtttgatgaaatgtctggaatgaatgtgtgctgctgaatcatgcagggttttatagttttcttttcctgtttgttttgggtattgttcaggaaagatggttgtagggttctttcatttgagtggtgaatccacttcgtttttcagaattggatttgatttataattctaatttggggaacttgaaaatctagcctgtcaacttctccctcgctctctatatctgatatctgggcttacaatttcccccaaatgtatatatgggtctagggatttgaagttatattgtctttgagcatatgggggttttcagtttacattcaatttcctgtccgtggtatataatggaaaaaaaaaagagaaccaactttggaattggatttgacaccttcaatataatgtgtcaatggggtctatggcttttgtgctcaattattattattattattattattttattttatttttctgtttgtttacattcaatttcctgcatcaaataaaaaaaaaaaggaggggaaaaaaaacctgagaaattggacttgagatctccaattgcatattagacttcaatcccgcagctgaagaaatcacacagcttggtggtacatgcattatgtgaattatgtaggtttcattgtcttaacaggga

SEQ ID NO: 98883 - DNA, 932 bp, Vitis vinifera
  Intron number 2 from transcript GSVIVT01029637001 (locus G SVIVG01029637001) derived from phytozome v7.0 (chr-ID chr9 ; pos 20340628 to 20341559)
cgagaaagattttgcagctcttgtgtttgagacaggttagatgtcaaaccattgcatctggaaatgagaaatatatggctgttataaatctaataccatgctttgtgcttgacagcgttaagtttcttctcatatcttatatagatattcctcttcaaaggatatagtggggtagggaattggggttgaacaccagggtgccctttttaggagtagtattgctagttcttgcattgttaatcagaattgttttcttactgtatcagatcatatatatatatgtatgtatgtatgtatatttgtttcacctcagaatctgatgcatataccttagcactgctgctgtgatcaaaactttgggcagatagaaattggtattatccgtattttttctacgcttttgatagtagactctgacagtagtggcagtatttaccagctagctatgcccaggtacaatgcgtgatactgtaccatattgcttctgagataggttatggaactgtggcccattagcattcatatcatgtccataaaacacgcttgacactcaaatggcaaagacaaactacaattttcattaaccaaaataaattgtctagtgagcaaataatctagattgaaacgttgaaaatcaatgcctaactatagtactcaagaagctgaattaaatgtatcgaggatcaaatatcccaaacttgtattcttgatgctattttgatggtggatgattagttcatctaacaaactgcttcctttgtgattgaacattgttagttttatgtcaaatggattagttatgcatcatcaaggaggatataatgtctcttatcatgagcttactaatctaagcaagctatcccattagaaaaatggagtgttctttgatgacataagatcttctcattcacttctttgaatacagatattca

SEQ ID NO: 98884 - DNA, 868 bp, Vitis vinifera
  Intron number 1 from transcript GSVIVT01022970001 (locus G SVIVG01022970001) derived from phytozome v7.0 (chr-ID chr1 2; pos 17419175 to 17420042)
ttcatctagggtttttccttcgttcctctttcaaggtacatgagaatttccctccgtttggctactgtgaaaatgttggagatgtgaagagcccaggatttttcgtctctggcttaatccatcctaatgtaattagttggtgttggttgcgttctgttagtgcttttctctacttttcctccgctttcgcagagaacaaaccgaaggcagcatcaaaataaaacccagattttatcttgaatctttgtttctgtttctaaggaatccggtgatgatctttgttaataattgaattggatggcgtgagattttgcaaatttttctgacagggaagaaaaaaaagctggttaagcaggtcgcaagtttgcttctctctgtcaattcttcatctgttgaactaaaactcgtaatctgtaattcgttcctctatgttgggatatgggatatggggccacacttgaggggatgttagcttgccatatgttgttggccagactatttaatgatttaagcttttaggtcaaattgttagcttaagctgttttgccaaattggtagctttaacactgacatgggagcttccaattcctttataattctagaaaatatttaataatatgtctttcattttatgaaagccaatgcataatagctacaacagtgtgagttggttttgtggtgggtgatattgaaattgcttggtcaaaggagtttgatttgaatgggtgacaaaaggattatgctggtttcttggcaacttagatacaacatgacaaattcttcatttgagcttgctgctttcttagttccatatttctccttttgccaactaattcttcttgttgacagaggcttgctcatcttgctc

SEQ ID NO: 98885 - DNA, 502 bp, Vitis vinifera
  Intron number 1 from transcript GSVIVT01030221001 (locus G SVIVG01030221001) derived from phytozome v7.0 (chr-ID chr8 ; pos 10330503 to 10331004)
attgctttgttaatgcaagtcatcttttactcatctccatgtccatgagctagcttttattattaaccatttcatgcttattttctggattatcgctttcttttaacttatagcattttatctacaaaatcaaaggatttaccttcctacagatttaggcttcacagttgaagccaccgtgtttgcactatgataatttcatcatcagttcataacaatgccttcaacacttcccttgaaatttgtggtaatttaatgtatgcacgccatgacgtagtgtgctgtgactggtgaagataaagattataaagttttgaatttaggacagcattgatgattaaatttttgaggccttggtcaaaatttacctcttcaacgtacaactcaccatcttttaaattaatttagttgatcgtttgccacgtaggtaaaagaaaattattttgaagttgaattaacatgtattgattaagtttcctaacatgtgtaaaacaggggtgtg

SEQ ID NO: 98886 - DNA, 818 bp, Vitis vinifera
  Intron number 1 from transcript GSVIVT01026406001 (locus G SVIVG01026406001) derived from phytozome v7.0 (chr-ID chr4 ; pos 15712889 to 15713706 reverse strand)
cagtgctttgtacgtataattgacctagctagtttgttaaaagcattaatatatacacatttttactctcctgactgataaattcttgttggtttcaatcaagctcaattacatggttcttaatattcacctagcttttgttataattaattattttctgtttcgatcaaactcaattacatggttcttaatattgacttagcttttgttataatcctcgccttcgaagaattacttgaaaattagtaactctctgaattttttgttcccatttagagcccgtttgatagtgattttaggaagcgcttttaatatttttattacttaaaaatttttatcattcaagtattaaaaatgctagaaacacttcctagaatcactcccaaacgcatttttagtttgtgctgcaaaaccccaatgcctaaactcaatgaaaaatgtgggaatgaacataggataattatttgatccattgaccctccttcaggccttggtttgcagtggaattatccagcaaaaacacatgggtttccttcctctaattcatgagattctatgaatctggaaattgtgaaaatagtttacattttaacgttcaatagtttgtagccttcaaattccaaggctgtttgggataacatttgatttatacagtcagcagagaagtaagttgtgaaactgaattttatatttgaaattatacttcaaaaatgttttcattccatcctttagtaaattgcattatcagtatattccaatagatgattaaaagcattttaaaattcattttgtttcttgtccagaggccaggaacagaa

SEQ ID NO: 98887 - DNA, 944 bp, Vitis vinifera
  Intron number 1 from transcript GSVIVT01020776001 (locus G SVIVG01020776001) derived from phytozome v7.0 (chr-ID chr1 2; pos 2120178 to 2121121)
aagtgcgttcttcaaatcatgttcccatgagtctccttccttacctaacccaacatgaaaactatccatccattctcattgtacataatatggggaaaagaaagaagacaaacttttcagatataatattcgtcaaaccaataccttagatctaagaaagagagaaggaaagaagagtagagactgaccactgtggtggaagggcggtgcgcgggtaccgagagcggagctccgctgcttgctatgtggctacaatggttgtgtgggaaatgagagagggatatagagtttcttcctctcatatatgagtaccactcttcactatatttttataaaattacaatatgacccctaatttttttcaaaatttctaaacctgcatcaaactagtaaggctgcgtcggttgagtccaacccgaaccgaaaaatccaagctctcagcccaatcaaaggtgggttgggcttggattgaggcttcaccaacctagctcagctaaagattgaacttaagtatatatatatttattaattgtatcattataacttctatcacatacaacacgagaattaaaaacttgaagtcaatgaggtattatatgaagtgaaaaatggatcaacacttgtaataatgataaatttataagaaaccctagtttaaattgacaatcatctaaaacaaattgttgattttgttttcctttaatttttccttgatttttttttgtagttaaccaaacaaaagaaaataaattcttttttttttcccttgaattttccatggataaccaaataagtgaaaaaatttatattcatttccttagctttttatttccttccatttttcctcccaattttctttctctcacattttctgggaaccaaacatagcgtgaaggtacgacaatgaacttcacgggagaagcttggtgggaggttgcattaaa

SEQ ID NO: 98888 - DNA, 692 bp, Vitis vinifera
  Intron number 1 from transcript GSVIVT01023788001 (locus G SVIVG01023788001) derived from phytozome v7.0 (chr-ID chr3 ; pos 3461886 to 3462577)
aagatctttgagggcactcgttcgatttcttcaaggtttgtattgttcctaatttattcggttgtttctttggattttttttttctctgatcgatcatttggttttgaagatttaaagatattgtgatggttggtgtgcatctattttcattttctcgaagacccatttttttttttttttttacctttgtttggttgatgagaaaattgaagaaaattgtgtcatgatgttgtgttgtttttggatgcttgaaataggattttggttttccttttttttttttttttcccatcaaacaactgacgatgcgaaatttcaatgtcattttcttttcctcggttttcttgagaaccaaaaacagaaccaagattgatctctgtctttgattcaactgctttgaatgattaatccctctggtttcagatcccttgttggagaaatcataatcccatttatcaaagaaactccagcatcagtacaaccccatcacttttccttcatcttgaccgaatctgtggtatcttctatttaacttctctgtttcactattcaaatctatgtttctccatatgagatttttcgttttaccaatttgaattttctcattttttatttcaaattcgataaacgttctaagaaactgacgatttcagattaatttccaggtgggtattcacaaatatctgtgaag

SEQ ID NO: 98889 - DNA, 669 bp, Vitis vinifera
  Intron number 1 from transcript GSVIVT01024713001 (locus G SVIVG01024713001) derived from phytozome v7.0 (chr-ID chr6 ; pos 7530821 to 7531489 reverse strand)
gccaaaagggtccgagttctagagctctctcgcaggcaatcccttcatttctctctctctctccctctatttcttgaacacccatttgtgatttcttcttcattttcattctactattcctttggtcattttgcatctcaatttatattgggtggaaattgacacatggtcagatacattttgtttgttttcttagattttttttcttatctgctttgagtagggagacacaagtgttgtgatcttcatatgatgatggtcataggactattattaatgttttcttgtaacctttctctgccatggcccatgggtcctgggcctcctggccacatactcagagtctcattaatgtgggaccaatttacattttttttccctgaaaaatgtcaaacgggaactgtcattagctcaaatgtgacctggaaaatgtcaaacgggaattgtttccatccatgctgtatcacaaaaagtagtgattttatgctatttgtaaatggaccgacatgaaccttttcttgaaccatattggactctatcagatcattgatcataatcaatagcttaaattgaggagtgtttgatatttaattctgcagttgttttaccattgttatttatgcttctgtgataggttgaagcatcgtggtcctgactggagtgggctat

SEQ ID NO: 98890 - DNA, 561 bp, Vitis vinifera
  Intron number 2 from transcript GSVIVT01023996001 (locus G SVIVG01023996001) derived from phytozome v7.0 (chr-ID chr3 ; pos 1853795 to 1854355 reverse strand)
cagggctgattttgttcggcttgtgaccggtgtgttttcttttgctcttgattctctctctctctctctctctcttttttttttttttttttttgaactcgttgaaattccaatgctgtgatattgcttgaattgtttaaaacttaggattttgagctttattcgaaagcattgtgtatgtatatttgaaattgctcttgaagaagctgatataaaaggttttgaattgagtgttacaataatgttttacagtcattgatccggaaaagttgttatttggacttaatgatttgtttttgattaatcacagcaatgcttgtatcccaatcgtattgagctgccttgagtttttagtctcagttaaatggattaaacagatggggtaaagatttgaactgattcctatgtgatgtgatttagggaataatgagatgcatatagactttgtgttggatattagcaaagtttgggaagaagatattcaaatgtctttttgatgatttaagtttgcattagatttttagaaggccatttttaaaaaaaatttatgtgttgcagggc

SEQ ID NO: 98891 - DNA, 790 bp, Vitis vinifera
  Intron number 1 from transcript GSVIVT01027570001 (locus G SVIVG01027570001) derived from phytozome v7.0 (chr-ID chr1 5; pos 15474799 to 15475588 reverse strand)
acacgaaccaacaccataattctcgcaatagggtaagattttctttttcttttttttctttttgccttctattgctttcagttttacgtttaacgttacttttgacttccataagaatccataaccatttgtcattagtggaacacctggtttagaaaaaaaaatttgtaatttatatggaaacaaacaagaaacttgtgataagaaaaatcagctagaaatttagatgaagtcattgttttgttgttgttgttgtcaaatgatagaatgtaatcttcattaatgacacaaaggttttggaaactttaggtaataattaaaggaaccttgcagatatttgtgggaaaaatgtttcgggtggctttttctggaggttccataaggttttcccctaaaatttcaaaatgtttattcccagtttccaaggaatatgtttcctttgtaaatttgagtttccaggaaactatggaatccacaaattaatttcactttcaaagaaattaaagttcaaatttgggtcgaagtctgaattctttcttatcctataattatgcttgaatactttcactaaacctctggggaggttaatggaattttcctagaacttttcaaccactactcataaggtatgccccatcattaacctgagtgataagctggataaaattgtgaactcctttttgaatgttcccttgcttgaagttccctgaactgtatcaatcgagttttttttctaatatggtcccttgcgtttcttcaggatttcagatcagacaccagaggacagcgg

SEQ ID NO: 98892 - DNA, 642 bp, Vitis vinifera
  Intron number 3 from transcript GSVIVT01029452001 (locus G SVIVG01029452001) derived from phytozome v7.0 (chr-ID chr9 ; pos 22705209 to 22705850)
agggcaattttcagaacaatcactcctccttcgaggtctgtggttgtcgacatgcattcccctgttaattttgtgtttcagtagtctaatttacaaaattgaaggaaacatgtttgggatgaaatgactttttctatttgtaccttcttcttcatcttttttcttttgtacttccttcacctggaagcttcacacaatttttgaagccagttagtctgttcttttattttattgtctcttttttattttttgttttttgtttttatctttatagaattttagcttcaattatacagcactaaaacacacagacagagttgtgttggtagttattgataaggcatagttattacataggcctgaaaagcaatatcttaagctttaataaataggggaaaagggttttggtttttatttatgaggcttatttatatctgaattccatctaatttctcattgtctgtgatccaagcatttgacctaactcagtggcagaagacttgcaattaagtagttcaaaaatgatttcaaacttcctttgccatattcactagtcatatgctcccatccttaggtttttgggtttaattatttctttgaacttcaggtgagcaatattggtgaagaagctgagagactcgg

SEQ ID NO: 98893 - DNA, 571 bp, Vitis vinifera
  Intron number 1 from transcript GSVIVT01022876001 (locus G SVIVG01022876001) derived from phytozome v7.0 (chr-ID chr1 2; pos 18496567 to 18497137)
ggtattcatcattgaaatgaaaagtatacccctttggacctaaaatcacaatccaccatttaaaaaaggtacaatatttaataaagacaagacttaacctccattttttttctctggaaaaatagcttctagaaaaacttctcaccaatttttcattcttgttttaatgggtattcattggcaagaagaaaagcacacccctgtgcacctaaaaaaaatgtgtttgtttccttgggaaatgaaaaagaaaaaaaaaatccacgctgacagaacaaaatgagagtttttagtggatggatagctatagtcaataataattttttagtggatggatagccataatcaataataattaattttacacatatgggtatattaaattaagagtttttgacttatcacaactcaatctaatagggttttagtggatggatagccatattcaataattttacacatatgggcagtcatatgagttttttttttttttccactattttgactatctctttttctatttttctatttgtttttggatatacagagtggattggacaacaaaaattggagc

SEQ ID NO: 98894 - DNA, 373 bp, Vitis vinifera
  Intron number 2 from transcript GSVIVT01029410001 (locus G SVIVG01029410001) derived from phytozome v7.0 (chr-ID chr1 7; pos 16741726 to 16742098)
gaagctggtgttttgattctccacgatccgaatatgtaagtttgggatttcggttatctagttctctccctgattgtgtggttttccggaaagttgcttggaggaaaggaaaagaaaagaaaagaaaattctattttctctattttgacgtaccttttggatttatttttttctggtgttttcctctgttttctcagcaaccaaacgaagcattagggcttgttaaaagagaaaagaaatgaagaaattgtttattttgaatcttggggttgccatgttgtaagtttcttctcgtttgtgtggtttttgctgacaataattaaattttttttatgcagtggagataattggtattggaattcagagctctgcc

SEQ ID NO: 98895 - DNA, 783 bp, Vitis vinifera
  Intron number 1 from transcript GSVIVT01024830001 (locus G SVIVG01024830001) derived from phytozome v7.0 (chr-ID chr6 ; pos 6572755 to 6573537)
cttgccaattctatcagattcaccttgaatcaagagttagtggtctttcatcccacctctatttttattttgactgtgattcatgtttgaggaatttaggtaaatgcataagtgtcaacattgtacttcaactttgactttgtgcttgacaaattgtgcatggctaccagtattatatatcaaaatgctctgtataatccacagtccagtctgcatgtcttttagagggaagaaagaaaaggatgaattgaactttttttccagaactccaattccttgaaagatggtgtattcaatcctgcttttgtttccatgtatcatcatttgtatgtcattgacaagctttgattttatctttaactgagttaccctcttcaattctttaagttttgtttataatttcatggattgctacactatgaaataaatcatataaatgtgttagatgggttatcacagtaagctcctacttttggttatgaaaatggaccccacgttcttggatcatttaaccaattagaaaaggcaaacaaaataattagactcattaataaatttaatagaaattttaagatgatttgaagttaatttctctattgaaaaaaattataaaaatataattatatgcagaaaagaaataatgttccttttagctcaaaaagaaatctttatgtttcagatttgctcatgtttctgaagaagcatttattcaattaccatctaagtggattgtaaccttgtcttgcagtccaagggtagcgttctgtgggtacagcatccctc

SEQ ID NO: 98896 - DNA, 362 bp, Vitis vinifera
  Intron number 1 from transcript GSVIVT01030118001 (locus G SVIVG01030118001) derived from phytozome v7.0 (chr-ID chr1 2; pos 10006029 to 10006390)
ttttcaacctcactcctgaccagactccggtaccacggactgcaaccatttcatactatagagaagtgcttttgttttgcttttgtggttgtttaatttgatgggatatggttttcttcttgttgttgttgtgcttattcattaatttggaaaatcctcatgaccactagggctagaaacccatttcaaattctagtcatagttctatggtaccagttattttatatgggacacattgaggtacaattgatcgaggaaatgaatatacctgctccatatgttctttttcgtttttcttccccacaatttgatcactctaagaagactgtaacacactgttttgtgcctctgtcagtcaaggg

SEQ ID NO: 98897 - DNA, 866 bp, Vitis vinifera
  Intron number 2 from transcript GSVIVT01022591001 (locus G SVIVG01022591001) derived from phytozome v7.0 (chr-ID chr8 ; pos 5623220 to 5624085)
catcggatatccgacagccgaatctggaggtagtttttttcttaatgctgtgcttggtagccgagaaaataatttaaaatgaaagaaattaaagctttccttagctgaactcaatgtgaggatttggacttgttcatcagttgctctcattttaaacaggataatgggagaagacaacgacatagtaaaataggatttgtacataattttattttattttctgtccttttgcataatcttctcatcgaacggtaactgatataatatatcttgaagtaggcaatgggatacgcgaatatgaggattttaaacttcagttgagactggtcttctgagtcttaaattttcattaatttgtatttcttcatacttcttggattaacctaaggcaaaaactatggattcttaaatgaatttttcacttgttcttggaaaataaaacaatatataacagtaacattcggaactcggtttactgttcttttctttaatttctccctacccaaaaagagggtagcagatatttaatatattggaaaataaacaatgtgatgtaggagcacaagaacttaaagttcacttggagctgattttcttgtattccaagttgttaaaagccttttcactcttgcattgattgattttccttgtgttggtttgactatgtagttaactacactgagaaaagagggtctatgctggttgtgcactttgaactattgaatatttggcattattgtgcatgttagtaatattagtagtagcattgtgaaaaattttccttttgagttattggctatctgttgttgaagacatttttatttcaactaggttgcaaaagagcagctgaaagaggttattaccca

SEQ ID NO: 98898 - DNA, 379 bp, Vitis vinifera
  Intron number 2 from transcript GSVIVT01024070001 (locus G SVIVG01024070001) derived from phytozome v7.0 (chr-ID chr3 ; pos 1366923 to 1367301)
ccccgaggttggtgcacaagaggtggacaagctaggcgtcgtgagcttgcatatttcctttctttctttatttctttccatatcttggtttcactattttctccttttaaatttgtttctactctaaagtagattctaaagaatttcgacaaaactattattgatcttgttcaaaagaaagtttgctaaatttcgatcagaagttggagttaacgatcgatttgaaaggattagaggcgcaagaacccttcttgagtgatttaggccagaagttgaagtaataattcaaaaaaatttcaaagaaaagaaaaaaaaaagaatgcctcagattcttagccaatatttactctgtgactactgaattacgtgcagaatccat

SEQ ID NO: 98899 - DNA, 774 bp, Vitis vinifera
  Intron number 1 from transcript GSVIVT01027578001 (locus G SVIVG01027578001) derived from phytozome v7.0 (chr-ID chr1 5; pos 15403172 to 15403945 reverse strand)
gaagagtggtcttagcttcaagaagagttcatccggttagcagtttttcttcaatttcaagcttacccactttgattcttgagctaaaatgaatgtgaaaagtgttgaatcaaaccaagttttcttcccgttcatggtttgcgagaaatgccatcttgctgagatttttctttgattttcaagcctacccgctttggttcttgggctaaagtgaaagcaatgttgctgagaattatggaaacataatctgtttttcagagttcaaagtcttaatctgggtcatcgttgaaaaatagacccatgtgggaatcggttacaagaaatgttatcttgctaatcatctggtaatgacccatatggtgatttacattagagtggatttacaagaagtgccaccttgctgattattactgggtcattacccagttttaaagattaatcattcaacatcttcactaccgatcatttgtgaagcttcttgttctgattgataaatgatgggttataaaagaattttcttttccttttcttgtctatgttcttttttatacccattttcattcctgagcaaaagaaacatcattttgatgacaagaaattgattctctgggttaggatggattgtttgttcttttcttttttgtttcaaaagcagaaaacatgttatcttgatcagaattgttgacactgagtgtgttctatccctaattcagtgattttaacttttgattctgtgtaggttctttcaaaggagagtcccaagagaagaggcca

SEQ ID NO: 98900 - DNA, 298 bp, Vitis vinifera
  Intron number 3 from transcript GSVIVT01022126001 (locus G SVIVG01022126001) derived from phytozome v7.0 (chr-ID chr7 ; pos 16780684 to 16780981)
aaggtgaggttcttttgcccccttttttttctttttttaattttgagtatggaattcatgaggaagaaaacagaagaattagaattcaagcgttgtattttaatctatgtgacaaatcaaggaatatgaaaacagttaaaatagttttattggttactgcattttatgtcatgtggatagtttaaaatttgagagaaacttttgggattttttttattttttatttttaacataaggcttttgtttttctttcaatgatgtaggagcgatccactggccgatctcgtggttttggata

SEQ ID NO: 98901 - DNA, 821 bp, Vitis vinifera
  Intron number 1 from transcript GSVIVT01026184001 (locus G SVIVG01026184001) derived from phytozome v7.0 (chr-ID chr1 0; pos 13542922 to 13543742 reverse strand)
ccgacctcgccctcgcccgcaccttgcaggagcaggtacgtcatctgtttgtgtgaaggtttagattttgattttctggggtttgggtgggaatttgggttgaatcgttttgtttgaatctggatggggattgtgggtggttttgtggtttcttgatttggaattgggtgttcgttttgttgttgattgtttcttttttgtttgttggagatttgtgtgtgttgttggttgtttggttgccgggaaaatgcaggaaaaataaaggaaacttggaatcttgaatctttggtttagtttggacttgaaaaaactgaattatgtgatccggactagcctgctgatgagaatgtttcttccggcagcttttgtttaaaatgaggaatttggctatgaaaatttcagttttggtctaattttgcgtaagaattttgagctactgaatatatagaagtgaaaaaaattgggccaaaaaattgtttaagtatgtaatttggaagccccaagtgctgagggtattctccactcagtgtttaggtagttttcccgacttgcaagttttgctttttctaagcatttattttcatctccatcacttgtgcagttctcttctttttctgcaaagttttaaacataatattcaaatcttacttttcttttagtttcctcagttcaatctcaaattgaaatgttctcatcagggaattgagtttgaaaacttgggttttatgctacaattgattacttgttttttgaatgtttaatcttcattccctattttattaattgttgttgggtggtttgtggagtaggaaagagcatat

SEQ ID NO: 98902 - DNA, 1029 bp, Vitis vinifera
  Intron number 2 from transcript GSVIVT01024683001 (locus G SVIVG01024683001) derived from phytozome v7.0 (chr-ID chr6 ; pos 7776005 to 7777033 reverse strand)
ggagtcgagtgctcggacggaaaagttgttatcttgtgagtagttctttggtgaaattgttattcgttattgatactgcgattttgcttggcaaagtttcttgacatttcacctttgtttgactctcgggaaagtcgacacaaaaaaggaaaatgcttaagaaattaatcaaatttttaggcattttcaagttgttttttatcgatcaaaggtcagaggcatggacctggacgaatcaatgctatgatttctgatgtaattttttttttctctcccatttcttaattgttgccataaaaacattcagaatcgtgcaactctgaattccaatgggattcagaaaacatcatattttatatgctgttagaatcactttgtcaatccctttatgggtagagtatgagaagttgcaatgctcccaaactacatatacttccctcaggaacttattgataaagcatatgtaagtaaaagggacattgttcaatgctttacatggccataatattgtctttgggtcaaagaattttaagattcaaattaatatcgtttttagggtagcgactaggggcagatctgtgaatgtttcaggtttgcttgagtttcatgttgtacctgaaaaattaacactaccgggaggaaggaaactgtccaaactcagatgatgtgaagtccttttggaagtaataaaatgaaaaatattcaatgctgcacgcataaagatcatgttgtaaatggttagaaataatctagacatgaatggaggaatcttttcattttctaatgctgttttttggtttgttgcatatcaaaggtattgtcctcatttggatgcctttgagttttcttttcatcctttttaaagtcggtgttgatggagtaggtcttcgaactttttatgttgttttatggtttatcacagatcaagggtgcctttcttaattttatttttcattttcattttaccctaaagttctacatatattttttacttgtaggaatttgagagatctttgtctcgtaggaaca

SEQ ID NO: 98903 - DNA, 997 bp, Vitis vinifera
  Intron number 2 from transcript GSVIVT01021523001 (locus G SVIVG01021523001) derived from phytozome v7.0 (chr-ID chr1 0; pos 6602704 to 6603700)
gaatttgacaactttgttctggtcagtaattaccgatctgtgttggatgacctttgttttaagcaaaagttataattgatataaagtaaattttttgcattgataattattgtattggatgtttcataatctaacatttcaaaacttggaagaagctttgtgttgcacaccttttatttgatagttgtaatttttttaaatagactgtgttatattagtttataaaagaatatcaaaagaagggaagtaggaaaatttaaattatagtgtgaagtaaaatttgagagattaagctgaacggtagagtaccttagcttgcataaagttatctcatcttttggttatcatttttttcttttacttctcaactgatatgttataagaatgatatgtgtttaatccaaaaactggaggagttaccatttaacatggttcttgaccatgaagctgtccgagttttaaaacattgaatgatgcttttcccttaatgttggcatttacaccatcagacaactgaggttagataatcgttgtagttacttttcactgatgtgagtatagatcagagggatgctctatggttggtggtgtttaccgtaaaagaatataaaagatttctggcctaaaattcgtgctttttgagaaaatatgatacccttttgctgaaacccccattttatagctcttttggttaggtttcaagtttcttgatggcaattaatgtccaccattatttcaggagaactgatatgttccttttggaccttaggcttatatatgttatgtcaggactactaatatccatgtgcagtggtgtaaaatggattacacgtgtgcagaacttaatgccttcttgtttgcttctttatgattttagtctatgaagtttgactttctgtcttacatgaattcttttttagtactcttcatgcattttgaccattctgttttcttgtgtttagatagctggtgattcggaagcagtgaagaaggcact

SEQ ID NO: 98904 - DNA, 753 bp, Vitis vinifera
  Intron number 1 from transcript GSVIVT01022988001 (locus G SVIVG01022988001) derived from phytozome v7.0 (chr-ID chr1 2; pos 17284168 to 17284920)
ggattcacgagataggtaattcttctaactggatttctcttgttttctatctgggtgttgcttttttttgtcgtctttttctttttctaagctcgatctatttaaatttctttctgggaattgaagtatgtattaatccaacttttcctgttggtttatcaaagagaaaaatgataaggcgaggatgaggtttggtgctccttcatctcaaaaatcacaagaagaatagggttgtttttctcttgtgattgaacacttcttcaaaccccattggatcagtgctttttcaacctttccgaaggcccactgggatacccgatccggcccattaattaattggatcaccatatatgttttttcagcttcgaaaatcattccttgtggcgtcaaaatgtatccaatagcttttctagtgtttctaacccaagttctaagatgttctttatgcagactgctcagtgtgtcagactgaacaatagtatctaggattatataatttcacaatacattattcctaacttcatgtctcttcttttattggataccatgtgttcccatcctaacaacatgataatggggttaacagtttgatcaatcgtagcttcatcttgttgaatcatgccttcttttctttcagtcgcaacaaagaacaaatctaagcactagtactgctatatttatctatttttctttgtccctttatgactttaaaaagatgaccatatgcttgttttcaatttgaatttcacagac

SEQ ID NO: 98905 - DNA, 320 bp, Vitis vinifera
  Intron number 3 from transcript GSVIVT01027318001 (locus G SVIVG01027318001) derived from phytozome v7.0 (chr-ID chr1 3; pos 16683253 to 16683572 reverse strand)
gaggtgaaatttatcatttatttcttttattcttcatcattatcaccatctttgtaataaatgtacaggtgctgtacatttttatctactactccaatccttaatcaaatgttcatttctcaaatacacaaaagttaaacatttaaataagaaaaatagtattttctcaaatgtataaaagtcaaacatctaaaccaggaaaattgtcttttgggttgaatcacatcttcaattaaggtgtgaattcatatttgttgtttcctaatatgtttcttaaatacataggacattggagctttggtgaaagtttttacaggaaa

SEQ ID NO: 98906 - DNA, 758 bp, Vitis vinifera
  Intron number 1 from transcript GSVIVT01027510001 (locus G SVIVG01027510001) derived from phytozome v7.0 (chr-ID chr1 5; pos 16098508 to 16099265)
cttacagggtatggtgttggaatcctttgcaatttggatttttcttttgagtgtatttggttgctgaggaaatcccgctgaaatgaacgatttcataatttcctttttctttccttttcttttgttttttcccctgtgcgtgtagagcatggtatttgaattgtttatgatttggattttcgttttcgtttgttttgttgctgaggaaccatgggacgtgaaagaaattgggatttccaattgtaaaataaattaatccttacagaaaatttttaactcacatttatcaaacagcgaaaaaaaatctaaactgatggttttgagttttggtgtgggatgtttggtcgctgctaaaatgtggtgaaggagaagaaattagaaagttttatatcagagacatattttaggtgtatatgctatgatttagaatagttgaagttgccatcaaaatttttgaactctgtacaatataaagtaagacacatggggttcctcaatgtcttttcctttatgtaatagtatagagtatttgattatgcttgtgtttattgtgtcaacaatcatggccttgaatatatttatgttagttctttttaatgtatatggttgtagttagtgatatacataagggttttggtaggttataggggtaacgtacctttgtgcgaatggctgaagtacccattctgaatttcataatttgcctccttatggtgtgatcctttctgcagacaaatttaatcaaagaaagcataaga

SEQ ID NO: 98907 - DNA, 280 bp, Vitis vinifera
  Intron number 2 from transcript GSVIVT01026279001 (locus G SVIVG01026279001) derived from phytozome v7.0 (chr-ID chr1 0; pos 15411425 to 15411704)
cttccattcttagtggtttatttgcttgcaaagtatgctttgaactttcctttttattggttccattttaaatttgggatgttttacctgattagggtcttgtttgttcattttactgtctatgaattatgaaattgtatatttttatcatttgtttagcaaaattagttcttatagattggacagtggacttcactatgtcttgtctgggttgcttgttgcttcttggtcttcctcacctcccttcttttgacccattttcattcacactctcaggtct

SEQ ID NO: 98908 - DNA, 818 bp, Vitis vinifera
  Intron number 2 from transcript GSVIVT01020075001 (locus G SVIVG01020075001) derived from phytozome v7.0 (chr-ID chr1 ; pos 10688635 to 10689452 reverse strand)
ggctttcgagtcgctgtttgattcagataacagaggtctgtatcccattttgcatcttagatactcttcaaactaataatgactctgtttcttcgatgttttatgatgattcaagcttagttgttgatccttttgatgtgattatattcatcatgtggcatcatatcattcttctctttgctatattgattgcagttcttaattgcctgtctctttgatggaaattctttccatagttagttcactctatttctgtggttgttagatattgccaaatgcttctaatggattttggttgataattttctaactttgaggcttgaattttgtttcagcttactttttatttttaatctctcatgattgtgtaattgaattttgccttctttctaggttctaggttgggctagcttatatacctcaattcaaccaaggttttgttgtgtcatttgcctcatgattgggtactcaaaacctgtttctttacttgattgactgtttgtgtttcatcattgattgtgtgtgtgttttttttcattttttaaacactgtttggtcatttaaatttatgtttagcaatctatatattgcatcggtcttgtttattttctattttttttacttatgcaattcatttttaccatgttgcttgtttaactgtcgttttgcagttcttaatgctgacatctgcatttccagtctacttaattgttgctttagttttctagttttgctttattccgattttcatttgtatagcttatcattttggttttagttgggttcttatgcattgcctttgtcttttatggtagacg

SEQ ID NO: 98909 - DNA, 285 bp, Vitis vinifera
  Intron number 2 from transcript GSVIVT01021228001 (locus G SVIVG01021228001) derived from phytozome v7.0 (chr-ID chr1 0; pos 2776420 to 2776704)
acagtaaagtgcaaacactgtaagtccctcttctgtttctcaataatttttggtcaaatatccattccaaaagttttcttaaataggaattaccaaattatcgtgtttggtgttcatatggtgggaaaaatggtttgaattcttttctttctttctttctttctttcttttttttcgttaagattcattaggtaaagtgaactgagcttgatattggaaaattgtgtagcacacgaattgaaggttctgatgtatacctgtttacttctacttgtagggatttga

SEQ ID NO: 98910 - DNA, 775 bp, Vitis vinifera
  Intron number 1 from transcript GSVIVT01026415001 (locus G SVIVG01026415001) derived from phytozome v7.0 (chr-ID chr4 ; pos 23795544 to 23796318 reverse strand)
cctctcctcaccaaaggtctctctttttattttttatttcctaatgttttcttcatagtttcttattttcttctcaactattattttttcttcaattttcttttcatgttcttagaattagaatcacccttttgctttttgcattctgcatttttttttctcttggttgtttagcacaagagatctaaccggaaatcagaggagagtccgctaaacagggtcaagttggttcaagaagaaaaattattaaattgaagaaacctgtgcaaaaattccctgcttttaagaagaaacaataatttcaaactcctttcagttgtcttcttcctctgttttttttttctcagtaatttttccatgataaatcagtgtttgattcaaaccatattctcttaatataacacttaaaaggcaaagagtaaactgctcaccttccaatcccatgagatgggaaagggattgttggtttgggaagaaattgaaccctctttggaaactgttatttcagaacataaaactggtttttttgagaatttgatctgaaaacatgttttttaagaacaaattttaagtcttcaattgctttttttaaatagtgtcgtgagcaatctcaaacagaatttagttgctaaaaataatacacaaatgttttcaaaaaccttccaaaaggactctaatatccattaattaattcagtagttccatgaagtgaactctttttgagttttaattaccaccagggagacaataaagatctacgccaaagcagtgcagg

SEQ ID NO: 98911 - DNA, 1061 bp, Vitis vinifera
  Intron number 1 from transcript GSVIVT01025665001 (locus G SVIVG01025665001) derived from phytozome v7.0 (chr-ID chr8 ; pos 13099298 to 13100358)
aggctagtttgtaacttcccgtgtggaggttttcaatcacattggatgaatccttctctacccaaagaaagaaagtttccttttaactaatcttaaaaatatgtatattttattatttttttatttttatttttatgaagtattctaattaataataaaaaatatataaaaaaaatgatataaaaaacgaaatttcatatttaatgactctcctaagactaagagggtcattaaatgatatctttttttttaagtgaagctagaacaacttagccatgcctttacaaatgattcattaaatcctataaatcattaaaaccctctatggatgtctttaggtggcatgttaatatcatcattataataaactttatcctttagatgaatgccccatcatcaaacccctgatttcttgtactgagaaaaggatatgagccagcaaaatgattaaaattaattatgataaatgtgttaatatcatcattattttttatatcataaagtctactccatgatgagaaaattcaattgaaaaaaaaaaaaaaacacgcctgaaaaaagaaaaaaaaaatacagcacatgcaaggtgggagagacccagcctcaccatgctattactttgatggctgcttttagtacaattaattaaagggatgtgtgcccattgtccctaactgttgaataacacaacctgctgcttttcctgcttttcgaagcaaactagtagatatatcagcaccccacccgtgtcttcctcgaccttttacaacgagagatgggatactgaggttctcttgccaacttcaaatgcatcctttcaccaaacttcgtgcccacttcccatctcacccccctcaataaaagcccccactccccttcatactcatccaaaccaactcttctcctctactttctaagagcaacaagatagccttgagaaaatgatgaagcagctctcttcttttctgcttctgctggctttgttgcatctctgcaccagaacttctggccagtcaaacccttcaggtgcctctgacgtcacttcagttctccgaaagtct

SEQ ID NO: 98912 - DNA, 1049 bp, Vitis vinifera
  Intron number 4 from transcript GSVIVT01029727001 (locus G SVIVG01029727001) derived from phytozome v7.0 (chr-ID chr1 2; pos 13791164 to 13792212 reverse strand)
ctgcccttgcagaaaagtacatctcttctcaatatgtaagtatattcaacatatttatgttcataagcattaaaatgtgttcaaaattgatgtatctagctaatatcttcattccttttccccccattatgctaagtgtagggactaggactatgaattctgttgaatggcaagtttcatttctaaaatattttatgtgaaacaataaagatctatatattgtaggccccaaaaatcatttagtacttctcccaatgtgcactaagaactagtctagctgctgatatgtggtgatactaaaataagaatcaggatccaactagctgctgaaatatattgtttgtattgtgatgtggaagcaactttggagaagaagaaaaaaaaatctctgcttgaataatatgtggtatcttattttatgtctttgaaattaaactatgaaggtgaaacatttaaagctacttctttcaataagaaggtggtacctgctttttcagcagttacaaatctattagaaaatttcttttcctgaagttcctaggacagaattttagtcctgacatctattcttttgtttgatttgttttttccccctctcaagagtatgagcgttcatttctcgtccagtgtgtaaggtagcattatgtaggtttaggtgtcatgtttgctagtttctaagaatcatggtgcattgacagatagttatcaggggtcatgatgtcggcaacaaatcaaagaacaagcccagaagcatagtacagtgccatttatttcatgtaaaatctttcttgatatttgtgttacaccataatattttatgcatatgaggaaaaatggagaaacatacatgaggattctggattgagattagtgtagtgtgaaacaaattacttctttcagttcagtttgaccaatcttatataattccactggctaaattaagattttccaaaatctaaatttaagactgaccacaattttggctatcagttggtggagtatatacttaacatttccattatgttatgcctgcagtgacttgtcataca

SEQ ID NO: 98913 - DNA, 672 bp, Vitis vinifera
  Intron number 1 from transcript GSVIVT01022203001 (locus G SVIVG01022203001) derived from phytozome v7.0 (chr-ID chr7 ; pos 17424992 to 17425663)
ggcgacggcggcattggaccggtacttctagaaacgtgggtgatcctctaaattttagttgtttttctgctctgaatctattgattttagttgtatgtgtttttttgggcggcggatgtatttttttctttacagtttttgaattagggttttgtttgaggttctgtctgctccagagaaaactgagggaaagagaagaaaatgagacattgcattttgttctttatgttgttttaggcttgaaccctagcctctatttgtcgagaagaaggagatctctcattttccgagggaagtttgtgagccgtactctgtggggattctctttttattgatgttcaaagcttctattttgacaaaaaaatcttgtgaatcattcacctgaaccgtgaagaagctctccaaaccgtgaagttgaattttcgaatttctttttcaactttcagcaaaatgttttctgaaattattttgttcaatttttgcatagaaattgctgtttcttgaggtttctatatattttttctgaaattcttccacagtatacatttatttcttttgagatctaacaatttgatagattaaactgatatttcttttggcatcaatgtgaatctctttcacacttttaaatgtgtatgttgcttcaggtgttaagctaaggctcatcagtgg

SEQ ID NO: 98914 - DNA, 757 bp, Vitis vinifera
  Intron number 3 from transcript GSVIVT01020699001 (locus G SVIVG01020699001) derived from phytozome v7.0 (chr-ID chr1 2; pos 3020912 to 3021668 reverse strand)
agggctcatcaaagattggcctctctttatctcaggtacttttggaaaattacaagtgaattttctgttatatttcttagttagtttttttttttctttgtattggttatttgttcatgtttgttttaggaaagtggtgattttttcttagattaatgtgattggggtttgttgtaatgatcagcattgtgtttttctgtctttctcgttggtgttgatgggtggaatggatccattttatcttggatgactgtctttgtctgaatgaattttgtttatgctatggctgttgttcatttctgttctatgcttttgttgctttgattggtgatagaatcttagatctcgggtttagttgtttgtttatgggaacaagttgacattggtggatctcttggaggttagttgtcctggtgggtgataaagtagttagccctgtgaaaggattcttttgcttatttatgggatttgagttgtttaggttcatgggttttttatttattctgtttgtttgattaggtattcttggtctaatcttcattaccagtgttgctttctcggattcaattggaatcacagttgcagggtgtatggccttcatgggttattgattcaaagttagaatctttattaacagttagaagcatttagttttcttcctttatagtagtaactgctcacagcaatcatttcaagtggctgtccattgatgtcaatttaacctatgttttctttcccaggttagggcaggttgaaa

SEQ ID NO: 98915 - DNA, 926 bp, Vitis vinifera
  Intron number 1 from transcript GSVIVT01023188001 (locus G SVIVG01023188001) derived from phytozome v7.0 (chr-ID chr1 2; pos 21387094 to 21388019 reverse strand)
aaacccacatcccattgtacaaccctcttatttaagttattgaaatattaaaataataaagataaaggtgaattacgatgattttgcttcaaatttttatttgatattcgatttttattatttaatattatttttaaattttaattaattataataattttaaaattaaaatgtgttatatatatatatataaatttacaacaaattttttatttaatattgtttagtattttttattagtggttactaagattaattaaaattagtttatttaataaaaaatttagtttcaaaaatatttttattctatatttacatcttctattatttgatgttacaattatttgataattttatttaataatattttttaataaaaaattaaataaaattatttttatttcatattagatttttatgttaattcattaatattatttattaaacttaattaatattttgaaaataattaggagttcagtatctaataaaataatatttttttattggtttgaattctaacgtaactttaaagctaaaacacccggctataaaataggtctaaataaataattttgttatttaattataaattatattgttccaaattcttttataattttttttataaaaaagcttatttctttaaaataaattattttttttatagtttttattaaataaattttaaaaattaatttagtattaagttattaactttattaaataactgttcactgccttggagtaaacctagctatattatataatttggaccctctctagagtacaggacgaaggcgtccggggttgaattcgaaggaaccaaatgtgccttcaaagacctaccagtctttcagtttatgcaggtgaaaaatcagctaaaattggtgatggaaattcatagctaccttaccgactgaggg

SEQ ID NO: 98916 - DNA, 1064 bp, Vitis vinifera
  Intron number 3 from transcript GSVIVT01020207001 (locus G SVIVG01020207001) derived from phytozome v7.0 (chr-ID chr1 ; pos 9037286 to 9038349 reverse strand)
taacctgtacaagatctcttcctcactgtctcaatgtaagtggatttattgtaataacttggaatctttgcttgattcggtcttgttttgtgaaacatttgtttgtaatttgtttaagattctcgttgagtatgtgtttttgtgaagttcctgagtccgatgcctagaaatctattggttttcatttgttagggccaaaaacatagcttcagcttctttccacaagattttgcattatgatcaagtcccctttttctttaatgcaaaaatttggctctatgttgttgaactatcttgtccttatttcccatctttttgtgcgtaaatgtagaactcagcttcattattataaggacaatgtaccttttagcttttgctgaggatatcaatttgcttttctgtagtagcagaatccacttcagaactacaatgcaccatttagctaagcttctggaacatccctctcaatgtttataggaaatttaatatacaattctgatgtcgtttttagtccagttgtctcaatgggagagcttctgcaagaatttaaatccaattttgctaggagattataaaaatttcgataatttttgtgtggttataactttctatattatattagttagcttacctattagtattatttgctataagtgagatatggcacaagcctatttcccggaagaccaatgaaaaacctttattgtgttgaaaatacaaaaatatgctggatttattagaaccatttcctctatttagttttactgagtcagattctatctctatacatatagcaaccttgagttatgttgtttatgtaaaacaatttttattcagattgacattcatgtttattgaacatctatttactctgattgtgttttacaataatattctttgatagcactttatctcatattgaagttttctatgctgattaaagttcattctcatgttattgttttggtctcttataatttttttgtgtatatttgtttcttgaaataattctcactggaaatcatgcagataccagaccaaagctggtcactggatccgctgaa

SEQ ID NO: 98917 - DNA, 611 bp, Vitis vinifera
  Intron number 1 from transcript GSVIVT01021618001 (locus G SVIVG01021618001) derived from phytozome v7.0 (chr-ID chr1 0; pos 8217715 to 8218325)
gagagcgggcgagttcggagattgattgcttctaggtatatgcatttgatttttgcccattttggtcgacatttgatgaaaactcggctttctatttttcgttgaggatcaaaggttttttacttgtcatttggattggattattgtaaactaggttttgattggtttaacagatgatttgatttttgagtataaattgatggtagcaagtctctctgtgtaaagaagtttcagttttgtgcttcaggggggattgtagggattaaaagttattaggtatgatttggttggcaattctgaagtacatttattactttttggaagaaaaagttttggtgatttaggctcttaaaagcaagaaacgaactgccacttaatgttataatttgtcaatacattagtgctgctataagaaaagatccgaaatatgaatatagattatggaaaagcatgttttcgaagcaatatttgttcttctataggggccctatttaagcacccctacaaatttttgtgataatgaatggaagttcctttttcttgccccttctaattggatgatttatgttgcttgctgcacgcttttagggttcaaaagccagagactgtcg

SEQ ID NO: 98918 - DNA, 557 bp, Vitis vinifera
  Intron number 3 from transcript GSVIVT01030143001 (locus G SVIVG01030143001) derived from phytozome v7.0 (chr-ID chr1 2; pos 10215847 to 10216403)
caggcagttagctttgttcactggtcctacaggtaaatgtcttgctaattttgaaagttggtctttttttcctcactccatgtagatctttaggttttatagaagatcagggtcttaattaatattttgaaattttgatggacaatctatgaggactgacttttctacttgttcttctaatccatattcatcctttacttttgtatgtttttgtccttttgtcttgaatatatatggtttgttcattggcctctgtcacagtattggttggccctgtacaactccacagtgatgatatggcctgagttgggtgtggttgcttttgtttgttgcattgataaagttgggaatggggttgccttggcccctttcctaattttgtcctaaaagaactcttcatttacaaaatggtaaatgacacatgtatctgacaagtttgcctggaatactggggtcaatttgctcatatcatgtttgcctggaacttcaatcatcattttctttgtggctaacttacaatggtgttgatctgagctttacagttgggggtttgttaa

SEQ ID NO: 98919 - DNA, 741 bp, Vitis vinifera
  Intron number 1 from transcript GSVIVT01025463001 (locus G SVIVG01025463001) derived from phytozome v7.0 (chr-ID chr6 ; pos 659200 to 659940 reverse strand)
atcaaggtttctactccagatcgactgtttcttttttcttatcggcgttttgtgggaaatccatggtttttttgggaagtaggcggttgaatctagtgggttttgagctgaaatggtagggttttggtgggttttgggtttttgatctgatgggtgtgttgcaaattagttcgttttgttgtttgttgcggtttttttggaatagaccctgatctttttcagtaagtggtataaaggcttctggttttctctttgtgatctgatgggtgtgttggagattataatgggttttgttttttttttttctcttacatttttctgaaacgacccatctttcttctttcattaatgggtttttgaatgaagaaatgtggtttttcttcaatgggtttttgttttttgatctgatgaatgtgttgtagacatgtgatgtctttccttatttgcattttctcaaatgacccatgttctttttgttcataattaggcaatcaaatcttgctcgtttgagcttagaggtgattttggttgtttgataaagtaactgagatctggttgtgatccttgttttattggtagccatatatttgagtagatagttcttcctcaaattttgggtttatactcggttcagtcgtctagttggttgaatgctcttatgattatacagatctgatttgttattttttaatgttttggagtacaggtgaggatccagttgggtcagggatcagcaggcga

SEQ ID NO: 98920 - DNA, 850 bp, Vitis vinifera
  Intron number 1 from transcript GSVIVT01024552001 (locus G SVIVG01024552001) derived from phytozome v7.0 (chr-ID chr6 ; pos 8895472 to 8896321)
aaacctgaacaggtttgatgtttatggttctctgattgatttttttttttggctatggtggtttgagtgggttgttgcttgaattaatttcactactatgctaattttggcgttctttttggagttgttgttgtgttgttttgtggccctgtttggttgctgagataattatgaatgagaaggggaaaagtcaacgtttcttttattgttgtttagttggaagaaaaaagagagcttaagttacatcagtcaaaaaatagtcttagaaaacttaagtgagatgattattctgtttttggaggagccgaagcagtggatagtgtaagattcaattatcctttggaaaattatatgattctgattctgtaatatataaagaatgtgacttaagaaaatgtcactgaatatgaccaaggttcaaaaaatgtggcataattaaggaaaaatgtgacttgggcagtgagagagctcaaagaggtatgacaccaccaaaaatttgatactttttgttctcatggtctgctcgttgtcctctccttcagttttctgcctgattctcaacaaccaaccggagtatcattttttgttaattttagtcattgcgttatatttggacttgaaggcaatagttagtttatggttcaatgtttcatttgtgctctaaaacgtattttctgcctgagattcttttggttgaattataatcatttttgtattctgaaattggagaaattggaatattggcatattcatcaaagcgatcatttgaaatattgaatttgaattaatgtttttgttatcttggcatgatgcatttacatacagattgaagaggtccgattgcggctta

SEQ ID NO: 98921 - DNA, 796 bp, Vitis vinifera
  Intron number 1 from transcript GSVIVT01029526001 (locus G SVIVG01029526001) derived from phytozome v7.0 (chr-ID chr9 ; pos 21955725 to 21956520 reverse strand)
ggtgttcatttttctacggttgttctaaggagatatgaacatggagtagacggcaacgctagattttttttggaggagaattgtgcttaagggagtccacttgttcataatgggtcaaacatccttcaaaatcatataattgtcaattgataagaaggatataaactttagagagaccaacgtacccttcaaagttgttatgtcccttaacaccaatactttcaccgatcgttgaattataaaagttatcaattcatggtttattcatcagactgacagtcaaactataatcgaattgatgatgtcataattatataaataatatattattaaaattaaaaatagttacaaaaattaaaataataatttatatattattttaaaatcaaaattttattttaaaatcataaaattatttaaaaaatggaaaattagtttcaaatcataaattttaatcaaaatcataatcttaatttaaaattataaattttaaattttatttttgaatcataaacttattttaaaatcggaaattcatttaacatccttccacagataatattattgataggaaggatataaactatagagatcaaaaagaggcccaaaaattaagctcaaataaccaaaaacaatttggtctgaacttaatctcgtaattatatgccctttgcgtagttttgcttcaattaaccatatctccctagtttcaactctgaattgaaatcaatttaaagcactggattcctgacatcctaaagttcaaaaccatatctggtttgccccaaagaattgg

SEQ ID NO: 98922 - DNA, 694 bp, Vitis vinifera
  Intron number 1 from transcript GSVIVT01024585001 (locus G SVIVG01024585001) derived from phytozome v7.0 (chr-ID chr6 ; pos 8615101 to 8615794 reverse strand)
gttgtattattttgtatttaggccttgatcttaatttatagtatttgatatttgatcttatttatttttgtacaatttaaggctgcatttattcttatattaaaatattatcacataattgtaaaataagatttcatgttataggatttggtggtaactattaataaaagctaaattgtcttttttttttaattataaactcatattttaaaaataaatcttaagaaaaaaaaataaatcaatatttttttatccaataattacattattttatataatttttttttactatttgttaatttaaaataaacctaaaggagcactaaattacatttataatataacaaactaatcagtttttttacacccgcattataccaaactaaactaaccatcgtcagcgttcaccaaattttccttttttattttattttatttttattttttatttttaattcatcatcaatgagaaagcaccaatttgggagatgaatcacagcataactctcccatacctattaaaaaaaaagaaaaaaaaaaggaagaaattaaaaaacatgcgcaaaggaaaagtctaatatccgcaaccaaacttttgacaaatcttcaactgcacccacccactactttgcctttctccctattctgacttcaagaaggtcgttccccaccgcgtctctccgcccgccggaga

SEQ ID NO: 98923 - DNA, 367 bp, Vitis vinifera
  Intron number 4 from transcript GSVIVT01026125001 (locus G SVIVG01026125001) derived from phytozome v7.0 (chr-ID chr1 8; pos 24228807 to 24229173)
cggctaccaaggcaatccttacctcggctgtcaaggtaacaaatttcaaaccctctcttttttctttttacttgtctaattcttacaaaatttgaaagcaaacaccgggctaagaaaataattttttcggactcatgcttccaaaaaaaaccctcaaataaaactacaaaaaataaattttttaccaagatcacttgtagaaaccaaaaacttgggaggttaaaactgaatcaaaatcctgcaattcctagtatttataagagagttttaagattgttgaatattgtccttatctctatctgttgactttaacttttaaaaaataatgataagagtatcttttttcattttgtattttcagatatag

SEQ ID NO: 98924 - DNA, 287 bp, Vitis vinifera
  Intron number 2 from transcript GSVIVT01023146001 (locus G SVIVG01023146001) derived from phytozome v7.0 (chr-ID chr1 2; pos 22006248 to 22006534)
ctcatctttgggtttgttgagctctctgtaagcctcttctctcatcatctctctctctctctctctctctctttctttcttttggttttctgcactttttgtctttctctgacccttacagtcattcaacaaaagtggctcaaattctataatgatgataatcaaaacatatatgtgttttgtgtgtaaggtatgagtattctaacaaagtggtcttcttttctttttggtttttttttttgtgttgtgaagggtttcatattgctatcagtccaagcccatctccc

SEQ ID NO: 98925 - DNA, 628 bp, Vitis vinifera
  Intron number 1 from transcript GSVIVT01020808001 (locus G SVIVG01020808001) derived from phytozome v7.0 (chr-ID chr1 2; pos 1715935 to 1716562 reverse strand)
ggattgtatgcatgtttttctttaaatttgatctgatactaagctgcatggatgagaataaggaaccaacaaaacaagtttgtgtttttgggttcagggtgtggaaaaaaatgttgtcctttagctgaaaaggcaacaacaggggcaagccaaagtacctctacatttagacagttgcagccccacaaaatcctgcatttctagtgttgcattttactcatttcagttagttttagattattctagcataaacttcaaaaattgtatggtccataagtatgatttattgatgattaacaattttcgggtattgcagttgtaatcatttaaacagttagttcttcacttacccaaaaaactatgtatgaagtttcaggaattggggagcatggcaaaattctcatgcatttaaccccgtttatgatgttagagagagatttttgtttattatttgcttgagcactgtcgcattcacatatcccctgttctggaacatggatcattttgaagacattttcatgatggaaggtgtaggggcccttctgttagcttttttctgacgtgggaatatttaaattccaactaaatttgttttcattgattattttgcccaaacaaacagttgggc

SEQ ID NO: 98926 - DNA, 757 bp, Vitis vinifera
  Intron number 1 from transcript GSVIVT01029174001 (locus G SVIVG01029174001) derived from phytozome v7.0 (chr-ID chr1 1; pos 18945818 to 18946574 reverse strand)
cttaaattgtgttgatttgtgacctgttggtttgacttgaaccatataaaaagctattggcaattgtaacaatgtcaacgtcatcaaaataatggctcaagaagtaagatacttaggtggtattttttttttttttttttactaaaagtaatttgttttcaaaatttaggttgtttgattttctattttttcataacttattataaacattttactaaataaaaaatatgtagttttttttaaataaaaaaaataatatattgatttttttttaatttttaatacttaataaaaataaaatactataaaaataaataatttaatatttaacattattaagtattaagattctatttaaaattaagtaaaaaaacaaacaccgcattagtataagatattctaacattgtccaaaagaaatatcgtaaccagttggtttaagccttcaagcacatggcccaccccttgatccatgagttttaaaatttaaactctaagccaacccatcacaattaaaaattagttgagcagagggcagtgagtagttcttttcaggaaaccaagtagatggtggtttcatcgaagcacagagcttttgggctgttactggctcctactattatgactttatttgtgggcttggtgattctttttcggatacaactggagatgaaaaataataatgagagacacggtttcaagggtttgattcgcttttgttttttactcagtggcggtggtggctttagttatgagcg

SEQ ID NO: 98927 - DNA, 741 bp, Vitis vinifera
  Intron number 2 from transcript GSVIVT01027606001 (locus G SVIVG01027606001) derived from phytozome v7.0 (chr-ID chr1 5; pos 15100845 to 15101585 reverse strand)
ggaggaatttggcaacaggtagactaaaatggttttatttttatttgactttctttgtaccatgcattaaattccttacatttctgcaatgtcaacttctgcttgattcaaatggtttgagcttgcaagaaatggtgatgtagtagggcaatgtgatgtgttttagatgaattgtgaattattgtttgttgattttgtgtcacaataaaattctgggatttttaggtttcttgatgagaaaatagaaaaggtaatggttgtgcaagaacccaagaacagagaagaaaatggcctaatggtggtgcagttgatctgaagagggatcaagagcccatattcaatatgacatggtaaaggtttctgggcaagatcactacctcatgtgggggttttcaagtcctcggtctactcttctttattatcttcttggatattcttgttacatatttctaacaattcttgattgctacacttcttgattgctgctcttcttatattcatcctgttactccagtaaaaatgattgattgagaaacctgaccatgttcatgttcttcatagacaagtgaattttaagccttaaaagaacagctactggcaagctgttgaatggattatatgtaatttagctattccatgtgagatggctggtattttggaaacaaatcctataacatttttcctggcatcaacccatttcacatttgctattgaccttctatttttttcttttttttcagc

SEQ ID NO: 98928 - DNA, 717 bp, Vitis vinifera
  Intron number 1 from transcript GSVIVT01027606001 (locus G SVIVG01027606001) derived from phytozome v7.0 (chr-ID chr1 5; pos 15101639 to 15102355 reverse strand)
ccgctgataaggtgtttgcttcccttctttatttcttttttttttgtttggttcctgagaaaacacaagaaaatatttaattttatgttttaacaggaaaacaaagttaaagcttagctcagtagggggattttctagtgaaaattttgaggttcaagattttagttccttttacttccttatctttaaacgggggatgaggggttttctctaggatttagaggtgattctggcgattaatttcatttgtggtcctacattttcttagaaagtcggttggcgtaaagattttgtttcttgagggtttaggcgtctttagatgtaattctgacgattatttcatttgtggtcctacattttcttagaaaatcagatggcgtaaagattctgtttcttgagggtttaggcgtccttaagattgaatgtgttgttttttcttagatttcctccacatatatcagcaggaaataaacgtttattctaggtttagtggagaaacgggggacagtggtttttcttcttctccttatttctatgttttgtgcttgttttctctctctctctctctctctttttgtttttgtttttttttttacaaataatgtatttattttgctttcttgcaaacaaatgggagtaacgctttcctctctcccactattggcgtgattgtgaaatgcaggatcagaacaagcgacatcatccgttggatataaa

SEQ ID NO: 98929 - DNA, 974 bp, Vitis vinifera
  Intron number 2 from transcript GSVIVT01022436001 (locus G SVIVG01022436001) derived from phytozome v7.0 (chr-ID chr8 ; pos 3020785 to 3021758 reverse strand)
ttcggacccagcgctgacaaggtctctctcttcttcttcattttttttctttttctttttcattttggtctttttggctgctcagaaaagtgtgctgggttttatgtaaaactccaccccccagcctaacagagggttttgttctttacttttagttctcttttcttttcagatgaaaatgactaaagggtgctattcaaaatttgttttcttccttgtatcttagttttctcagtaatccaacgagatggttattttcttttcttctatttggttttattccacctttgttttagtttggtcagcgagaaaatgcacgtgaaagaatttaaatttcaaaattcattattattttctattggggacaacagaaatataaacctccactagcttggtttctctcattctgagatgaaaataactggtggatgctaatcctcttattccccattatgtttctcgaattgcttctccaaacatgcacatggcttagaggcattgatcttgtaaatagctatcacccttgctatttattgatggtgggaagcattttggaataaatattgttttcttttgatttttcttagtgttttagttattcaagcataagattgcttttccattttatttctttttattcccccttttatagagcttgatcagggagaaaatatatgaaaataaattagaatttcaattttttattttttattttgattttttttaattaatttgtgacccaacaaaaatataatcctccacccaattgtggccaatgcatctatgcggctaatttgaggacagttcttttcacttagaaaaaagaacaacgaaaatcatgataagatttggaaaatttcttttcattttgtctgttttttcaacaaagtttttcaagctggcttaacgcgtgtctcaatgaatatatatatattttcttgattttgattacaggtgaaggtagagaacaagac

SEQ ID NO: 98930 - DNA, 584 bp, Vitis vinifera
  Intron number 1 from transcript GSVIVT01022401001 (locus G SVIVG01022401001) derived from phytozome v7.0 (chr-ID chr7 ; pos 19705486 to 19706069)
ctcggtgcaagcctttcggggaaatccacctcaaggtattcaattctggttcatttgtgattcaaatttgagtttttgtaatgattttatgattgtgattttgaaatgtatcagggttcgttggtgattcaaatttgattttctgtgattattttatgatttcgattcctaattgtattagaaatttttgtttttgtgctttcaagaatatgttgattgattttaattcaagaatatgttttcagtcttttcctataattgattgccattttctaaatgtattgtacattttattgtgattgtgatttgtaaatgtgttgttgatttctttgaattttaatttctgtaatgattttattgattgagattaaagaaaagattgtaggtttcttcttgacaaaccatgtgatttgagaatgtattgtatgtatattcaaatgttaatttgtgcactgttttatttgacagaatttcgaatacaatattggtttctccactatgatacagaaattgaagaagtgggtgttattgattgcattttgcaaatgtttcacaggtttcttctatacgggagagcagaacag

SEQ ID NO: 98931 - DNA, 657 bp, Vitis vinifera
  Intron number 1 from transcript GSVIVT01030049001 (locus G SVIVG01030049001) derived from phytozome v7.0 (chr-ID chr1 2; pos 9176691 to 9177347)
actcttcttctgttctcttcgttcaacagctcaaggttcggttagttttgtgaaattaattatctgctttgatatttcatttgtttcttgtggtgcctctaatttatggaaacgatttgtgctctgtttggttgataagaaagtgtgtgaaaagaaaataaaactagaatgttgagggttaggttttgaattctttgtttgaattgtacttatggatcccaagctcgcttttttcctttgtgctctgttaagggttggtctttaattgtatagcattcatttttagtctttagttggtgagaaaatggaggaaaggaagagaaattattatgattattatttttctatactagattcttcattgcttgggaagtaagaaaacagaagcctccacttatattattgttattgcataggggtttggttttcttttcctcagttttcattgtttggtatggcttctatggatatccttgtgaaataacaatcaaaatctctagtgtataggcatggtttaactgggattttatgttttgctattttcttaatctgtcagagtaattagctcttttcctttgttgtgaatggagatttaatgaaagggttttgtttttgttgataatcagcaaagaaactacctagtaactgttggagaag

SEQ ID NO: 98932 - DNA, 761 bp, Vitis vinifera
  Intron number 3 from transcript GSVIVT01026409001 (locus G SVIVG01026409001) derived from phytozome v7.0 (chr-ID chr4 ; pos 23853734 to 23854494 reverse strand)
ctcctcttctccgatccacgtccttatcctcctcggtaatagttaatggacatgggagcttctgaattcaacctgacaccacttccacactaatgaatggaataactttctaaaatttagttgtaattagcgtgtgctgtggaccattgatagtttttggaatttgtgattgccatggtttttttttctctggcaaccttttgtattaatcatacacacctttgctaattcaaaccaatctggagcttcaaaaccctgatagcatagggttctcactctcaaagtttatgatttaaagtgctgcctctgatagcatcactatataatgtaataggactcaattgttgaagggtttaagtagctatgggtttcctctcttgttctttgctttggtttttgttcaattagagaggccatgtagcatttctgagtgttcatagaagttagctatacccaggaaaacctcaccaaccaaacgaaaggcatgattaggaactcaattcccttgtatcaagtgacccaagtggtcttggccacaagggtccatggtttgcctaattcaaaggggacaaaggagcctgataatgccaattcaccctcatcccaaatgaaaaaagaaaaaaagggaagttggtgataggatttgatgaaaagtggttttagcagtgctgtataaaacttctagtatgataataacccatgtataagtggaggcaagcatgtctaggtgctaacatttaatttactcataatgttaggca

SEQ ID NO: 98933 - DNA, 780 bp, Vitis vinifera
  Intron number 1 from transcript GSVIVT01023157001 (locus G SVIVG01023157001) derived from phytozome v7.0 (chr-ID chr1 2; pos 21806898 to 21807677 reverse strand)
tctttacgtcaccccactacaccccactagtcactacacactatacctatacctgtttcccactctttcatttatcattttcaaaaatgacaaatttatttatttttaaccaaaaaaacccaccaccaaatttaattttaattttaatttttaaaatattaaatattaaaattaagcaggctaattacaatcaaatttgagaacaattattgttgtttggtcaattttgatgtacaattgaatataaatttcaattatgaaaatttaaatattaattctttattaattttttaaaaataaattaaagagaaaattaacatacccaatgctacacctcattctttaaaaataaataattttaaaaaaaaaattttattctcatgatttaattggtgaattatcttgaatttatgttaattttattgtaccaaaaaaaatccattaaaataaaaagaaatattaataaaaacatattattattttccaattttttttaaaattggaaaaagagagtaggatcttggcttcacgtcaccccaccgaagaccgtttctaatctctcttactttctctctctagatccaacggctctaatcaaatccagctccctccttccacttctttctcactctttcatcttcctccgatctctgatcacctcatcaaaacgctgcgttttggcatccggtgaaaccccgccgccgtctctccatgggttaacttaacttaacctaaccgccgccagcaaaccaacgaaccaacgaaccaccacccaactgt

SEQ ID NO: 98934 - DNA, 307 bp, Vitis vinifera
  Intron number 1 from transcript GSVIVT01028853001 (locus G SVIVG01028853001) derived from phytozome v7.0 (chr-ID chr1 6; pos 18064757 to 18065063)
agacttctgaaggaactcaaaagtaattctagctattcttattttttttgttgttgtgatttgtgcattaagctgatggttttgttttgcagcttctgctatatcggctgtttggttgttgagaaaatgaaatttagaattttaaggttcagtggggtggaggattttggtttttgagttcgcgaaagaataaaaagtttaagactccaaattttagtttattttttttcccagcattttcttagcaaccaaatggaaaattattgtttggttttgttttaatgatgcagacagtcaaggatttcat

SEQ ID NO: 98935 - DNA, 244 bp, Vitis vinifera
  Intron number 1 from transcript GSVIVT01029729001 (locus G SVIVG01029729001) derived from phytozome v7.0 (chr-ID chr1 2; pos 13795769 to 13796012 reverse strand)
aggtctgacccaacccagtactcaacccgaactaaattttttttttcttttcatttcaatatctttttatttaattgtttatttcacgactaaatatcgatttaatttgatttttatgaatttgaagatgaggaaattagaaaccaagctgataaaattgattttcaaaattttgaaattaaatcaatttttatgattattgaattttgattgcagtgagagctttggattctatatttcaaca

SEQ ID NO: 98936 - DNA, 1004 bp, Vitis vinifera
  Intron number 1 from transcript GSVIVT01024669001 (locus G SVIVG01024669001) derived from phytozome v7.0 (chr-ID chr6 ; pos 7928676 to 7929679)
cggcggtagtctagtgattcaagactgtcaacgttcgttaaattcttttctgtatagtttatgtcccaggtctatgatttttctgttagatgcctaggtttattgttgtttcatttgaaattttcgattgtagtgtagatccgcgcatggttgcatttttcaatcgcaattgataggtttgatagattatagatctagaactgctagatccaagcattatgataaatttgactccttgtttgggggctgagaaagcgtgagaaaagaaacgaaagtgaaagttggatataatttttctcgtgtcgatctatatgattcgctttttcaccaaatggagaacctggaaaactcagtttaatgtttagtcgtgagaaaaagccattaaaaacttggataatttctgctatcctcacttttcgaagcagccaaacggggttttgtcaataagtagcaagtagaaatggttggttgtcggattgggaattagaggattgctcattaggctgtttggcaagccaaaatattgttgaacattgaaaatgacctggaaaaatggaaatctcttgctctttggtacactggttcagcacaaaagtaaggatcgaacatggcaagtccaccttactgggcatagaaataagccaggtttgtagaatttacttgtgtctttccttttgctgattttatgaggaagtaggtggactttatggcctgttgattggatctagaaagaagaaattgctgatagtggattagataacatgtgtttttcatgaagtgtttcattcctgattggaagtgagatgattaaggataatatataacctgccattttttaatgtagcttatagttttcagctagtatctttgaatgacttacaagaatatttgaatgtgaccttcatattagtttccccatttttcttgttctgttggttgctgaacctctacatttttggctcattacaggcacgagggttaaagaaacatttgaagaggcttaa

SEQ ID NO: 98937 - DNA, 698 bp, Vitis vinifera
  Intron number 2 from transcript GSVIVT01020786001 (locus G SVIVG01020786001) derived from phytozome v7.0 (chr-ID chr1 2; pos 2001385 to 2002082 reverse strand)
tagtaaccatgtactcgtcttcttcctctttttctctactgttcttcactaattccacatcatgaatcggtctgaatttttcccttttagaaaaagacagtctgattatttcttctatttatttctgcaattaatttgtctattttagtgagatcggctagttttgagaaaattaatgttttcatggttggaaaaattaattcattttcataaacatgaagtcatcagaaacaaaatcttaatttttttattaattagttcttattaattatcttcaactttaaaaaaaattaatagtttttttttaaaaaaaaaaaatgtgtgaaaaaaaaaacctgccattggctggaaagtattagctgatatagtacaagtagcagtgatcagagctccacctggactactttccctttcctttttgttccatttctaaagtcaactaagcttcaccatgatcttgatttcatagacctaagtgccattgatttgaaaatatattttgaattgtcgtattttaaaaaatattttttaaaattaccattttctttttcaaaatctagttcccattctccccttcaagaaaagaaagaaaaaaacaagccctcaattctctatgttgttatttgttatggtgaattctaacagggtatatgttaattgcagagctttaaaagcacaaaatttatcaggaagcctac

SEQ ID NO: 98938 - DNA, 728 bp, Vitis vinifera
  Intron number 2 from transcript GSVIVT01021106001 (locus G SVIVG01021106001) derived from phytozome v7.0 (chr-ID chr1 0; pos 1484938 to 1485665 reverse strand)
cgtctcccgccgctcttacggctggactcctgaaggtaaattttctcttcaattttcttagtgttacacacatgtatatttattgtatatgtttcattcattgatgttgattgaatgaatgcgttgtcctgcatcgtatgcttggagggattgccgttattttgtcaatttggattggattggttttttggttgttgaactggtagtgttgtgatcaattgtgttgattttataaagcaagctaacatctatgattctgtttgtgaattctatagaataatattttggcattgtggatttgagagtgcttctgttaggtttgaatcatgtaatttcaggattcagaagtagttcagattgagagaaatcaaatgctaggattgcaaaaatctaatgccccgtttcaacgttgatggtggatattaaccaatcattttcctggttttgttccttctcactgtcattttaggttcttcttcccaaaaaggagcaaatacttcgaaaagagaggagaaaggattggctatttttcatttttcaaacctcaagtgggttatatatactcattttataggaaatttttttgtgtgggagaaacatttgattttggtgaatggatcatacattcattttcttcccacttgttagtttttctattctaggtgatttcatctctctcaataaaagaatgcccactattttccttttgtagggaaagacaagactag

SEQ ID NO: 98939 - DNA, 307 bp, Vitis vinifera
  Intron number 1 from transcript GSVIVT01020174001 (locus G SVIVG01020174001) derived from phytozome v7.0 (chr-ID chr1 ; pos 9424147 to 9424453)
gagtccagactcgtcgactagaggtttctcattcaaccttcagtttcttcttccgcctttgcttttcttcatcttctcaaagcgaaaatcaacgacctagatgattgttacctagaattgttctcttgttcttggtccacttgcctctcatttctacgcaagtgattcaattttttttatgccattaaatatcaatggagcttttgtctactgttttaacttttatgtatatctcattaattcaattagaataattttttctatcttttttattttgctaaagatttggaagcagaaactggtgcaa

SEQ ID NO: 98940 - DNA, 547 bp, Vitis vinifera
  Intron number 2 from transcript GSVIVT01020174001 (locus G SVIVG01020174001) derived from phytozome v7.0 (chr-ID chr1 ; pos 9424533 to 9425079)
aagttggtcgtgagcatttggagcgcttccaaggagtgagactcccgttcttccattctgtttctatgcagttgttctcttgttcccatgtttgtgctttccatgtgaattaatttgaatttcaaaggctcgcttctaattcaaaaactatagtaataattctggatgaccttttcttttcttttttatgatgcaaatcttttattatcacctaacttagaaacgttaagagtggatttcaaggatggattattgcagaatattgggttagggagagattagctttcacacaattaggctaacccatgatatatagctcagcttgagttctcttgacatttggtacttacttgagtctccttgggcctggctaaattatatcatcaatcattatgtctgaattcaacattctgacaaattggaaaatcatgtaagattcaagttttatattgggtgtctattcttaagttaatattctacaggcttggtggtctctctaggaattgttcctaatttttaatggctgatattcactactgattgcaga

SEQ ID NO: 98941 - DNA, 769 bp, Vitis vinifera
  Intron number 1 from transcript GSVIVT01028824001 (locus G SVIVG01028824001) derived from phytozome v7.0 (chr-ID chr1 6; pos 18339477 to 18340245)
tcgaatcattttgatatacctttcatttcgaaaaggtccgagctttgtctatctttctgagtattggctgaattgctgttagtttttgagtttcttgtcagtaattgccattgataattatctatcagaactttgatggtttgcccgatttcacgaacatttgaataaaacgagaagaaattgaacaatggtttttgatttctttttcattaaatttgacctgagaatggctagaactgaggggaatatcgaaagattaatgagaagattttccatttccaatgatgggaggaagcttgtagatagctttgtatggcaaagaaagattcttctagttgggtcaagtagatggactaagtttctgttcttttcttttattttattttttctttccttttcttgaacttgaattgatctgacccgataaaatgaatatatgtctattcaactgaaggtattagataatttggcctagctgaaataacgtttctgaagacggggatttttcggtaatcttaagtttacaagagttccttaagcctttaactctaggcagttttcggtaaattgcttattaaatggatgcaactcactgttatgcagggaatattgattagaaggttattataattgtcatccaaggaaagattgcacacttgtatttatatgaataagtctatgtttattaatgtctctgcatttttctttttggtggttgcttaattgtttcttttaaagtattttcagctgatgattgtagctcctcagg

SEQ ID NO: 98942 - DNA, 409 bp, Vitis vinifera
  Intron number 2 from transcript GSVIVT01028824001 (locus G SVIVG01028824001) derived from phytozome v7.0 (chr-ID chr1 6; pos 18340337 to 18340745)
caggtatcatttacaataccttgatgcatttttccttctctatcatcaacttgtctgctaggcagaagattctatacagctggattacaattgccttaggcacaatttcctgtatcaaccccagtaaacaactccttcccattggtttttttgaacagggataggaacacttctagtcttaggtctttgaaattgatcggatctatttatgattcttaaggtgtttggagttggcagtaggaagttttctgtttttggtctgttcattttgattgtcagttttgccactcatgcaagctctagtgttatgtattttatttgtctttataactgttttttaaccctgattaagtttctttgaaactagtgatgactgacattttgattggtttcatttgtctagttcggt

SEQ ID NO: 98943 - DNA, 840 bp, Vitis vinifera
  Intron number 2 from transcript GSVIVT01019592001 (locus G SVIVG01019592001) derived from phytozome v7.0 (chr-ID chr2 ; pos 1812830 to 1813669 reverse strand)
acgaattgaaggcaagggactcactgtaagttttcgtatttcacattctcattacgggatttttgcaaagctgtagtgctagtattccgcccacaacttggtaagcacgccaaaaagtgaactctgaggttgccaataacaacggttactctaagtatacacaccttttcaacattttttgtggacatatttcttccttaaaaacccaagaaggcatgcaaagttgttcttggatcctggcctgcactctataccacactttgcccagagccaggtacaagttccattttttttttcccctgaatttgagttcgaatctccaatgacatccactattttctgaagagcactggtccaaaccatgaccattagaaacaagaagtatgacatgaatgacatctttagattttgcccagaaaaaagaaaagaaaggtttaaatccccttttaaatattgacctcccaatgttaaaagtaggacaagcatcaatatacaacctcagtgtgaaatcccttaattattggttttgttgatgatgaagttgaaccaaacattataatcactagaagaagaaatgtgtttattaatactcaatcaaccatcggtgccctcctatgaaagataattagaacttaacagaggtagaaatcattgtgcttataccagtttcccagcaaaagattgtgatgatccgataattatttggctccacttttagatagccagatgattgtttatcacttcacatattattccattagaaattttttttatcaagtttgcctattgcagcatgacttgaactgaatctaattaatggaacttctgaaaatttcacag

SEQ ID NO: 98944 - DNA, 886 bp, Vitis vinifera
  Intron number 3 from transcript GSVIVT01020599001 (locus G SVIVG01020599001) derived from phytozome v7.0 (chr-ID chr1 2; pos 3942967 to 3943852 reverse strand)
gctttgctgttcaaggtactgcttatcgaattacttgtctgtgaatatgtttatctattgaattgctttatgtttgtgtttgggtctttgagcaatatgattggaacataactgttcggaaagcttctcctaacgacaagcgagtgaaattgggagctatagagctacaaactgaagtaggataattgcaggaaatttgtatctatcctatgtgcctatctgtatgtttaatggttaatatttcatgccatacttatctggtgcctggggtttgagggggcttatggcccagatagggccctcgtgaggaaggcaagaaatattcatttagtgggccccaagcagtttgaattaaagtttcttgagttgagtttccatgagtgtgttttaaatgttagaatggattttattattttgattgggttttatagcacaattttgttcatatgaatgatatgttttctcctgattattttattcttaagagtatttgttatgaagaaatatttctctatattctgtgtaggtgtttatacccaacccaaagacgggggaagaaatcttggctcccactttattagcatacgtgctcactctgactctcttcttattttaaactgaagattttggttagctacaaataataaaaacttttcaatgtcacaatatagtttacaacagcaaaatattctaccttttggcattctgataagtggattagtttttattctttgtgtgttgtcaaatcctagtttgaactgcaatgatgtaaatattactttttctttttgcttcttgttagtatgttgtcatttctctctccgtcattacttttgtgtttttcatgttaggatccaagcaagctttcagcttaccgggacaaaag

SEQ ID NO: 98945 - DNA, 437 bp, Vitis vinifera
  Intron number 1 from transcript GSVIVT01028962001 (locus G SVIVG01028962001) derived from phytozome v7.0 (chr-ID chr1 6; pos 17040604 to 17041040 reverse strand)
attgccccgagaaagctcagtgggaaaggcacaaggtttgatttttctttgcaattctatttgtttttgaattttttttttcttctgggcattcctttaatcgaagaaaacatgtgtcaatagctgaatctcgttcccttggtttttgcttattaaatgttgcaattgccaaacaatgtggacacgttatatctgtttctggttttggtttagtagtatttgagtggatgagaagagacttgtagttgaagttgatgagcgtttttccctggtaatgctttagtgatagaagatcacatgggcatatacttaaatgttatgtagattttgccttggtatttgaagagatgagtaacattgaaattcttctggtaatgggaaattttatttttcagtgaggagttaattgacagttgaggtcttgtttgtttgcagat

SEQ ID NO: 98946 - DNA, 992 bp, Vitis vinifera
  Intron number 2 from transcript GSVIVT01028239001 (locus G SVIVG01028239001) derived from phytozome v7.0 (chr-ID chr7 ; pos 4873071 to 4874062 reverse strand)
attaaaaagaaaacgcctggaaacaagatttcaaggtaatagaacttgtaatgagaggatgggtaaatataattgaatattagctcctacttgaatttatcagatttccattgcaatgaccacatattcccgttggagataactatgatttctccttagatgaccctagcattttctttacatattatgctttggctttaggcggaatacaaattcagttagatgttaagcaataccctttgttatggaagacgttgaattttagtacttcattgagcacctcatgttttgcacactttccagtaagtatataaataactggttccatgtttctatttgatattaaatttgcacactttccagtaagtgtataaataactggttccatgtttctatttgatattaaattacttatgaaatgactgggaccttattcacaaaaatttcatggaataactggtgcatgattgaatttcaattcatgcttcttacctacatgcttgtaagttccacttttccttgtcagggaacaataattctgtattgtaataatacctagagcaaaaattattgttctgcttgattagtccttgagatgaatttactggtagtcatgatttctagcatgaacagttccaagtcgggactcattcagtggtgggttctgactactgtatgtgtccggggttcataatctctgagggacccatagttcaaccctcagcctttcatgcagtatattcctttttaatattgcagtggtttttcttaaagtttcaaggtgttataaattcatatgttgatcatcatccttctaggaggaaaggtctttatgatcattctgatgtgtccagtcaattcaaagaaagatcacacacacacacacacacacacacatatatatatagattctttttcccttgtcattcttaaagctttaatgggcgtctcttcctctttcacagagcaacaagaacagctaaagctaatac

SEQ ID NO: 98947 - DNA, 702 bp, Vitis vinifera
  Intron number 5 from transcript GSVIVT01021829001 (locus G SVIVG01021829001) derived from phytozome v7.0 (chr-ID chr1 4; pos 6791496 to 6792197)
ggagtggaggtgagattagccatgcaaataacacttcatatcttctctctccgtgttctttctaccaaaacctatggggtgtatcataaacaaagtgaccctaatcataagaccaaagtgccatatatagacatcataagacttggagataattagtcctgtcttctaaaccctaatcagaatagagatcaatcctatatattctaagcaaagacttcagttgtgtgctctaaattccagtgaaaataagactgcatatgcccacgtagatggacactgaattcaatgtgtcctcatctattttgacaactagttttctaaataaatggtttagataggtccaacccattagccttttggaaactaacacaagactccatacctaaagccaagtggctggtattgcttgaagaaaaaggactaattaatgaatttgtattcaaagtttaaatctctacgcaattgactcaaggcctgtgttctcctttttctaaagctgccaaatacatgtttcacctactattagtattagtattatttcttatttgttttgggaagactggtatgagtactgattgaggcattgaaaagtcaaattacttttcatataaatgacttaagcttcaagcaaatctgatgttcttcccttttgctcttgttcttccaggtggctcgtttctaccaggcaaggctcattgggtg

SEQ ID NO: 98948 - DNA, 639 bp, Vitis vinifera
  Intron number 1 from transcript GSVIVT01026546001 (locus G SVIVG01026546001) derived from phytozome v7.0 (chr-ID chr4 ; pos 21994051 to 21994689)
gtccgctgtcggattcaggcggtggccgaagggaggtaattttttctttttctctttttcgcaggtaaataaagcacataattatgtgtaaatgttggcttcgagattttcttttttttttttcctgtgtgtgtgtaatgcccttgtgtggtggtttagtggctgaagaagctagaatttggtgttgttttctgtttggttgcgggtgaaactagggggaaagtaatggaatttgatttatttatttcctttttcttttcttttccagcagtgggagtgactcgaatgcattctgttctcgtgttgttttcttttctttgtattctttttctggcaaagcaaaacggagaattagtgttctcatttgattttttttttttttttttgaattgaggttgtttcagtgctttcatccgatttttaaaatttaggttgttttgtcacttgttttttcctcctcttttttttttggtattttatgaataagcaaatgaagaattcgggttctgatatgatttttcaattttgattagtttagtgcagtttctggtaaccaaatgggttactggatttttagatattgaacttttattactggagattgtggtgatcacagattgagctattggagctcagctg

SEQ ID NO: 98949 - DNA, 821 bp, Vitis vinifera
  Intron number 1 from transcript GSVIVT01027157001 (locus G SVIVG01027157001) derived from phytozome v7.0 (chr-ID chr1 5; pos 17371982 to 17372802)
ctcaggttccgtttcttcaatccttgtttgtttgtttgttttttttggtattcttgatgtttggtttcttgagaaagccgagaaaaagaaagaagagaaacgacagttttaaattttctgttctttgttttggttttgagagattgattgaatcttagggttttgttgtgctaggttttggttacgaagttaggttgaattgcatgtcgaatgaaaatttatgcttcgatgtaactcagttgggattcaatcgaattcagaattcctttgaatcctaattcacaatagacaatatgttgtttaaatcaatatttccagattccaatgggaattctttgaaaatttgaaaaagatgaaatgaaaatatgaaatgcataagtcactgttttttatagtttacggttatgcttgtatcatttggttttattcagatgaatccaactagttcgaatgacattatggggagttgagttgaacaaaaataatgtgtgttggttgttattcacttgaggcattcttgatgaggttattatccaggtatagagatgacctattgggttgaatttgtggtgttattatgtgttgaaaggttttcttttatttgtgaacattttgcgggttgagggtgggtgcttaagagtaaagactgtttgtttaatagctctggggtcggtttgtattaaattacttcttttgattttcagttgtttgtgctctctctcatagtgataatctctcatgagagagaagaattttggctgataaaaattgatactttggatgtgttccgcaggtgcggtaccttgcacttctcataattg

SEQ ID NO: 98950 - DNA, 876 bp, Vitis vinifera
  Intron number 3 from transcript GSVIVT01019597001 (locus G SVIVG01019597001) derived from phytozome v7.0 (chr-ID chr2 ; pos 1835610 to 1836485 reverse strand)
gagttctccagatacaccaaaatctactgtaacaggttggctattgaattttctgctgcataagtaatgctcataagttccactgtcctattgctggagacttttcaatatctgtaattgccaaaatgaccactattagaagttaataagtgtcttgttgaaatcttttgcttcacatttgttacatatagcagtctctctctatctctctctcgtacactgaaaaatttgaatcccttgataaagtgaaagagtggtctggcatcatcttgaggtgcaccagatgcaaaacaatacatcaatcttgtgtctacgcctagggttaggtactaaatgtgactgagagtgcttcgccttatccagcaactagtatccatgtggcagctacatatttgagctggtggtcatcagcatcattcatttggatatttcttatacagaacgacggtatattcattctatgatatcatggccaaagctgcaactaattgtgtgacaatgttaaataaagatctcagacatgagaataaaatacatgagaataaaatgcacgagaactacatagaatgttgttagagagaaattaacataacaaggaaaagaagaaaatgaattagtgcaaatgcaccacatatatttgattggctttaaatcgtcttcattcatcttttttagctatcaatgcagttgaaactatgaatcaatcagcaggtgagctttctttctcagtcgatgagtttcatcattagacatgaatttcctggttttccctgttcattgtaatttggtatctttattttcctttctttctcctggttaacattttccctgttcaatgtagagtggcaggccttgtacactacacaaataactcag

SEQ ID NO: 98951 - DNA, 452 bp, Vitis vinifera
  Intron number 2 from transcript GSVIVT01019597001 (locus G SVIVG01019597001) derived from phytozome v7.0 (chr-ID chr2 ; pos 1836499 to 1836950 reverse strand)
gagaattccaggttatctaacggccaaacacttaggaagaattcagtttttactggtatcaccttaacttattgccctttttgcaattaatattataatacctccttttgcgctttttttgagattccaggttttcaattactcatgttgttttcttacaattgagttttgttttcccttcagaaaaaaggaagtttaattcagaaaagaataaaacaccgtcaattaacctaagcccatcacaaagaattatcagaggtcagttgctaatcacttgcatcatctctttttcagctttcctctaagaaccattgctacaagcctgtgaaccattcagatttcctttaacaccatgtatatcatcagcatagttcacatttgagttatatggcctagcatacttgtaacagctaattatatttcagagttcaagaagagtgaactgcacaagt

SEQ ID NO: 98952 - DNA, 867 bp, Vitis vinifera
  Intron number 2 from transcript GSVIVT01029843001 (locus G SVIVG01029843001) derived from phytozome v7.0 (chr-ID chr8 ; pos 334134 to 335000)
ataaaccctatcttaattactctgttatagtccacgtcattaaacttatattatgatggatctagtttttttcaaaagaaatcagtaatacgagacacgggcgtatttgtatataaataattttcaatcttttggaatggtgaccaaagccaattccattagccaaatcagttccatccaatttggattggtctttcttttttaattccacttgaatattcctttttacaccccaattgtaggtaggagtctctaaatgtgatttttcgcatatgggttcatagaccttactagtccttactggatatgaaataatggacaccaattgtgccatttattttcaactttttaatatagaatcataaaagtaatatataaaaagtttataaagacattggataatgagagatatcttattgaaaataaataacctaaaaatttaaattgagttcaataacattttaagagaggctaaaagtttttctattacttagaaatgttttttcccattttagaaaattgtttgataagggattcttctaaatatttatttatttatttataattaatatattaaaataaattatagtatctgtattttattcgtttatagcaataaagtcagagcgctccttcttgccccaatccaacggcccaattttcagaatttaaaagtggggggaatgaagcccacaattcaaaattcaaatctccagcgcctctccccttttctcctcctccaccttcaagatcaaacccaaactctctctcacagatctaaatcttcacctccatccgccatccgccatccgccatggacaaatacgaaaagcttgagaaggtcggtgaaggcacctacggcaaggt

SEQ ID NO: 98953 - DNA, 869 bp, Vitis vinifera
  Intron number 1 from transcript GSVIVT01025006001 (locus G SVIVG01025006001) derived from phytozome v7.0 (chr-ID chr6 ; pos 5348647 to 5349515 reverse strand)
aatcctgaattttggactctacattaccaaaggaggtattattgttgtgtttggttcagtttttttatgcgtttgatttgcatttcaattactctttttttttttttggttgttttaatttttgtgctttaatctctggataattttggtttttctcttcgtgtacgtaatctttttcctatgtttggttgctgagaaaaccgagggaaaaaaagaaaaagaaaaaaaagaaaacctgaaatttttttattggtttgcgacgaaggaggagaaagtactcaattcaaccaaaaacaagtgtcgtattagttttcccttaggtggaacctttgtattattggctcccaaacaaaaagaaaattatccaacattttttcacctaccaattggacttttagcctattcgttaggatttgatgtgcaatgagactcccttttccaattttatttcaatactttgttccttgttttttccagtcaatggagatgatagatggaccgaattttctttattgtctttagtaactttgatgccacctctcactatttctgggccatcggttataattccaaaattttgtgttttccatgttcataaacatgtaaccatgcaactgtatcatgtctgaccaattttattaaagcgctttttgttgtctggatgccaattctttagtagttgtaatttttcctattttcactcattttctggattcaatttttcaaaccagtgtgatggttgacttataaatgctaattggaattttattttatttttttgggtctaagctttgaatgggtttccactgcttatactgacagatcctgttttttctatgaaacatgtctgtctgtagacatttcaactg

SEQ ID NO: 98954 - DNA, 973 bp, Vitis vinifera
  Intron number 1 from transcript GSVIVT01027990001 (locus G SVIVG01027990001) derived from phytozome v7.0 (chr-ID chr7 ; pos 3032883 to 3033855)
ctctacgtagttacacgtttgtacgtgaatgaagaatccttttctcagcttttctgcttctgcttgctgctctggctttattgatcttctttgtgttaccattctcttaaatgttttcgtcttttttggtttgttttttgagttttttcttgctgcagtacagtttttgtttactttttctcttttttggtagttttttttcattaatttcctgattcttgcccgacacaagctttcttctactgggttgaacttctttgactgtgaaaacccaattgatattgttttttgaacgtccgatcaattcccagttggtgtattgaactcctggtgtgcctcttcttttttctttttcccttttttctcagagctttcgtggctcttttgagttgaagaagaagattgtggcaaccacaaaagtctaaaccaaaagggaaattgatttctcttttctctacccggagaaaagtagtataggttggtctttttctcccccatcatagctggatttagcattatctttttaaattttttaaaaataaaaacttttcctttttcaaatttcgtaaaagtcctcattacgttcttgattatgattcattctagtattatttcttcaaatttaatgctccccctggctttccatatcgaaaggatgcaatccttcatggggttggttcaatcaaagtgactatttaccattttttttttctaaattcatttatctattgggttttgtttatggggttgcttaaatggagttgaatcatattttgctggtatgccttttgaaatctttttgttttttttgttttggttttttgtaagaggaggttggttgagtcacgatgatgtcttttttttttttttttttatcatgtgcggtgggttcttgtattatggctgtgctacttttttcttttcttgtgggttaacatgaatattttccatcattttctcaggaattggggga

SEQ ID NO: 98955 - DNA, 703 bp, Vitis vinifera
  Intron number 4 from transcript GSVIVT01029855001 (locus G SVIVG01029855001) derived from phytozome v7.0 (chr-ID chr8 ; pos 472839 to 473541)
tacaagaaccttgaacaatttgaggttggtctgttctcaaatttactccttgtttttagttctaattatgactttgtctttcaccttcagaacacagcaccaccactactggtggatgtgcaaaaactaacctgtttgatagttatattcttgaaagtatgtggatgtcatgtatgtgagtgatctgcaaacagcatgctgaatatccttttctcgttgtacataaattggtaatttcagaaaaactaggtgatcttgtgtcaaagtctgttattaaggaaaattctgtgcatttatcaaaaggaagggcttatatcgtgtggtctacagtacacaccacagtggaaaaactaaagtaattcataatccagtccatggtcaacatcctggttttgtctatctatccattcatgcaggaggatggttctagatttcctagcttctggaagtactgccttctacatttctcatattcccttatattattatattacagtttctgctttttaatcaaagttatatatgatgactgtgtaatagaatatactaaaatgaccagcaaattaaacaatctggatcaattaaaccggagcataatgctaaattttcggctgttggagataggaaaatcttttcttgtctttttaagatatgagatatctggattgttatctgactgattatttttggattattatgcagc

SEQ ID NO: 98956 - DNA, 1028 bp, Vitis vinifera
  Intron number 1 from transcript GSVIVT01020236001 (locus G SVIVG01020236001) derived from phytozome v7.0 (chr-ID chr1 ; pos 8704123 to 8705150)
acgacaacgttcacggcaacatctatctcgatccggtaccactttcattgagctttttctatatctttctttccctaatcaccttctggattcatttacgatatcttttcatttgttttctgttttcgacttggccttctcggtgccgataaacggagacctgttccatcaattttctgcttccatttgttttgttcttcacggtggagtaactggagttagatgaagcatttcacgtttcctatgacgaagagaaaattgagtttctaagaaattggaaaagctgatcactcagttactcagctctaaaaataattttgcgagattcaacagagttgaacggagttttttctttcagtttgttggaacgacaaaaatataaggtgtaattttcctgttattttagtttcctctcgtttctccgcaaccaaacagagcgttcaggaatttcattattaagaagcgaaaatatgtatatatatatatatatatatatacaaggatgacaagggtgggaaggtagataacgaatcatgaggactttttgatacaagatccccagcttaataattcaattagagaagaacttaaattcatggatgtgtttttaagattttattaaatatttcaggaaattattgataaagacatacaacagcaataaaatatgcataaaatcgtgataatgacctgtaaaatactctcttctctctgatatggtctaatccttcaaatttattttcggtaccccgactaatctcatcttctttcacttgataatttgttgagatgcaaaacttttgtgtaatattcttccttaaaagattgactggcttgacattttggcttggcttttactatattatacaatattagatcgcaattacagtgcctcctcagatacttgaaacctgaacagaaccccattttcgccaaatcattgatgtgcgattagaacactcttgctctgttcttggattgcatataatgtaatttagccactttcttttggatgattgcagctcttt

SEQ ID NO: 98957 - DNA, 396 bp, Vitis vinifera
  Intron number 1 from transcript GSVIVT01022103001 (locus G SVIVG01022103001) derived from phytozome v7.0 (chr-ID chr7 ; pos 16601791 to 16602186 reverse strand)
gactccaaggccgtggtggtaccatacagtatcgggttagttttcttttgattatagatctctttgtttgctttgatacacaaatcatttattcattcatttatttgattttccttgtcaccttggtgctaaatgggacataaattaacgtgtgaagaaattaattgccatttcaaagctgttttcaaataattattaattagtagtgacacgagactaactatgtcctactatttagttaaaatactttccttattctgtttcttctgtagccggagagtgtgttaatttttcacattcctgctttaatttcaaggcatacatattctttttattcacactaatagtggcatgtatccagagtcatactaggtttccaggctactggaggttatt

SEQ ID NO: 98958 - DNA, 810 bp, Vitis vinifera
  Intron number 1 from transcript GSVIVT01020678001 (locus G SVIVG01020678001) derived from phytozome v7.0 (chr-ID chr1 2; pos 3173185 to 3173994)
tgaagagcgggcctctttcttcactcacatttgaggtttgctttgcttctcctcattatttcctccccctttcttttccttaataattttgtcaaatcattgcccttctccagtgcatgcatgccatgtccctttctctgtcccccccaattttgctttgattttcggcccaactttgctccttccactccaccactgtcccgtaagacgcatcatgaataacacccaccgcaaccagaaaattcaggcactgtttattttgagaaaggaggaggtttaaactaggaaaaggtcaaaaggagaagccgtaagagcttgggaacagggagtgaagaggatcacatgaggttgccgcttgtgggctggaattggtctttatcaaatgtgtgttggggcgtgattggtgccgagcccttttcacttgtctgcccgtatgcatcaccggatcttatagtaatttttttttttaactgttggaaaagttacctttgttttcaaattaagatttggaatgcttttcagacaattttcagcccgatttataatcatacaccaaatgcccgcttctttcattcggtgcattcaaacttcttttaaaaagtcaaaaattaaaaataagacaaaaaaatattttcattatctttttttattttatacgttatcattttggtctcgatgttgacttttcttgtttgccatagctttgtggacccatgtaccgtccaacactggcttggctctttgatgatcatcgaaatcataactttttttttttttttttttttcaattttggtgaattggtcaggact

SEQ ID NO: 98959 - DNA, 669 bp, Vitis vinifera
  Intron number 1 from transcript GSVIVT01029286001 (locus G SVIVG01029286001) derived from phytozome v7.0 (chr-ID chr1 1; pos 17539529 to 17540197)
ccctaaagtactttcaacgtgaagccccactcgaggtaaagatgagtgccaacattcacttcgtaatgttggcctttttctttttgcgtttggacgatgagaaaattcggctcaagggaaggaatggtttttggcttttgggcgccgttgagatatttacatttttccagtagtttttaagctgccaattgaactggtgaattgtgaaaacgtcatttccattggcacctcgaatattgctttttttgtatttttctcggtttggatgctgagcaaaatcgaagtgaaaatgcagggttcatgtgtttttttttgttcttctgagtcttctccacaaccaaatggatcgaagaattctgaaagtgggagagatgccccaattccaattaggaatcattgagccccttttggaacatcccttcaaattgtaaattttattcattttacctattcgagttctcaaaaacatattgattacttgaggtggcatttggatacattttctattttttacttggatacattttgagtcttcttccttttttggtggtatatatacacacacactatgctttaatgaaggtttcaggtttcttttttctataccatttctttgtacttgaactttacttccttataagaatgatgtttattttgcttgggtgtaga

SEQ ID NO: 98960 - DNA, 587 bp, Vitis vinifera
  Intron number 1 from transcript GSVIVT01019359001 (locus G SVIVG01019359001) derived from phytozome v7.0 (chr-ID chr1 5; pos 505368 to 505954 reverse strand)
ttttctttaggatccccacgagccttccgaatctggtaagctcttcttccccttggtaactgcatggaactctcataatcatcatcatcatctccttccgctccatcatcatcttcttcatcatttaatccgaagcacttggcaatttctcgctttcattatcaccattttaagaggaagaaaattcaaaatgaaaggctttgttggggaagtttcagagatatctgtggccgcaacacatctttttctataaagaaaccacaatttatgagattctcccactgtttcgtgtttgtcggactataaatgtgaaaactttaattcgattttgaccgtttatctcgtaatgagtttggaagattagaagtgttcaatgtcgaatgagagaagctgagccgataattactattattgtcattcatctttgatagctgtccattaaatagcattcttttatccaatttccttggatagctgaaaaatatgagtttcttttactattttgtgtttgttgggctggaaatttggattggttttgactatttatcactgtaggatatcagaagaataagagtgttcagtttcga

SEQ ID NO: 98961 - DNA, 740 bp, Vitis vinifera
  Intron number 2 from transcript GSVIVT01020164001 (locus G SVIVG01020164001) derived from phytozome v7.0 (chr-ID chr1 ; pos 9529318 to 9530057 reverse strand)
cattgcttactgcattaccagtcctcctccttggcgtgagtttttctttttctgattctctgttgtgttatctttattcttccgttactttttcttttgttggctcgaaaacacagagaaggaaaacaaagtaaaactgcaataaatgttttcccaaatattgcaagatctaatgttcatgctgttctcccccccccccccccccctttttttttctctttttatttattcgtttctctgttgcattccttcggtcccagatacagaatgattcttgtaatgcactgttaataattgcttttgctcttttttttccttatttcaaatggttttgatgcactttgtcgcatataggtctcctttgactctgttccatataatcattttcacttggaccttgatctttttgtatttctttatttttctgtatccatcttttatttatggtcacaaagatgtaattccttacttgtttagttttttcatacttttgtttgtacccatttactttgtattttttttttcttcatgtaggaaattcatattcttctgtttttgctgcatttgatgaacttgatagaacttctttgggtcggaaaacctttgaattttttttttctatctacttattttctgaactacatttgtttctctgtggataatcctccttggattatggtaaactgtggatgtttcttaatgcagctgaggccatcctacttggcttccaacattacttg

SEQ ID NO: 98962 - DNA, 876 bp, Vitis vinifera
  Intron number 2 from transcript GSVIVT01030218001 (locus G SVIVG01030218001) derived from phytozome v7.0 (chr-ID chr8 ; pos 10345850 to 10346725)
gggaggtaaagattgcgggcaccgagttcctgtgagtttctgtctttttcctttttcttctttctgggtatgatggttttagttgtttatgattgagatttatcaattaattttctttaattctttttgcaatgaatgagaaaggccatttgttattggaagagtctagggttgttccatgattttagaatggctgatttgatgaacttttcgtgtttgcttgaggttgataggtttggctgatcactctgcttaccgttcaaatgttggtggcattttgttgttgtttctaaactattttgtttgtatccatgttccctcatcaattcaaaccatacttgaaagaatgaacccttaaaacactgaaaaattggcgatgccccttttgcgcaaaatgctagatgttacgagaaatttttcccaattatcatgaagttgagagttgtgataacgcaagattggattatgattgtgtttaatagcaatgaaatataatattatactgactatgtggttcatctggcaattgggtacttggggaatgaaacaataacagaatctattttaatgagttaaagttaataaatattgtggtataggtgcccttgttattagcactgccatcatcgattccagagaagcacaatggcattagtatcttctgacttatatttgtatatccattattatggcatggtgtacatgctctatttattggcatatctaataattgactagatatagtttcttgttcttaaatatggatgcatactttctcccaattccactgccaattttattgccgtaccttttctagtctaatttttggagccattggcagggagtcagtttcagcttcagttagttcaaaactag

SEQ ID NO: 98963 - DNA, 724 bp, Vitis vinifera
  Intron number 2 from transcript GSVIVT01026913001 (locus G SVIVG01026913001) derived from phytozome v7.0 (chr-ID chr1 5; pos 19439182 to 19439905 reverse strand)
gaaaattgcggaagttgtcagaactaaacactgtgatttttattttagtccattctttgtttggttgatttttgtcataattattgattttttttttttggtgattataatttaaaatacaactcgaggaagagaagttggattttctttttataaattaatgatttatatggtctgagaaaatggaggaaacggaaaggaaatcagaatgtgagtcctaaaatctttcactctttggaagcaaagaaggcagtactcgacttgcctgagccacttttgctgtttttgtcctaaacaaaagcagaaaactgaaaactgaaagctcaaggaacctttggttctacattgggtagattcatcttgttccttgctgagaaaaattctagagagaaacaacaaactgtccagaaaaactgtttggtttaagcgtatttgtaaatgttatttgaaaatacagttgcagtgtgggtgttttgagaatgaaaccaatgatatctgaagtgtttacatcatctgagaactgtttttttatgtttttgttttagagaacctatatttgaaatctatttttaaaggtggagtccaaatatgcccccggacttgataattttgtcttcttctgtttccatggtttcctttaccctagtgatagaagggagagatgaatatctattgaatggattttgaattcattatgttgcagatcgcggagagtttgttgttc

SEQ ID NO: 98964 - DNA, 1035 bp, Vitis vinifera
  Intron number 2 from transcript GSVIVT01025863001 (locus G SVIVG01025863001) derived from phytozome v7.0 (chr-ID chr8 ; pos 11082424 to 11083458)
cagagctgtatgccactttctgccttgtgaccttgatttatcagaggaaaaatttattaaaggtgcatcttgagtattaaaaaaaaaagtgaatggttgttcatgttcaattatcatcttgttaaatggaaatctccatgttcggatacattagccactggcagtggaaaaggctgatagaatgtattcactgggcagttgctaaattatctaatcaaagtcattacttgtagatcaatactttttttttagataaattaaataaataaatacatcaatacttgatcaactagagatttaaactgctaataaatgtacctgttagctggctgataagcaagtataacaatcatagaaagtgtttctagcttttcttcgttcttccgctctgtctgcttagtcagagttggaaaatagagttcaatggatagtaggtgtatctccaccccttccttcctctctcccccctctccccaccacagttatttgggtatttatttttttctttaatatttggatctttgagttttgcttcaaatttcagtaagattcatttaatttaaattaatgcaagtgggaaaaaaatcattttttctatccaaatattctactgcttttacctgaatattaacagagaatttttgctgataccatttttgagtagaagctaatataataattgagctcaattaaaacgtcatgtgattctggacagtaacaaatgcttactgattgcaatgtcttcttgtttctatgaagtaaatgtacgacaggaaaatgtctcattttccttctgttatttaaatcataaacaactttgagaaggaagaagtcctataaggaatcacccataaaggaaacacaagaacaatcaaactcttattcgtgctctgtgatatgttgtattctcatatacatatatattgtgagattgtagattaagtaatgaatatactgcttatgaacatatttcaaccacttgggtttcttttattttcaggttgtattggtttcttttgcccttgctttctgttt

SEQ ID NO: 98965 - DNA, 267 bp, Vitis vinifera
  Intron number 1 from transcript GSVIVT01020826001 (locus G SVIVG01020826001) derived from phytozome v7.0 (chr-ID chr1 2; pos 1500353 to 1500619 reverse strand)
cttcgattatcggtggtcttgttgcttgcaaggtatgttctcatcattccttttaatggttccagtataataggtgcacataaattagtccaattagagctattatttacattttgctgcatataaaatcaaatcttagttctttaggttttccttttattattttttttcttttctttttaaaacaagttttgaggctctttttacattttatttttatttttctattcctttgtttcctcttagaattctctcttttccaggtct

SEQ ID NO: 98966 - DNA, 726 bp, Vitis vinifera
  Intron number 1 from transcript GSVIVT01030483001 (locus G SVIVG01030483001) derived from phytozome v7.0 (chr-ID chr1 2; pos 6084484 to 6085209)
ctttctctgccccaggtcacttttggacccaaaaggtcggttttttttttcttgtcctgtttggttgctgagaaattagggggaaaatttaggaatggaaagaggttttttgaaattctgggacccacaaaacaaagaaccctatgcccaactgaggcgcgagggcttgcatttccctgccccaggtcacttttggacccaaagggtcagtctttttctgttcggttgctgagggagtgcaggaaaacgtaggaaaagaagataatttggggtttattaaagttgggattttcaatcttgggacgttaagaaggaaaaaaaaaatacccttcaatgaaatcaaattagtgcaatatttggaattcagtaatatgtttttttgcagagaaattgtaggggatatgaaagaagttggaaattgaaatttagattttcaaattgtattgaactgacaaagcaagacactttgctcacctgaggcaaatagaactatttgttttattgaaaatgattggggataaggtagcttcttcctccttcaagttcatgaattatgcaaatgctcttagctttcccaagtatgtctgccatgaaaagcaagttttgttgaaagcatcatgaagcataccatgggcataaataaacagacccattcatgttggattaagaatatttgttttctttcatcgtgctaatttcaataagctaatatactgttactgacag

SEQ ID NO: 98967 - DNA, 512 bp, Vitis vinifera
  Intron number 1 from transcript GSVIVT01023886001 (locus G SVIVG01023886001) derived from phytozome v7.0 (chr-ID chr3 ; pos 2667717 to 2668228)
cccaattgagatattccaggaatattcacaaagtgagttggttattctctccccacgctttttttttttttcacctgtacttctgttattagttttgtgcaacgattggatagcgtaggtttcaaaatcagtacgggttttgggtttgaaaaaatgggtttttttttttctttatttattctttttttttttttagtcctcttgtgaattctgacatcacagcaaagttgataaatcagatgttttctggaatgggttttcatttttcattgagatgattttagtttgaagagtatttcttgtgatttctgagtctggctaaggttggattttggaacaatggtgaaaaccatactttttaatcaaccaaaagttcaagaatcttttcatttttgggtttaaaagaacttcaatcaaactacttttttcccttagttctccatgaaattgtgttaggctgcttcctctgaaattcatttctgattgcagttccaaaagaatatttgttgacg

SEQ ID NO: 98968 - DNA, 648 bp, Vitis vinifera
  Intron number 4 from transcript GSVIVT01023886001 (locus G SVIVG01023886001) derived from phytozome v7.0 (chr-ID chr3 ; pos 2669283 to 2669930)
tctgcaaagctctcgaggtctcttctacttctcttcaactttttaaatcatatttgaactaagaatgttggattctaaagagcatggtgaagatccataaaaattacacccatttctggttaaagaatgatggatttcagaccagattaaattgtatggttacatggttgcttgacaaaaatgcatgccaattagaccctaacatatggaagctctccctcaaatgttttcaaccatatacttcttgttccatgatatttgatgagtggaaaacaccatttattggtggtcagatgttactagaattcatttaatgaatctctacacgtaaactccattaacactttcacttattcatttgactaaataatcacctttgtcaccaaatgaaccattcaatggttcctctcgttctgttgtttcttgctgttctttgtacttatttattttgccttactttctcacagttttctcattcaattgcctttagcttcctcctttttattctttttatcattgcaattatgcttttcttcccatgtaaatgaatagttttgcattgactaccacgaatttaacagatttgagtctgaataagcattctgattttcaggctgttgatcttcggagttctgaagttttaatccc

SEQ ID NO: 98969 - DNA, 545 bp, Vitis vinifera
  Intron number 1 from transcript GSVIVT01023620001 (locus G SVIVG01023620001) derived from phytozome v7.0 (chr-ID chr1 1; pos 8113276 to 8113820)
acagaaaggggaacgaatcaatcagtcacagccaggtaaggctaaccctaaccctctttcttcttcctctgatcgccaaattttcttggggttctgtttgtttcgcagaaaaaaatttatgggaaagattttttctttttttaattttatttatttatttatttttctctgtgaaaaggaggtataatttttattgtgaaaaggaggttttcattttcacgaagattcgtgttttttatggaaaatattttctgttgcgagcattttgatcgcgagaaagtggtgctcttttgtacggatcatgtgacttagggttaaatccagatggctgttgtaataatctgatcttacctatctttctcgttgctttcttgcgttaatggtagattgtgatttttgctaaaggatcctttcttctcttgattatagaagaatttgaattcgtttttattgaatccactttttttttcttttttttttaattttagggtttgggatttgagattgaatgaatttgattgcaggaagtcatataggacttgaag

SEQ ID NO: 98970 - DNA, 398 bp, Vitis vinifera
  Intron number 1 from transcript GSVIVT01019618001 (locus G SVIVG01019618001) derived from phytozome v7.0 (chr-ID chr2 ; pos 2003317 to 2003714 reverse strand)
ttcttggctttgaccagaatttgttgcaaacccaggtgagagagatgctcttggttcctcctcttttgttgtaattttgatttgttgaatcatttgggcgttttgtgcgataatctgttttgatttcagtgaaatctgttttactagatgtttaatgggtttggatcttctttgtgtgctgaatagtgggtgtctgttgttttgttgtaagatcgatgttgggtgcttctgtttttggattttgtggatttaatggttggttgattttgaaatatggattcttttttgtttggataaggaagtgtttttactcgttgattgaaaattttgtaaaatacttagggtttgaatatggtatttttgtgtggcaggatctcgtggactgaagctagcaaatc

SEQ ID NO: 98971 - DNA, 422 bp, Vitis vinifera
  Intron number 1 from transcript GSVIVT01025110001 (locus G SVIVG01025110001) derived from phytozome v7.0 (chr-ID chr6 ; pos 4348358 to 4348779 reverse strand)
tgcgtttccgagttcatcagtttcatcaccagcgagtatgagggttttgtttttaattgtcggtgccgtaatttggctccgtttggtcgctgagaaaattttggaaaagttaagaggaattaaaactttgaattttaggttttgttttgttttcttcttccaggcccgtgataatgaatgttccactttattgagccgattgtagctaattggtttattgagtcgattatttcattatttggaaattgatggaacatcggacataaaagtttcaaagtttcttcatccttttgtttttccggtaaccaaacggggttagggtttttttttttttgttttttttgtttttaatttcaagataaattgactctgttctgggttttgaagagcgagtgacaagtgccagaaggagaagaggaaga

SEQ ID NO: 98972 - DNA, 882 bp, Vitis vinifera
  Intron number 1 from transcript GSVIVT01025744001 (locus G SVIVG01025744001) derived from phytozome v7.0 (chr-ID chr8 ; pos 12303739 to 12304620)
aggtgtgcccttgaagaagcgttgttcctccagaggtatatgcgcatacttatgtcaatctccatcgctgaaattcttaaagctgttttcttttcttcccactcttcccatggaacgaacggagggttagctatttcatgtttcagcttaggtgggttgaatcaattgctcctcgtttggaaacgcgaagaattggaaacataagatcgaaagttttccttcgttttgctcgcttttgttttatcaggaactctatatagtggtagggttttgattatgaatttcttttggaactgcggtcgatggatgacggtataataacattatgaaatccagaatacagttgtgcgaaatttgtaaagaatgtgctctatattgatcattgggaagcttgcttcgtgagaaatcttcaccatgatcatacttaagcttgctttgtgcaggttttcttgtatatatatatatatatattactaaaagctttgttatcagaaatgtggatgtgatcattgcaattgcttttgcaaagtttattcctttttccggttgaggatcctaaagcatggacatgtatgtgaggaaattgatttaattgatcggtttttggatttgctagaaaatcgaattgggccatttgttttaacaattgtagcataaaatgaggatattttgggttttcaccaaactaacattgttgctattttgctttggtgattatgatgatgtctccttgtcatggttaccagcttgtattttttcaatgctatgtaacaacaaaaatggagccattcaatattcatgaaatttccactttggataatgatatttctctaagttctgtcaaatgagttactgtattgtgctctttgcagaactcttgtg

SEQ ID NO: 98973 - DNA, 1016 bp, Vitis vinifera
  Intron number 1 from transcript GSVIVT01027030001 (locus G SVIVG01027030001) derived from phytozome v7.0 (chr-ID chr1 5; pos 18489654 to 18490669 reverse strand)
tgaagcacagtggggagtggagagaggtttcaaaagtaggtatgctcctgatgggtttttcatttttcgaagtgttttttgaaattgttttctatgttttgttttcccattgatctgtctgtgttttaattttgtggtgtcgtttcagttattactgttgttgtttttagttttgtggggttttgatgtttgattgataggtccccatgttctaatccatctctctagtctcgacctagcattattgtatcattttatgtcataaatccattttagggtttgatgtaaagtggttatctcataagggaaaaaataaaaagaaaaagagagtgaaagcaaaacaaacccattgtagtaaaatcttcttatccttatcctattttttgtgtttcttctttttgcagtgatagaccagtgatttgttttttttatgcttttgttcttgaggcacttgaatgtgatctggatttagagtaaagctttcaaatccactaatagtattgcctttgtatgattgctcagtttccttcaattttgatatactacttcctcctagatatggatatgatctttgtcacaagaaaaaacagaggttgtgtttatcatgttgagatcctctttcatttaatcattttgtggagttgctttggatctttgttccaaagttgtgtcatgtggaatccatccacataacattgaaatgtttttaattcatcttatttttagagggacatgtttgggttttatattgtctatctggaatagatggaggatgggatttggttacaagtccttaaacttgattgttggtttgtattatctttgatttattgttaatttttatgttgtttgcctctgtattatgtagtaaacaaagtttttgatctattttccctgtatactttagtttattttcttattttttgtgcttatattattctgttattcacattatctgatatctgatattgattttccatacatcttcgatttcctcatatttgatatgttggcag

SEQ ID NO: 98974 - DNA, 800 bp, Vitis vinifera
  Intron number 3 from transcript GSVIVT01025850001 (locus G SVIVG01025850001) derived from phytozome v7.0 (chr-ID chr8 ; pos 11220719 to 11221518)
ttgctaaaggtatgataaaaacatcctcccctcaatttttttgtctcatagttggtacttcttctgatctttgttgagtagcttgccagatgatttaaatgtaattggattctattattctctttttcactgttctgtcatgtttattatttgaacttctctctctctctctgtacatatgtgtgtgtgtgtgtgtgtgtgtgtatgtataaatgcatccatatatatgtgtgtgtacgtttataaatgttatttttaatattaatcttgttcagttcctttgctcattttgcttttatttcttgagaaaaatataccattcgtatgcctgtacaacacacataagttggtatcttcagatgataaaattctatagaaatgacactaataatagcaaagtaattcttgactcctttttctgaaataaatagcagatgatttttttagcaaatggatatgcaagatttatgcatacaaaatgtgcatctgaaagaaccaccctgaaactccgtaagtgtggagcaccatgtaagaaaataatgagaaattacatttgcaatcacttccactaaaacaatcttgatagacgtttataataattgtcacttgaaatggtagtctgtacacgatatttgaaatattgggtttgaactttgactgagagatgttatatttgtggtttttatttggtgattatatttccttgttctaaaccttatttatcttatttaagatgatgattttattgcctcatattatttacagggctagggacacccattcgacggggattaggaggc

SEQ ID NO: 98975 - DNA, 607 bp, Vitis vinifera
  Intron number 2 from transcript GSVIVT01028227001 (locus G SVIVG01028227001) derived from phytozome v7.0 (chr-ID chr7 ; pos 4775338 to 4775944 reverse strand)
ttcaagagtcatctattgtatatttgtatttgaaggtgatctttaagtgctgcaccgtctatttattttttaagcctcttatattctataaagcttccgctttattttatatcagatgatgcggttctcattgataagcttgcattgttttcatcacaaatcccatcaattttgcatagaatatgttggcctcttttaagtattggatgagacagggtaatcctgcctataaattggaagctctgagcattaggcctttcttcatccatgatcttcttgatgggttcactaggttttttttcccttcactgcatcttattgtgtttagcttttctgtgattatttcattttcaatgttttccaagttgtttggcttgaatgaattcccaccatattagtcatagtttaagaatcctagactctgaacaactagaaatgaaaaacaatgaatgtattctactgatgttcatgaatctctaaggctactaacagatcaataattctcctccatcttctgtgggtgtggggtatggagcatgttgaatagaattttcaatacacttttgttttgatcttgtggaaccttcctgcagatttgttctcgaag

SEQ ID NO: 98976 - DNA, 903 bp, Vitis vinifera
  Intron number 1 from transcript GSVIVT01028135001 (locus G SVIVG01028135001) derived from phytozome v7.0 (chr-ID chr7 ; pos 4077635 to 4078537 reverse strand)
gtgcgcagatttattagcagcttctagcatcgccggtaattataatgttaattgtaattcacccgtagtttggttgcggttttttatggtattggagtttttgttggtgctccggttggttgctgagaaaatgtaggaaaagaaaggaaataaaattctgaatcttacatttttcgttgtttttgggaccctaaaaagctacaacctcgcaaaactgggtgtagtacaaatatttagtatagttctggtgtttttttctgttcatttaaaagctttggtctggttactgagaaaagatggagaagacatgtaaatcaaagcacggatcttagattttctattgttttccgattgaacaaagtaaagccttaaatgagctaagccaaatatgaatataggctgggctgaggtagaattttcactttagggatccaaagcacatcaagtatgaggtttttatttcattaaaaaaagggtgttttccttaatgtgattcaaaatttactttcttattatttctcagtcttcttggcaactgaaaggtgtaagtaaatctgtgaaatgcagggcagtaggttgataatttgtaatggaattttgagttgcttgtgttagggttattaattttgaaggctgttgatcctatgtatacctaagtcttcatttggttggcaagaagcataaggaaagaaatgattgtgcacatgtttaatcccctgtagatgcaaagattttataagtaattcaaacatacaatttctttcttttctttggaactattaggttatacatgctttatagtcttagtgcttaggttgtcatggttgtggtatggtttctttgttctttgtagatgaacttttcatatgacatttggattgcaggaattttgagaaaggcaga

SEQ ID NO: 98977 - DNA, 852 bp, Vitis vinifera
  Intron number 1 from transcript GSVIVT01019440001 (locus G SVIVG01019440001) derived from phytozome v7.0 (chr-ID chr2 ; pos 706183 to 707034)
aaagcctgttcacaaggttctcggcggtggaaaacgtacgtaaagtgtacaccatcgatgatctttttttttttttttttttttttttgtgtggttgctaggaaaaaaaaatgcggcttgagaaaatgggaattcgaaatctgaacaatgatttctgattaattgtcaatgataagtttttcattttttgggtaatgttttcaaacctgattttgatgacggtctgggaaattgccggaaagggaacgagggttcggaatccaaactctagttttctgattcatcactggttcatgacgaaacatctggtttctttttgttgtgggttttttggatctaatttcattgagagtgtctagaaaccaacctttagaatttggattcatattaaaccctagttttatgattgtttttttattacttttgtttaaaattttggctattttttatttctagatctaggtatgttcttagatcaggcatgcggatcgatagtggttctgataaagtttaaacttttcgttcctttaccaaagctgctagggttctcacatctttttgtcatataaacattcaaatttaaatctaaataattgtatgctcgtctctttgcttaaaaaaatggaaaaaaaaaaaagggtaaaatgaacattcgaatctcaggtgtcattctggcttccaaaatacgaagacaaaccttcatcaattcgaactgaaaaatctaaaatccaaaattttctcagcagccaaatgggtgcctgttccacaccgtgggtccatgtgtaatgttttattggaatttgagggaaaagctctaatttagttctatttgctcttttgttgtagctgctg

SEQ ID NO: 98978 - DNA, 731 bp, Vitis vinifera
  Intron number 1 from transcript GSVIVT01028739001 (locus G SVIVG01028739001) derived from phytozome v7.0 (chr-ID chr1 6; pos 19251029 to 19251759 reverse strand)
tactttacaaagatcttcacagaaataaggtatgcagtatattttgcttctgtttatgatcctaatgcataagagtctaggcatgaatttgacttccatcaacacaaaaataaaaacaacaatatgattcatgttaagtagatgaataaatcaaacaaagcatgcatcaaattgatctcatcctctctgtttagagggttccactcagaatatagtcatgaaactgaagttggctagagatttatttacagagtaggatcatgtcctattgatatttgacaaaacaagtatatttcccagcaaattgaggttgggcttgaacccgtttaggagacatatccataaactgaacctaagaattcccggtatgtttccaattcaattgaggttggctgggatatatgtataagccattttggcaatcagataaaagggttacgcttcttgtctacctatgataaaggtcttcaagcatggaagaggtataactacaaaaaaaaaacccgagaaatctgggtatggattcagtaaagactgtatagttgaataatgtcagttccctaatgaccaggagagaaaatatgaatgatctaactagaaaatcaaaatgtcggttaatctctttatatgcatgcataagaataatgtgtccttgcttccccatcaaatggtaatgaattatatgttatctaacaggtcaggaagatcccagatacattcttgtcaacatc

SEQ ID NO: 98979 - DNA, 947 bp, Vitis vinifera
  Intron number 1 from transcript GSVIVT01020533001 (locus G SVIVG01020533001) derived from phytozome v7.0 (chr-ID chr1 2; pos 4737243 to 4738189 reverse strand)
ccctagaggtcactcgttttctctctctttctttcttacccctttatttggttcccgagaaatttcaggaaaacggaatgtggctaaatgtctaaagcccctaagaaattctgtcctacccagaaatcccagagattttttggcacctaaaaatttttcgttttggtttttggtattaagctctgttgcttccttttctcatattttctcggggactaaaccctttttttggggggtccttctcggtatatatgctcgatggggtcaatataaattgggaaaaatttggagattgtacatgtgtggtttgagttatgaaattcgtttcttcttgggtctcaattagttgaattgaaaattttaatttatctgttcccacccaatgactggaataattgctcagctatgtgcatttctgatcttttgttaagacaacctactgtaattatttgtatatatttcttaattttgtaatcccactagtggctgatacagtggtaatgacccttgagtagtatgcttgttcataagtcattacactgagtggtagaagccttcagcagcataggcaatgcgacaggatggatgaattgagagttttgtaccaaaatagcacattactccaagcatagttgacaaaaacttaaaatacaggatgtcatacatgtggtgtggtgctgatcttgtgtggagtgattcatatcactggtatggctgcacaggttgattgcatattaggcatatcttattatgcactaacacatgataagcattgcatgacatacgataacatttaatgcctatgatatgttgtggttgaaagttgaaaccatatgaactggatattaatgactaggtcgaatctcaacttcttccatctttttggtcataccactggttttctaacccttgtcttctgttattatgctattcagatatctcagtgg

SEQ ID NO: 98980 - DNA, 911 bp, Vitis vinifera
  Intron number 1 from transcript GSVIVT01025199001 (locus G SVIVG01025199001) derived from phytozome v7.0 (chr-ID chr6 ; pos 3427982 to 3428892)
cggattctgaactggggttttagggtttatcagaggttcggacaaactcacttcttctcttttactgtatatatatattttttctgttaaattcttttcttcttcaacacattgcttgcatttcttttactctccatttggtttctgagataatggaaaaaagaggggaagaagaggaaggttttttttttttttttgggggggcgtttattggttagcagaaatggaaaaaaattcagctaagtttaatgatattattaattctagataactggagattttggttttttttgggctcccacaggacgcaaaagataaggttcctcatgttgataatgttttctttttcggcattttctcagcgaccaaacgaactctacaaattttggttgacggtaaaattgggacaaatgttacccttttgagttatttcaattccgaggaaagaaagaaagtctcgcagctttgatttttggggttccaaagaatgaaagtttttcaaaattttggttttctttccctttccgttctttttctcggcaaccaaaggcgggttttcagtcaaaatggatgacgttattgattctctgaaacacaaatgacgtcattttacctttttgtcatcaccatattcccactaagcaataggcaaaattaacggataaaaaatatctctgcatttggagagtcctttatttagtatgttccaaaagctttatgcgttttgggctctgtagaatttgaatggatgtaaataatattatgattatatagcaaaccattctatatgataatcttttattcagagaaggttttcagtattccttttaagttctgtgcatgaattgcatatacgaggggttgaattctttttctaaatttgattatttcttcctttgcattttagtatt

SEQ ID NO: 98981 - DNA, 855 bp, Vitis vinifera
  Intron number 1 from transcript GSVIVT01025843001 (locus G SVIVG01025843001) derived from phytozome v7.0 (chr-ID chr8 ; pos 11308018 to 11308872)
ccaagaggctctatcaagcttggaagggtcgcaatgtatctctctctttctctcactttgaattttctttcaattttttttttcaagaacccagtggaaataaaagttatgggtatttgtatattttcgatttccatttaatttaacattcacccatgttgtcattttcaatggtttttcatttcaatcccttatgggaaagggatatggtttgctaggtagaagcttaaatttagaaatgaagaatttggaatatggtttaatggggtatggcatgaaatccttggagggctcatgggtgggaaatttaattgaaaaaaaaaaagctactttgtgagaaaaagtgatggaatacttgtatttgaaggatattgaaaatttggatttggaatatttagggttacacagatgatgttgcccttgtagaatagggggcgttgatgaaagtatccccttgaaataatttttcatgattcaggtgaaaaggtcgaattcttgatcagaatgagttctccatagtgtattttgtggaaaacagcaacaagcatgctggaatgctacaatactctatgaaatatgggttatgctctatgaattttattttctgttttcccttttatatgctttttagatcattgaaacctttgaatattttcgaggatgatgatggtttctttttgatgcggaacatgcatgagtgggattcacaaacagacataattttctcaattgactgaaggggttggcccagaggagggttttgatttgtgtttacttaaagataagattttacatattttcttgtcttgtttttctccagaaatttctctgtggagggagattgatctttggccc

SEQ ID NO: 98982 - DNA, 769 bp, Vitis vinifera
  Intron number 2 from transcript GSVIVT01024463001 (locus G SVIVG01024463001) derived from phytozome v7.0 (chr-ID chr1 6; pos 2942069 to 2942837 reverse strand)
agcaatttcatcggagaaggaagaccagggaaaatgtaagaaaattgtactctcttttggttgtttttttttttttttgtttttttaaatttaaagcaattgttttaatttctggaatttggggtttgttttttctctcttaaatttgatttatgagactagggtttcttttttttttgtttgtttgtctctctgaaatttgatttttgatttgatatatgaaataattgttttgatttctggatttttttttccaagatttgttttctgagtctagggtttttgattgatttgcaatagggttctttaaattggttcttcttttgatttctgaaacaattattttgatttctaaaatggggggtttccctaaatttgatatttgagatttctgtaatgggggcattttgttattatgatatttatttgttcctggtttgatttccaaaacaattattttgatttctgaaaacagatgttttccttgaaattgattcctggatttgtttttttgcttgatatctgaattagagatttttcttttcaactgttttggtgatgggagctttttgattttttttttttttaaatagttttataatttttttttcttaataattattttgatttcagaaatagggtgtttctttctttcaaagttgttttctgtctcctttgtttcttttaattgatttctgtaacatgggccttttgttttgaaattcgttctacagttggacagattcattcccaaccgatcagccttgga

SEQ ID NO: 98983 - DNA, 649 bp, Vitis vinifera
  Intron number 1 from transcript GSVIVT01025322001 (locus G SVIVG01025322001) derived from phytozome v7.0 (chr-ID chr6 ; pos 2033082 to 2033730)
aagcggaggtgaggtttgttcctttttcttcatctttgtttgatttttctgggaaatggtcgtgaattttggtaatttgtctttgattgggaaaaaacaatggtgaattctgcacttgttattggatcagatactcttgtagatttggtcaatgtatgaatttgagttctaatttaattaaatattttatttcaatcaaaaagcaggaatttttttgtcagggtttttcttttgaatttaagaatgcatactaaattgtactgatggaggccatattaaatttgggtcaaatcctaatcacaatacaaaacttgttttcggacccaagtttagataccaaatggatcatgtctgagtgtttgcctcataaaaaggacatgagaaagtcgtctcatctaaaattatagtcataagtcatagcttcaaactgaaagcaattatatgaatttactttgcaaaattgagtgtgctgtaaaacacaaagggtataagtgttgaagctttctgggtggtccatgaagccgaggacttcttgatctattgggttgtgtatctttgcatggtgagaattgaaatgattcgtaaactttttcaatatttgaattttaatgtattgcatttgaagttgtaggtgcttggggttttaccc

SEQ ID NO: 98984 - DNA, 533 bp, Vitis vinifera
  Intron number 1 from transcript GSVIVT01023657001 (locus G SVIVG01023657001) derived from phytozome v7.0 (chr-ID chr1 1; pos 8612365 to 8612897)
tcaacttggtggctttgctctgaggatcaaaaaaggtacttctgaaccatgtttcctggtaactcttttgcttgcatgtgtttctgtgtttgtagagttcttgggatttgctttattttcactgcctaggttgatttggaggaaaactgaagaaatggaaagaataatgaaaatttggaagctagggtttatgttcttttgattcctaaaagatattttttctaaatatcttgtcaactcaatagtcaaatagatgccttttttcaaattttacttttttagggttccaaatgatggaaattgtaagatttgaaattcagtttcttttcttttcctaccctttcccaggaaccaaacagagcaatgaggaatttattttctttctatgatatggaatatatgtttattatttataaaaatctcgatcctattttcttattaatgataaatttgatggtttgttttcaatgttggagaattgccattctttggtccttagattaaatctgtttgttgctgctacttacagtcaa

SEQ ID NO: 98985 - DNA, 852 bp, Vitis vinifera
  Intron number 1 from transcript GSVIVT01022350001 (locus G SVIVG01022350001) derived from phytozome v7.0 (chr-ID chr7 ; pos 18859452 to 18860303 reverse strand)
actgctccccagtctaagtatttgtccaccactatgttttactagttgaattgacatacattgtgccttagtttcttgcaagcacaccaaatcaaccctttgagacctgataagggattttataatttttgtttctctccatttacccctttaacattccaagaaagaatctttaacttcattagctaacaatacctccttccttgtcttttcactcctttctttgcttgaagaccctttataattgacagaaaatgccaactttctgtgctctctttcttactgttcatatcaattaatataggctaaattggggttgtttgcctccctttctagttctcgaataaattaggcgaattaacttaacttctatagacttgctccatctttagttgcagatttgtttacttataccaaaacactttgttagtttaatataaatgctttaacccattccctatctacttaagtttttgggtggatcattagtctgatacaatcaaaggtgtcattcgtatgaaggtttgatgagtaaagttaccataagtatgcaaagcttgacatgtcacatacaaacatctttctctattgttcattgactccacaatttttcctaaatagtagttaaccccaaaagaacttccttagctattcttttaatttgtaatttagtaatcatgtactaattgggttggaaatcaattcattaggacttcctattttgaacattttcattttctttagaagttgaaattaaatttgcaataatttcttgtttgagaatttatccaaaacaaagtgtgtatattttttaatttcttgtggcactagatcccacatcagagaaaaggc

SEQ ID NO: 98986 - DNA, 638 bp, Vitis vinifera
  Intron number 2 from transcript GSVIVT01028838001 (locus G SVIVG01028838001) derived from phytozome v7.0 (chr-ID chr1 6; pos 18234062 to 18234699 reverse strand)
atcctttttgaggtgcactttcactatttcatttgtaaaatttgcagctcactcttgcctaaaccttaaccataatgccatgaaagcctcaacccattggtttagaaactcaaagggtctgtttggtaacattttttttttttgaaacagtttctgagaaattttcgataataaactttaatatgaaaaaacagttttcttgctgccttatcctccgtgaagatactatatatacacttatgtagaatacaaaagtttttacggcattcttcatatttcaattgtttcttgaaacattctataaaaaacacctcaattttattctagaaaacaactattttcaggaaaaaaaaattgaaaaaactcatgttctcaattttacaagttagaaaactgttaagaatagtttccaaacagagcgaacacttcagataccattcatacaacatggaaatgttgttagggtccatgatccagtggcttgagatgtacccatgttttgatttattattatcaatgatttagactactataccaaaaaatattgaagatgtttgaatttgaccgtaggtattaacactactcttaatgttgtgcagaaagtggagaaattagttaaatccgatttcttcaggctc

SEQ ID NO: 98987 - DNA, 636 bp, Vitis vinifera
  Intron number 1 from transcript GSVIVT01030053001 (locus G SVIVG01030053001) derived from phytozome v7.0 (chr-ID chr1 2; pos 9272447 to 9273082)
cgccggactgttaaaagcaccccacaaagcatgtaagtgaatactcttgagttttctgagtttttgagtaagctgtaggagcaactacaatgaactttggcttcccaaatttacttttgattcccactgggatggtgggatgtgtccatgcagtagcctgcttccattttaaagcttgaaatcccatgcaacaactagatttcaatcagtcttcatggaagttgctttcatcgaattcaatattttatctctttcctagaggcatttcagagaaccgaaaaaataggaaaatagtaagcttttgaagggccttttttggatctgcgatctgcttagctagtctgtctttgccagacaaattattgaagaaaagtctgattggaaaacttcaacctaattgaaatatatgtagtggttttgagcatgatctctggcgaattcaccaaatgatatgctctgtttaatctagagaatgttatattaggagacaagtttttgaattacagtaggaagaaataaattgcatataaaccaaattgtgaaagttggcaaatagttaataacatcaaaatctgtaaacaaaggttaattaagatctgatttacatgtcctgctcctgcaactgaaaaaacaggt

SEQ ID NO: 98988 - DNA, 300 bp, Vitis vinifera
  Intron number 2 from transcript GSVIVT01025494001 (locus G SVIVG01025494001) derived from phytozome v7.0 (chr-ID chr6 ; pos 330163 to 330462 reverse strand)
ccaaaactttggaaatccctgagccaactaaaaaggtagtttgctgtttcatttgggagacataatgtccgttggaaatatcatagcccatagggatgtgaattttgttgtttgaaagtatcattttcctgtgaattttggtttaagaagaaaattttttcctcctattttgaactttgaagcttaaaggtgaaaacctttggaaattattctccactgaagtaaatgagctgaaatatctgatttatactgtatttttgtttttaatgcagccttctggtaatcaatttggggctgttg

SEQ ID NO: 98989 - DNA, 635 bp, Vitis vinifera
  Intron number 1 from transcript GSVIVT01025494001 (locus G SVIVG01025494001) derived from phytozome v7.0 (chr-ID chr6 ; pos 330470 to 331104 reverse strand)
gctgctgttgctcctcctgcggatcgtatccttatttcgtttcttcatatgggtctctctctgattgcttgtttgtggatctgtctagggttttgtttctcagccttttcatggtcttctgtcgtctgctgatgcagatccgtgtatgattaatctctgttgcttattttgggtctggattttatgtttattttgttgaggttccttctctactaaggttgtgcttgatttcacttgtttaggtatcagatatccggaagttaatttttgaagtaattgtttagctgttttttttttttttttttgttgtgctgaaattctctgcagatgggtatctgggatgggtttgcttctgggattttgttttcctgggatataaatttgttcttatgatttttctttcaagatctgagcttgttgagttgacagttgtgcttttgttggtgtaattcgacctgttctggcgaaatttgattgttttgtgttgtttgctgtattgggtgtttgaaatatgtgggagctgtcatgagatagtttccgtgatttagtactcggattggtaaagaaggtgtatttccttaattttttttgattgtatagaagctgcagagttgcttcagaaattgtcattggat

SEQ ID NO: 98990 - DNA, 747 bp, Vitis vinifera
  Intron number 1 from transcript GSVIVT01019055001 (locus G SVIVG01019055001) derived from phytozome v7.0 (chr-ID chr4 ; pos 17296220 to 17296966 reverse strand)
ttttctctccgccccttcacggttttctccccgtgagtattttttcaaaatttccgaccttttatctgtttctatgcatgtttttcaaccggatatgcttttctttgattcccctcttgcaggaaatttctggattttgtttaattcacatggagttttaatgggtttttttgttgtttcatatattgtttggtaatcgttgtaataatccatgtgtggatatgttaactgggtgtattttctccaggagtggggttgctttttcttgaatatttttccctggagatttttggattttctttacttcttctaggagtttatttggtgtttttgtgtgcttgtttttgtttggtaatttttggagtgacccattgtgtgtgtgtgtgtgtaattcgactgtaatttcgttaagattttaagcaggagatttgtggggttgtgtaatttgtcttgaattttagtgggtttcttcttctttttttcatggtttttttttaatttttttaattctttaattattcaaattcagtttctcctctgttttcatgtactcttaaaaaaagataatatgaacggaggggttcaattcatgagcactgtctgtgcaggaatgtgatctacatgaagattattcatgtcttgaagtgaatttatcaaagtgtaagcagttgatttaagtttctcattgtgttttttgatttattggatttgacagttttatttgcatcgcctgagagccaactagat

SEQ ID NO: 98991 - DNA, 475 bp, Vitis vinifera
  Intron number 1 from transcript GSVIVT01023673001 (locus G SVIVG01023673001) derived from phytozome v7.0 (chr-ID chr1 1; pos 8927222 to 8927696)
ctcatttgcaggcacctttgggtacactgctccaggtgagttttctttgcacctttcttctttcatagttgcaccagcaagatgatccaaagctgattactattgcatacatttgagttggcaccatattatagatttagtatttcattaaaacattatagactggcaaatctgcttagaatttgatgaaactagctaccgtcccttcttcccctgacctgcaactttgaggtcaagacatggcaatttaatatccttttggtttccatttttgtttgttaattttttttagggcaatttatttgattcttagctattaaattctaggttccttaaagttccaaagtaaagcgtagtagtttaagtaagcatgagaggtaacgtatgactacatgcaaattaatcattattaagaaattaatattacatcatgatcaaatcttttttgcagagcttgcttacacattagaagtga

SEQ ID NO: 98992 - DNA, 811 bp, Vitis vinifera
  Intron number 2 from transcript GSVIVT01029241001 (locus G SVIVG01029241001) derived from phytozome v7.0 (chr-ID chr1 1; pos 18138445 to 18139255 reverse strand)
ttgtagcattggtacaccaccttctttcttttataagtctctctcttttatataagctaacaaatactagaagattttgactcaacattctacctattttatactattattttttgaatattaatttaggcatagaaagcttaataatgctaaaagcacataacatggtaaccactaccattatcctatcttctccatttgtgaatgactactatttttataaactcatccttgtgcacttcactttaggctcttctttgaagtagtcataaaatgtttatataatagttagctttaggagaggaaaaaccttaatattaatgctatcttaagaaattttagtgccattggataaaaagaaaaaatgaaattatgaaatttataattttttcttctatacaattgcctccaaccacttactaaggtgctaagaaaagatgggaagtgaagcatttccctgttaaggatcaatagtataaccttgttagcttggtatatgttgtaagcccaaattttagtagtttaagtttgtaggaaaattggtagcttaatatggttttagagcctactgcctaagttaggaaagttggtagcttaataaacctaataaagaaacagatacacagcctaaaagcttcaatttttttacacaaaattacatctcatgctacttaatgaattgtttcgagattttagtgaagaattttgagaaggcaacttcttttttttgcctgagaaattaataatagtaggtggaatcataaattggaatgcaggcaggggggccatcttataaagtggaactggggag

SEQ ID NO: 98993 - DNA, 556 bp, Vitis vinifera
  Intron number 3 from transcript GSVIVT01021874001 (locus G SVIVG01021874001) derived from phytozome v7.0 (chr-ID chr1 4; pos 6133196 to 6133751)
cagaagagaagggcctgattacgcctgggaaggttagtaattgaattaatccttgtatctggacatgttttgatattctttttaggtactgttatatgccttatatgactccatcagcttcaaaatttacattttctcaacaactaggaccatttgaaccatcaaatcacatgccatcatttttggagatcctcataacacctgtgccaaaaaaggaatgactccttgttttggtgcattcctcggtcttctttgcatatgacttaggttatatgactttcccatcatcagttggcaataaattcataggtgatgattattacttctaggttcaaacagggctatagcattcatggatttagtgtacagattaaatgttcaaatcagggtattgtcccccgagagaaaccacttttcctttttgtctcttggacggttttcattcctatagtccaaattacagagcattttttatcagtatttctcttggttatgaaatgtctagatgttggttcatgcagactgtccttatcgagcctaccagtggcaatactgg

SEQ ID NO: 98994 - DNA, 633 bp, Vitis vinifera
  Intron number 1 from transcript GSVIVT01023973001 (locus G SVIVG01023973001) derived from phytozome v7.0 (chr-ID chr3 ; pos 2020391 to 2021023 reverse strand)
tgctcagtgaaggtcttttggaagttggaaaccaagtaagtgcagaaatgggtctgtttatggttaaaattttccaaatttttgcttcttaaactcattaatttacaattcacattcagattcatatattaatatcagaatttttttttttattttagcaattcaaaaacttgataaatactgactaacgattgaaaagaaaaaaaaaatgatcaaaatctttttattttatcatttttttaatctgggttgtttcaaatttttctaaaataaagaaaaaaaatgtgatttttaatggaaaataaagtgctgtgaggaagtggttttgggaactcaagagctattgggcatggttgaggggaaaatggaagaaaaaatgttgttagatgtttatcgaaatttgttccttttttttttcttctcttctatataaacaatgaaggatttggaattctgaataatttccaatatatttgttttcttttatattttccacttgaaatcaaacaagagaatttaaggttcctagttagttgttagtactatatatacaaatattgttactcataagaattaaaacttttgtattatgttgcagtagtagattagataagattggcagccaattttggt

SEQ ID NO: 98995 - DNA, 779 bp, Vitis vinifera
  Intron number 2 from transcript GSVIVT01025317001 (locus G SVIVG01025317001) derived from phytozome v7.0 (chr-ID chr6 ; pos 2105131 to 2105909 reverse strand)
caatcctattctgaggtgagtttttgtttgtttctacaattttctatctggttgctgagaaagtgagggaagggaagggaagggaaggaaactgaagtttttgagattggtgctttcaaatatgccctgtttctgaaaatgagaaaggtcattgaggacttgaaagtttggtgagaataaaggggaatgattttgtctttgaaaatggaaaaaggggaattggtgcaggaaatgtgtttgttgtattaggtggttttaaaaactgcttttgagaaagaatttctcaaatttttgtgacaggtcaaatatttgttgtgtcttctaaaatgtggccagtttaacaaaaaatttggtcgtgcctgtcagtttcattgctggaaataaaaatagttatataaaattgttcttattcttgcactgaaaatgattatctgaggtttttttggtgaaaataaacccatttatagtaatttttttcttccaaaaactgtattataaaacaacctattgaactttttattgggtcattttcatatttttttttaaacagaaatagctcttgttttcatcactaaacaggtcattggtttatggaacattttctatgttttctcagcaaccaaacaaaagggcaagtgtttaattattcattcatactatttttgtttctgtcttgtttaaatttcaactatgatgcatgaaatattgaactctgacctttttttttttttgtgttgtggaaagattggggcgtttgcacatttgtatcatatcaacgg

SEQ ID NO: 98996 - DNA, 741 bp, Vitis vinifera
  Intron number 1 from transcript GSVIVT01025317001 (locus G SVIVG01025317001) derived from phytozome v7.0 (chr-ID chr6 ; pos 2106052 to 2106792 reverse strand)
tttggaaatctaatgttcgattggatcgcttttgtttctactgattttggttttgccatatagctattaattttctgttcgattccttagaaacttgaggaaaagaaattagacgcgaattagaaattataaagtcatcgatttcataatgcgacgccttgaaagtgaggattggcggtttggtttggccgaagctttcacaaattatgtgttttttgagaagaaacattcattaatataaatagaaaaagaattttattttattctaatagaaaaaaaaatggaattcaaagaaggaaagttgggcaaagcgagcctagaaaaagattaattcacaactgtttgtttttgggggaagttacaaatagatcaaatttgggatttgaaatgatgaaatccaaatgtgatatttgtcttggcttaaaattcaattaatatttgttacatttaaattgacaaaaattcttaattagaatttcaaaattttaatcttttcaaggccagataagaccggcttgccactattatgcgccgcaagaaccctgcgtaagttagcaagaaaaaaggcgggaagccccatcaagctctctctatcgtctatacttcccaatctctctcttcttcccaagaaccctaaacctctgtctcgttaactgttcatggatcgatacgtggttcctcttcagccatcgcgtgatagccttagaccgattcggaggtaaaattctctccatttttttt

SEQ ID NO: 98997 - DNA, 859 bp, Vitis vinifera
  Intron number 1 from transcript GSVIVT01020424001 (locus G SVIVG01020424001) derived from phytozome v7.0 (chr-ID chr1 9; pos 19627084 to 19627942)
tctcgcagtcgaagcgtttctcctaagagaaaaaggttcttcttgcctttttttgtatctgtcttttgagttgtggaaagagaaattttctttttccttctgtttggttgcgggaaaatctaagggcaaactcatggaaatgcgaatgtggacttatgttcatgacgtggaagccacctctcctttatagctcttttctttcagttcacgacaaatgcctcctgtttctattattaatttcaagaataccatgccatattactttgggagtagaaaagagtagttttccttaatattccttccataaacttctttcattttctgttgcatgggtgtgctgaaattgtggaatgtacactcttttatgcacaaacagtagattatcaagcgcctagcaacaaggggaagtacataggaatcttgtggacaagacatgtggtccaacttctagaatttcaattctaaatgtttttagaataccagcatcgatcaaaatggagagatgagaatagtcagtttaatataagagatagtggattgaaatatgcattaaaactcaatattttgcttttctgattcacatccatagaaattaggaaggcctgattttgatggctaggcccacaaggaattgaaattttgtggtgagttacatctttggaaatgagtaggcataacttttaagtaattgttctgtttttcttcttttgagataaagcaatgcaactgttttgtaattgtttgtcatgtttattgtgatgttacatttaactcattgttcacttggatataacatatatatgtacatggttgttctcccacagtcctgaagtagctaagcgaggtcgctccccaccac

SEQ ID NO: 98998 - DNA, 640 bp, Vitis vinifera
  Intron number 3 from transcript GSVIVT01023123001 (locus G SVIVG01023123001) derived from phytozome v7.0 (chr-ID chr1 2; pos 22330928 to 22331567 reverse strand)
gcttgccccaacaggaaaccgagcgcagccaaaaggtaaattatatcaggctaatcatatctttataagggtttctcccccacctgcagatgatgatgatcaggacagtagcagtactgtacatcatctttgatttctcacccatatgtactgcttctcaaagatgcaattcagaaggtgttcttcctcctccctccacaatctgttgttaattcatccgccatggaagaaaattttctgagttttgacaccttcatccttgccacatcagccatacttttaaagaagagagttcaaatcccatggaattaataaaagaaaaaagggaagaaacaaaattaaattgtgagaaacacagacagtactgagtgctgacagtggagtctccaatcttggttttatttcgtatgttgggttatttaataggcaccgcagaaatttaaaacaccatgaatgaactttaaattcagtgacacatgatcatgacccttttctcttacttctcgcaactacaactgatcctcaatgtcagataaatttcacttcagtccctcactttatcataaattgcttcctccattgattctctcctttcttcctctcaggctgaaatatcgctttgtcgcgtgtataagagagc

SEQ ID NO: 98999 - DNA, 917 bp, Vitis vinifera
  Intron number 1 from transcript GSVIVT01026451001 (locus G SVIVG01026451001) derived from phytozome v7.0 (chr-ID chr4 ; pos 23408793 to 23409709 reverse strand)
atttcgctctcagatccgccacaattcttcacacggttcgtcaattccacgcattcccatctcctcttttttccattatttccttttctgtttgtcaaattctctcattttctgttcattagatgcagatctgatgtgatttcgtggttcatttcatctcaaaagacagcagtttctgattttattttttttttgaattttttttggttttgattttcagctgaaactgggtttttttctgtgttgttgccaagatttggtgtagatctgaaccctttctctgagcttggaccagtgattgcttgttgcttttgttgcttcacttgtaaaaaaaaaaaaacgaaaaggaaatctcaattttgattcttgttgatcggatccgccttgtagtgatctagcctttcatttgtggtttattttgaatctggttgtctagttcatatttggaattgagtctgttgaaaagttttgttttgttttgtttttctttttttcttttttttgggttgtcccatataagatgtggaacacatgataatgaaattagcggatgtgacattttctgttttggatttagttttattttctgttggttatttttcaaatttaattttaaaagtttgctaatttatatgtatgaaaatgactggaaaaaggaattttgaaattaatgggatttgaagctaaaaaggggaaaaaaaatgattggcatatcattggatagagagattgcaccacctttagatgaaaactttaaagaaaaatgttatatgctttgaggtgcttgaaatttagtgttcttatcgagtccttgtttggttatttggatgaaagaaagatttagtatttgatattgtatttgattagtttttcaatctccaggtttgaactttgaggagataattgaggtaaaaaat

SEQ ID NO: 99000 - DNA, 900 bp, Vitis vinifera
  Intron number 1 from transcript GSVIVT01027419001 (locus G SVIVG01027419001) derived from phytozome v7.0 (chr-ID chr1 5; pos 16896485 to 16897384 reverse strand)
tttcattcgcaataatcgttgtgtttcatattctggtaaattctaattcaattttggaagaaatggggagaattgagacttaatcgaattgagcttttgtgggttttcctaattttggactaggcaatggaaatgttatatgagatcttttctggtttattttccttagttttcgtggcatccaatcaggagtcgttgaatgtttcttatttggtgttcattgaataatcgtgattaaattcaaattgagttgatgggtaggggttaaaattcaaatattcaatgaattcaaaggagaaaatgtcagtgaagttgccctggtcgagaattatctcattgataattttttaatttaaaccacacttcgacctatttttgtctacaatggaaagaatttaaataaaagacggatgggcgctttcatacttatatagactaggcagactgtgtaaaattgacattgcttgtggtcacttcagagtgtttgtttcatttatgctggaaatatcaccttttctcgaatctccgctacgatggggtccattttactaattcattatggatttaatggaagtatgccacacaagctcttatatggcggcttgggatttagaattaccatatttggatacatttgcaaccaagggtttaatgccggcatttcattgatgttcctttagcaatgagaaccagagtgttgtcattagccctatgatgatttaaattcaatctcaacttcattgaagtaggatctcactttcgttagggctggttttattttataattatatcatgactgctagacaacccaatgtttgtatgtgaatgttttactgtctctatttgatcactctgatcaaattctaaaattctgttctatttgcagcttatactattaac

SEQ ID NO: 99001 - DNA, 538 bp, Vitis vinifera
  Intron number 1 from transcript GSVIVT01023615001 (locus G SVIVG01023615001) derived from phytozome v7.0 (chr-ID chr1 1; pos 8065770 to 8066307 reverse strand)
ccctaaaattgcttcttcctcttcgctctgctgttgtaagttctcactctctctgtttcgttccacatgcaacttctgttgtttcctgagaaaattgaggaaaacagaacaaaagaaaacagcaatctcttccccaaacaattttttcttaatcatgcattgcttccaaaggactttgcccccttttaaaggcgttgtcgcctatttttaaactaactctagttgggttctagatttgtcagagaaagtgaatgggaaagtagtgggagttgctcattctgtgttctatcattaattttgacttgaaaattaggaatttttttctgtggtgtttgcctttgatttatatagaattcacttcacgggaatgtcgaacatgttcttttttatttcttttaaatagagtcttgtgtaatttcacattcttgctgatgctatttaatggtgctgtcgattgtttgtaagagttgttccataatttttctccaggaatcaaaattatcaagcaatttatttatttatttctctgatttcaggg

SEQ ID NO: 99002 - DNA, 485 bp, Vitis vinifera
  Intron number 2 from transcript GSVIVT01019766001 (locus G SVIVG01019766001) derived from phytozome v7.0 (chr-ID chr2 ; pos 3143308 to 3143792 reverse strand)
ccagtccgcaatcagtccacagcttcaccgttaaggtaatattctacatgggtttattggggtttcgtttaattgatgaaattgtttctcctcacccactgtttgatcgaattgctatcttctgtggctcaagaaaacaaaaccctcccctcatcagggcctgaaattttcgtcgcaaaaattttgtgcgtttttttttttattggtcattttctcagcatccaaacggagagcacagtaaccctaaggtctcactttttagaaaaacatgagggctcaactatttatactctttggaggcataagaaagtggaaaaatgattaacttttagatcctcgagaatcgcttaattgaattaaccaagtgttcatttttcttcaagggaaattttgggttactgattgcttgttctaagtttcgtttgggcatttggtttttagttttgttgattttgttaaacctttatgtcctcgttacttgcagg

SEQ ID NO: 99003 - DNA, 922 bp, Vitis vinifera
  Intron number 2 from transcript GSVIVT01026103001 (locus G SVIVG01026103001) derived from phytozome v7.0 (chr-ID chr1 8; pos 24531900 to 24532821 reverse strand)
aagaagtataaatttcttgaaacataatctcaattaccttttttttctgagcattcatctcctcaacatacaataagttagccaacccattgctaaacactcctagttggagaaaataatcaaagtatacaagagataaaatgttgaataattgagtcattatcctctccttttgctttattgaataagataatttattcagtggagtctaaatgacgtgaaactgtgatcacacaacttgaagcctactttacaatggataaatgaatggtctgattctgaatctttcttggcacattagttattatccaatccattctaattaaattatccactattaagtgtctatttctagtcaccctccaagttatgaaagacccatagaaccaaagcaactcacaccacctgtgataggaattggtgctctcttccataatgtcaagttttccagtacacttgctgactttgtagaatatgcctacaaaaagggctgccacctcctaattcccaatcatagaagtttcttaaccatatttcaaaagttgtatttcctgttccctttcttaaagtttttaaaacctatatatctttatcctagtaattcggaaaaatgaggaaattatttaacaagaactccatcaatttgcttctcaaaattttatatagtttgtctctctcacttttgattcaaattcttgaagcaaatgaacaaattcatggccagtaacatttttagccaagcaatagaatgcacaacaagcatgcatatgaatgaattgtgttttttgatgataatagatcagatattttgatctcatcctaaaacctttgagttagctaaaagctgcatcttatgttctgacttgtggtttgtttcataatataagtgaaatttcatattatatcccaccacaagtttcgc

SEQ ID NO: 99004 - DNA, 1055 bp, Vitis vinifera
  Intron number 2 from transcript GSVIVT01028378001 (locus G SVIVG01028378001) derived from phytozome v7.0 (chr-ID chr7 ; pos 6833177 to 6834231)
catctctccgtgagagtggttgtttaaactacgaggttggtttctccaactaggacattaaagctttgatatgtcctatcggtctttctttctttctttccctttttttttttccagctatgtggacagtagttttattctagctaggctccttttggatcgtggaaacactagaggaagggaagaagataggaaaggatcttaaattctcttgtttggtttgtcatgaaagataaataggaaaatgaaatagaacctagaccttttttagttctctatttttattttttaatgcaaaagaggaataaaaatggagaacgatggtagaaaaaagtttattgagtttagcttatttttttattttttcacatactttccctgatcccatactagtagtgcatttacttccttatctttattattagaattcagatgaactcaaatgggaacttaattactgaaaaaaaatggggaatctattcttaggttttttctggcatttttatgggagcttttcttatgattaagaatcttaataactgagatataagcctagatgaaaccttgaaattcagtatagaagtgaatgatgaaaatactcaaccagctacttttttggctatttatgtggtaatatcttctgttagaacatatgctatcataccctctttattctctttttatccttgtagtgtgtgttcgacctggacaaaattgttttctactcgtgcagtcattagtattctttgcagagtagcaccattttcaccaacctttttaaatgttaagttttgcattacctttaacttctaaaatattagttctttttttattctgtcatttcttgttttcccatttatctgtcttaacatccttgtttcaaccatgctcatgtcattgatatgcttctgaactgaaagcctaataaatagaacatgacaataatgaatataatttttttactgtggattttcatggggttttctgaatatctgagattaatatgtctgcaattttcaggaagcaagagcattgttagggagatacgaatatca

SEQ ID NO: 99005 - DNA, 140 bp, Vitis vinifera
  Intron number 1 from transcript GSVIVT01019511001 (locus G SVIVG01019511001) derived from phytozome v7.0 (chr-ID chr2 ; pos 1229229 to 1229368 reverse strand)
catcatcaggaacacaaagatttctcaaagaagaggtgaatttgaattcttaggtcatgatttccatgttggttataatcttcagtaaactaactcttttctgtaatttgttttgtttgttgcagaaagacattgcccac

SEQ ID NO: 99006 - DNA, 518 bp, Vitis vinifera
  Intron number 1 from transcript GSVIVT01022616001 (locus G SVIVG01022616001) derived from phytozome v7.0 (chr-ID chr2 ; pos 13456669 to 13457186 reverse strand)
attgataagtggcttatgaaagtatgttggttgtgaaagtcgagaacgtctccttggatttggaaagtccaaaaatttactataaaaagtgacatctaatttaagtttatttgtttagtaaaaaaatttataaaaatttgattacgtgaaaaaaaaataataatcataataatagaattattataaatcaatttttattcataaatttatgataaagaaaagaagaaaaagagaaaaaggagaaaaagataggataactgatacgtggcttataaaatcatgttggttgtaaaagctgagaatatcttcatggatttggaaagtctaagaatttacgataaaaagtctaaaaattggcttttatgtttttatatccaaatggggaatatggataaaaactaacaagaagagaagaggtgagtgggggtgcggttgcggtggaagtggggaatatgggtttgatgagggaaaagaaataaaaagaagaagaaaaaacaaaaaaaaaggaaaaggaagga

SEQ ID NO: 99007 - DNA, 463 bp, Vitis vinifera
  Intron number 1 from transcript GSVIVT01029048001 (locus G SVIVG01029048001) derived from phytozome v7.0 (chr-ID chr5 ; pos 11380230 to 11380692 reverse strand)
accggtttgtttctctctctaacttcctctgttttgcagctctttaccgactcgttttttaggttttatgtttggtttttgagccgaaaactttagtacattatacgattttcttccttttgtgttgaattgcgaacaaattggggcttcttttcatggttacggttttctatttggctgctgagaaagggaaagtacaatgaggttttggagtactttttctcaacttgttttagtttccgaagaatgaaacgtaaaatgtatagagtgagagccttagagaattttggtttctttcactttcttaagttttcttggcaataaccaaacagagctgtgcagtttctgtgtttcctttaatagtcattttattggcctctgaaaattctgagaaaccgtgtttgtactgttgatagtgtactttgagcttttaatctcattgaaaaatttaatatatgcagaa

SEQ ID NO: 99008 - DNA, 573 bp, Vitis vinifera
  Intron number 1 from transcript GSVIVT01028710001 (locus G SVIVG01028710001) derived from phytozome v7.0 (chr-ID chr1 6; pos 19543664 to 19544236)
tgttttcggcgtttgattaatcaagtggtttgaatgtatgatttcgatccgttttttattaatatattttgtttatttaagtttgtactgttgtttgcttttttgcttttggtttggtagctgagaaaattgaagaagagaaatggaaattttttttgaatctagagtttttattgttttgatttccaaaagatggaaaacaagttaaaacaggccagataagtgaggaatctgtgattcaagagttcaaattttccttggttttcctacattttcgccgctcaccaagggagagcatgagctgaggagcaaagtgaaaaaggttttctgcgtctagctcgtcttctgtttttggttttcaaaagctgaaaaaaaaagaacccagctaaactaaggcagatggttgaagaacctgaagttcaaagttgaaaatttgcttttgttttcttcgttttctcagctaacgaaggtagcatatgtataaaaaaatgactcattataatacgattcaacctaattctgtggtttctttatactatttggcagttattttggttaataaaggccatatag

SEQ ID NO: 99009 - DNA, 729 bp, Vitis vinifera
  Intron number 2 from transcript GSVIVT01028710001 (locus G SVIVG01028710001) derived from phytozome v7.0 (chr-ID chr1 6; pos 19544482 to 19545210)
gaaaaggtgataaatgcttctttcaatttcagattatttgcctgtgtggtagaaagctttattgtagggtcaatgcatgaatgaagcaatatatagaactatctcattgttgtttcaccttcatagcatgtgttttaattgctagttgattgaacacgcattgtgttaggttaaattatcaatagcatgactgcttttgaactgatattctattgatttttctaatattttcatttgttttggtgttaaagtttcaaagtagattcatcatagggtgagttatggatggaactatctatagaacaatttcagattttttcactttttgtagaatttgttattatggctggttggaattggatgttcataacttctcatttacaaacttgtgatatcatatttttagttctctccaaaatatgaaagtgaattgaaatatgtttttctctttcctcatatcctccctccaaaattatctacctttttttgggttacaaatggatgtgaagtttctgttggctgtgtgttatgttttggaatcttccataaacactgttggatgatctgagtctgttgagattttgatattttctttgttgctgagaatgtatatgtttgatactagtgactacctgtattagtatgaactgtggtcagcatcactcttatctttggtttcttgtctgattgacagtgaagacggaaaactgagctgtgggtattcaagtt

SEQ ID NO: 99010 - DNA, 808 bp, Vitis vinifera
  Intron number 1 from transcript GSVIVT01028903001 (locus G SVIVG01028903001) derived from phytozome v7.0 (chr-ID chr1 6; pos 17676681 to 17677488)
ataaatcagggtaacaaactccacgttaacatagaattgctctaaattctacttttgaaatagtgttttaacaagtatctgcattgaactcctgttgatctaatctgttgggagactggtgggtcagtgacatttaagttatatctttgaaagaccttaaactacatcttgatgaataatttactgcatatagcactttgtcaaattttctaaattggcaaaattatccccatttcactaccaatttcaacatctggataacctttcatggatcactttttcatgttatgtagctgccctaatttaatgctattatctatacgtcatgtgacaaatctcatcgaatgaatcagaaaaatttgtgaagaatgcttgatttattttgtgtggacttttgggaggattatagatgacaatctttgtcatgaatgcttgaaacacgactcttgctaatcttcatatcactcaaactaattaaggtggaggtttttggtgcaccataacgtcaaaataaacaaatttcatatgtcagggatgcatagcatgccaacaaggcaaacaacccctccaattccagtattacactattaaatttaccgtccattatttaatcagcattaatttgaccggaacagagtagtgtagactggttatacctgtgtgaagtttcacttacccatcctctatacaacattggcacacagtataatgggtacagtgcgtatttgttaaatgttctttgaatttagcaatttattgttctttaattgagttttaacttgctcatataacaggtatagcagcctat

SEQ ID NO: 99011 - DNA, 919 bp, Vitis vinifera
  Intron number 2 from transcript GSVIVT01028903001 (locus G SVIVG01028903001) derived from phytozome v7.0 (chr-ID chr1 6; pos 17677534 to 17678452)
agcttgcacggcgttttaaggtactcgatcttctattggataagaacaaaataggcagtaattttatggtaaaaaaacattgatgaattgcagttttttcaaactagcctgtcctctctctgcaattttattgtcatgatcttttattttttaatatttgattctgttagaccatggaatttttactctaaatcatgagttgctggagaaattttaaatttgacattttttggtgcttaattcttaattataattcctttgtagcctcttatccaaactatctatgcttgatgtaactccccctactgtttcaatggttcatggtatgatttcttctgatttggtaatgaatagtcaccaatgggcttgaggattttcttctgggtaaagatggcatgatcaatccaaatattctgcttattgtgcattagcattgcatacattgtgggtctatttccgaacagcttaagcttttttgtcaaattggttttgttgacataatccaaaaccagcttaactaggtcttgagttctgagtctctccgaccatttatccatgtaaggaggtttagtagccaggtattcattgtggtccattatcccattacttaaggttttaggtctaattggcagcttaacaataggaaacctttctaataagccatttggataaaggttttagctagatatacattgtgggctcattacctaatagcttaagctgttaagtcaaattagtagttgaacaatagaacatctttttgaaaaagctgttaaggtcaaattagatcatgtcattgtttttcatatctcttggatatatgtttgtttgttttcatatcactctctatattttggtattcatgtcatactaagttaaacctgccatcacattggtggttgtttccctgaataggaag

SEQ ID NO: 99012 - DNA, 768 bp, Vitis vinifera
  Intron number 1 from transcript GSVIVT01027979001 (locus G SVIVG01027979001) derived from phytozome v7.0 (chr-ID chr7 ; pos 2936911 to 2937678 reverse strand)
agagcaatcctccctgctctccgcaatcgaaaaaggtttcctccttttctttccttcttccctatgtttgggtgctgagaaaattcacttttcccaggataaaatgggtgtggagtcggaattttgctgtggtttaattctcttattttcttttcacaacctttcctcggaaaccaaacggagcactgtgtgtttaatgttgttgataataactgtcatatgtttgagctgatttcagtagttatcagtgaaatggggcatcggtcttgcgttgtgtggatatggttgaaatcagtggagcaatttaaggataggtaaatctatttagaagtttcaataggttcaaagatacagggaacatcatattctaatggtggatagcttgaatgttgacaatcgatgtctgcaattgagtagttgagttaatcccaatttgtagaaacgtcggaccattcttgcccgctcatcgaattcttttgaatcagtggtggttattgaacctttttactagaagttgtgtttttgatccagatgctgaatgttgttgctgtacaaaaatggttataaggctatgaataattggggtgtatgttttgtagttgcattgtaactattccttctttcaagttgctcttctcaaaatctttgatctgtacatacatttgcgatattttcggatttactctggggatgcagagtcctaatcctcattgacttttcatgtcaaattcttacgtatcttgttttacaccatgtggtttcagaagg

SEQ ID NO: 99013 - DNA, 772 bp, Vitis vinifera
  Intron number 2 from transcript GSVIVT01024454001 (locus G SVIVG01024454001) derived from phytozome v7.0 (chr-ID chr1 6; pos 2777502 to 2778273 reverse strand)
tgggccaaaagtctggtggtggagtggttatcacagtgagtttgtgattctatttggctaatttgcattctgggagtgcttttcttgctcaatctaacagaaattttgctttcaaatcaggaaaattagtctgaacttgatgaccaaacagtggtttgatgatagaattgatggtttctttgggttgttttcaaaaatcagatcgatttttaggcaatagaattggttaatatatggttgcttttgagattgtttggttatctggcattttgggagtactttcttcatcaatcctagtgcatactttttgttttcaaaagcatgaaaagtacttgtgtgattgtttttttgaaattggatccatcttttgtgtggttatttttaaaattagatcgtatttgatcaattagcattttgggagtagtttcttgttcaatttaattgatttttttttttgctttcacaagtaggaaaagtgatttaagtttgttaatcccatgatggtttaatagcagaatgcagggtttttaaggactatatgcttctgactatgttgttcttttcaaaattggatcctttttaggcaatagaatagatagtgtgtttttggaattagacattttttttggttaattagcattttgggactactttcttgcttaatcaaatcaaattcttgctttaacaacagtttgataataggtttgagggggttattctctggttgttttttgaaattggatcggtttttaggcagtggaagggggtggca

SEQ ID NO: 99014 - DNA, 639 bp, Vitis vinifera
  Intron number 2 from transcript GSVIVT01021530001 (locus G SVIVG01021530001) derived from phytozome v7.0 (chr-ID chr1 0; pos 6697630 to 6698268 reverse strand)
acttcgattctgtggataagcagactgtgttgcaggtacttgtcttcaattttatttttattttttttttttatattgatcctcttggacgttactaccccttgtcggctttctgtttgacccaactgccctccaatcttcacgcctcagaagcagcagccactcaatttccactcattgcccaactcccttatctaagctttttccactggttcactttggattcatgaactcgtgatgagttttttttttttccaaacaaaaaaaagaaaagaaaaggaaaggaaaaaaatgatgacaagactcatgctgcccgggtctttctgggatctttgtgttcatatttgtaatttaataaatttctctacaagataaaatattaaatgagaggagttttcatgatacacgtgagaaaaaaaatgaaatcaatttttgaattgagtaaattatcaggatgaatacccttttcaatgatcctcaagggagaattcatgtgaagcccacattatgcagccaaaaaaatgtgtttcttgattaaatttcctacgccatctaaattttccacagggattgatgaatatacttgacagattagtatggatgacaataaatatgtatatataggaaagcatagtgagc

SEQ ID NO: 99015 - DNA, 184 bp, Vitis vinifera
  Intron number 1 from transcript GSVIVT01026156001 (locus G SVIVG01026156001) derived from phytozome v7.0 (chr-ID chr1 0; pos 13095013 to 13095196 reverse strand)
ttatttatttttgtatttttctatatattttgggactactcatttcagattcaggggtttttttgcttcaattttgttttcttcatattattggtgattcatatgtgtgattttgattcttcattatttggaattcttaatctcttgagtattgaggagtgaaagtattgttagggtttatcat

SEQ ID NO: 99016 - DNA, 674 bp, Vitis vinifera
  Intron number 1 from transcript GSVIVT01023070001 (locus G SVIVG01023070001) derived from phytozome v7.0 (chr-ID chr1 2; pos 15910010 to 15910683 reverse strand)
gttgcaacatttgacaaggaatttggaaaggtattaattaaagtttcatatttgagtgtctcttttggttctctgggttattgaatgtatttgcatttattatttttcaaatttttgtttttttcatttgaataattgcttggaatattccattgactaccctagattgaaagataagacatgtagttattataatcacttagagatatacttggtttggcaaatttgagtggcatgtggatttgggccttaaaccccaaatactatgtttgaagttcgactatcaagagtagagtacagattcttcccaatcctaaagtttgtatgctcattcatatgagctttaccaagaacgttggaaacttggcacaaagtaaaatgagtttctggtgtaaagtaccacctccattactatcctaagaaatgtcatataccaatacaagcagctgaattctattttgcaattttgaatcatcatatatatatctgtttcttaaaaccgagcatattactattgaccaatcttctgaacctcatgacttgtaggaaaaaatttatgccaatttctttctcgaatatataccattttattggcactaaggttttcttcttaattatcttgatgaatgccttttttttttgttattttcttattccaggaaattcctttggtc

SEQ ID NO: 99017 - DNA, 979 bp, Vitis vinifera
  Intron number 2 from transcript GSVIVT01027258001 (locus G SVIVG01027258001) derived from phytozome v7.0 (chr-ID chr1 3; pos 17533579 to 17534557)
ttgtctccaatcagttacttgtaacccacatatttaatatccaaaacactaatttgttctcttaaaagtaatttctacagcaattttatcgtggtcaatcccaaacaggcctttattatgatttctatatccatatcctctcttttcaatttcttcctttcattttccctctcatgtgggatgggtaaactttgcactttctaaagtcatctttaatgttctaactgagtggtatcctacataaatattttctacaaactcagaatgacctcagcgacaaaagccaaccccttgaagtagaggtatagaagtaaattgcattcacagctaattttgtcccctattttcaatcaagtcacagctaacaattttatatatagcattcaaattgcattccactccacagactatacaacattcagatgcaaaattgtcttcttacccttccagaaagcctatatctcaaccaatcattcaaaactaggacatagaaatgccaaaagtgcataaacagaatgccaccttatgaatctccacagtaaaattatcaatcttttctcatgtcattcaacattgttttcataattttctcactttcatacaaggagtatatattcaaaaaacaaagaaacagaaaaatcaattaaataggcaagattaattggacagagtttctactggatatgaggtagttggctgaagaagagaaaaattgatcactgatatctgcacactttctttgagcatagaaactcccaagcttaattaatcttccaaaccatcgatcaaatacactattctgagtgagaccgtggaaagggcatctcagcgaaaaaaatccaacaacaaattttactatacaggagctatattttattccaaaaggagacggtctttgatcttgaagcccaaatcaatatatatatatatactaggagcttctgacttctccctggtgtaataaaaagtgagctacaaa

SEQ ID NO: 99018 - DNA, 213 bp, Vitis vinifera
  Intron number 1 from transcript GSVIVT01025913001 (locus G SVIVG01025913001) derived from phytozome v7.0 (chr-ID chr1 8; pos 27305352 to 27305564 reverse strand)
ctcttggtaattgtatttagaaaaatgttttgcattctcttccaatactttccattcaacttcctttcagtaaaataaatgaatagaatggtatttattctatccataaagttaatcaaacacttggatttttggtttattctgacatgtatctgcctttttcttgcaatatttgcagctcaacttctagggttttctaattatattccacct

SEQ ID NO: 99019 - DNA, 661 bp, Vitis vinifera
  Intron number 1 from transcript GSVIVT01025242001 (locus G SVIVG01025242001) derived from phytozome v7.0 (chr-ID chr6 ; pos 2787448 to 2788108)
atcaggttcttgaggggcttggaatatttcagttctaggttgtggctgttgggcttggagaggcatctggatctcctcatatggattgttgacctcattaagattagggttaaggccaagtctcggaatcttagagcttgatgggcctgattcatcaagcccagacgcatgccatgatcttttgtagatcctttcgtctgtcctatagactctgcatagaacacagtcatccaactgcaacaaaaacaaacaaacaagaaacattagatacatattaatctgcacaagtgtcttaacatgcaatataaaataaatgaaaagaggacttaatatataccctcatatcattggcaccacttcttctaggaggccctggaggtttagcatctgtgaattcatgcatgatccagttggttttgactccgttttgagatcttcctcggtagaagactaaagccttccgataccccaccgttcgatccttaaatttgatctctttatcatctccggtggccttccagtatccttctccaattgacctattgggacgttgcccattccaatatttcctatcccttggagtgaaatagaaccattcatcattcccggatggctcgtatctcgctgagtaaaatcaatcaaaataaaaatcaattcatat

SEQ ID NO: 99020 - DNA, 926 bp, Vitis vinifera
  Intron number 2 from transcript GSVIVT01029626001 (locus G SVIVG01029626001) derived from phytozome v7.0 (chr-ID chr9 ; pos 20525989 to 20526914 reverse strand)
atcagcacaggtgatattgatattattagttttcattggttccttttattgacctacattgtttccttattgctattgttctaatcatgattggattttatagcttactgtggaattatattgaattgaattttcgggtcctagttgagctatattaatggcttactatagtatattaagtttctggggcctatttgattcatgttaatagtttaccataagataaacaaattgaattgaattgaattgcatttttgggactattcagttcatgttaagggcttactataggacaggtaaattgagttgttttctggccatttttggggctgtaagttggtttgttgattgatcatgtgagcatttgtgtggttgacttgcaaataagagtcggagtacatgtattttggttttgggaaagtaaggaaagatttatgggaatgttttattttggggtactattttatagcaacccgaaaatgaaaatggggttagttggaatgtcccagttcacagaaataggctacaaaacctttaggagtgtgtatatttatggttttggaaattcttaatcttctgtaacattatctttgatttaatacaagaaaagagtaaattaactagttgatgcaagcagtcatgaaagagaaagcttttcattcttttgattcctttgtttcttgattctctcctctagtgtgattttatgggtgactttcttaggatgtggagtgattgtggatgacgtcaatccaagctgcatattaatgaactgcactgaatccaaacctatcaagaattttgagccttttttgcaattagggaccagaaatttagctcccacttttcaccatctgaccttttttgttttcttttgtttctgcctaacatgtttattctagccaacgagcagtcagaactgcatt

SEQ ID NO: 99021 - DNA, 343 bp, Vitis vinifera
  Intron number 2 from transcript GSVIVT01022501001 (locus G SVIVG01022501001) derived from phytozome v7.0 (chr-ID chr8 ; pos 3977731 to 3978073)
ttcttgttcccggttggagtcatcaccgctagtaggtaaatcaatctcaaatctcttggtttaagcatggtaaaaaatcatcttcctcacaggcatttaggaatgtcaatataaatttgaatttgacaattttatcaacttttttgaacaagcaatatgtagaagagtattgtttcttttttcctgttttgctatatgaagttgagctactggccttgaacatattattctttttatgcattcagagttgctatgacttagaattattcaaagttttgatggctgagtaatatggattacttttacaggtgagttgccttatttgcaaaggctgtggaaatta

SEQ ID NO: 99022 - DNA, 654 bp, Vitis vinifera
  Intron number 2 from transcript GSVIVT01021492001 (locus G SVIVG01021492001) derived from phytozome v7.0 (chr-ID chr1 0; pos 6097170 to 6097823)
cctacacaaaccttctctcacaacttgctttatttgtgggtggaatcaggccatggggatgtcatccatgatttgtatagcaggatggctcacaatctactttatcttttgtaggatatctccaattttcaattataattttgatatatttgtatatgcttttcttcatgttttaccctctggatgtttcaatgtagggatctttttccctttattttaggagatttcttcatcttatatggatttggtgttctttcttatgtggtatgcttttatgagaagtttctcttcttggatatgaagttccaataattatgcaacttaagaagcattaaacatctctctcttcctctggatgaacaggtaccagtctttattgctgaaataacacctaagaatctttgaggaacactagcaacaacaaatcaggttgaagtttttattttattttattttattgttttcattgttttcagaagcaattttgttgaagaataatttatgatggaatgatttcaatatgactgtaaaaatgtgctttaatatgttggattgggtttaaagccttaggcattaactttattgagaggcttgtgtgctcttagtgctttggatggtaacaggcttgtgtgctcttacttggagccacttact

SEQ ID NO: 99023 - DNA, 853 bp, Vitis vinifera
  Intron number 2 from transcript GSVIVT01027975001 (locus G SVIVG01027975001) derived from phytozome v7.0 (chr-ID chr7 ; pos 2919928 to 2920780 reverse strand)
cgaaactgcaaagcagagatcaacagctaagagtgaggataatccaactctatcatctgctcgtttttggttgaatctttgtgcgatctgtttggttctcgggaaaaatgaggaagcattggaagtggtttttcctgagccattttgcgtgcattttcttcttgtttctttcatttttaccccgagacaaacattgggttaggtttcgaggattctgagggcaatttgatggaaaatttagttttgtagcccctgagatctgctttcattgaattattaatgctctgtttcttgtcttgaatgccatgtctttgattttgtcgttgttgctgcgggcatcatcggttgtgatcggttttcaaacagtcttagggtgggaaaatcggatattctatattttttgtaaaagtttgtggatttgttggtggttttttcgtagtaaattgccggagtctgggatatgatatagtggatgcttggatgtaagttggattgcaatataggttgaaccaagaaagtgttttttatgaccgcctctttttaaaccaaaaaaaaatcgaaagaagcagaacatagatcagtcttttccattgggggaggaggtgatatttccaaaatttaagatcaaaaacttccggtagtatcttaatctatttctgtctatgaggcattggaatttcaaaattcatgcaaatggttatgagttgcattttaggatcagattcaatttcatttgttgaaataattagggatgttttaatatcttaatatacttctgctttaggggcattgaaattagaagttactgcaaatggtgatcagtttcattttactaactggtcttgctggcagg

SEQ ID NO: 99024 - DNA, 430 bp, Vitis vinifera
  Intron number 1 from transcript GSVIVT01019310001 (locus G SVIVG01019310001) derived from phytozome v7.0 (chr-ID chr1 5; pos 1450788 to 1451217)
acaaacccatttcacccttttcccaagtttggtaggtatggccctctctcttcttttttctactctccttttcaggaatttttaaatttttattttttatttatttatttatggttgtaatttgtcaccagtcacgaaaatcacaagataatcaaaaacccacttcaccaatttcctaaatttggtgggcgacaactcttttctcctttctattctctttctcaagaatctgtttttcttggtttttttttttgttttttttttatttcttttgggttagtgtaatgagtttatattaatagtggcaagctgatggatttgtaaagtacaattacaaaactttgggtgaagctgaatgaatttgcaattaatcatcactaaccaatcagtgtttctaattcatgcagcattgatttcaatttgaagaaaa

SEQ ID NO: 99025 - DNA, 339 bp, Vitis vinifera
  Intron number 1 from transcript GSVIVT01029503001 (locus G SVIVG01029503001) derived from phytozome v7.0 (chr-ID chr9 ; pos 22233105 to 22233443 reverse strand)
catccaggttaagttcttgaatttaacatctactttacacttaatgtattttacatattaagatcttcttgcatggaatttggaatttgtcacattgactcaaaacagagttgggataaaaatgataagggaaaagctgagcaacttgagctttatacagtgataagatggcatttgaatacgtacaaatccaacctaggactggtttgttggtcttaagggtttccattgggatgtctactaaaacatcttatactaaaaaaattttatttttctctctttggtattgctttgtcttggtctaccttcttttcatttgagtccttaaatgcaacaaga

SEQ ID NO: 99026 - DNA, 639 bp, Vitis vinifera
  Intron number 1 from transcript GSVIVT01019640001 (locus G SVIVG01019640001) derived from phytozome v7.0 (chr-ID chr2 ; pos 2139109 to 2139747)
attacatcgagcagcttgaaggcagaagctccgaggtctgttgctttcacaagttgttcctctgttgggtgtgattgaaaaatgctgttttgagtcttctgactttgttgatatgaggattttggaattttggtgggttttattttctgggtaattgggatttctcccttttgttgtgtgtttgattttgcattggaaaattttcggaggctaagctttacaatatggtttctcagttgggaatgatagaaaacttgttattctgctcttttgaaatgagaattatggaatcttggaaggttttaattttgcgggttgcaagaatttgagccgtttattgaatgtttgatgttgtactgaaaaaaattccaccctgtgagaattcatcgatgcaggtttaatccaattgatgcacaagcttaaacctgcgcattgaataagatatgaaatacgaatcatgaaattaaaggggcattcccaaactatgagaaagcatgggcattgtagatgaactgagtttattttgtcgttctacctttttccattgagctctgtgtttttatggcttcattgatttaagtgattgaaatatccaatgttggcaataatatcgaatgtcatgcaattcaagattgcaga

SEQ ID NO: 99027 - DNA, 720 bp, Vitis vinifera
  Intron number 1 from transcript GSVIVT01024674001 (locus G SVIVG01024674001) derived from phytozome v7.0 (chr-ID chr6 ; pos 7895771 to 7896490 reverse strand)
caaagatcaggggcaacaacaccattgattgccaggtttttttggctgtttcactaagcttctgcttggcttcaattcaggccattctattttttgctttcaatcataatgaaaaactaccttcgaaatgcgattccaatttgcatactcggaatttggccggtttttgttcctgatttgattctgggtctaatctgaattcgaatttagctgattttattcccctttgaaacgcaatagaaaaacctacttgttaacgttcttccaatttggataatctgaatttggcttattttttgttcctaattcaattctagttccaaccttaattcaaatttagcctttttttttttttttcaaagagaaagatttgggtcccgcttaacttctatctatgtaacgtgttgaatcttttaaggttctactattttcacctggatggactgattgccacacactctgagcttcttactcttccatggttactttaagccatcctaattctgttagaaaaataatctattgcatgaaaacactttttcaagtctgaagatgtattcacatttgatgtagtcttgtgtgctggatatagtcttgattggccatgtttcaaacatgacttggattttctttttcagggcacaaaattttagtcttaacttataatggaattttttttccttgccttaggctcatgcacatgttttttatgatggcagc

SEQ ID NO: 99028 - DNA, 488 bp, Vitis vinifera
  Intron number 1 from transcript GSVIVT01019504001 (locus G SVIVG01019504001) derived from phytozome v7.0 (chr-ID chr2 ; pos 1184670 to 1185157)
aattgcagaagttgaaggagttcaaacccaccgtggttcgttttcttgatttctttctccattcccccccccccccccctttttttgtgtttggtgtccaagaatattgaagtgtggaaaaagtaattttgaattttatggtttaatggatatttctttattggaatctttcttgatattctttttaatttccttttctttccagcgtttttactagcaaacaaccagactattaattcctttgcatatctgggttttaagtattagatttcattttcttgaccttcttcagattctttcttaagtttgttagttttttttttcttccattttattagcaaccaaacagaccattgtgattcttgatttctgctttcaagggtttgatttgatttttatcggtctttctttggatattcccttttaatttcactttcctgatctttctttcagacatttccacttcactctctgagagataaagaaca

SEQ ID NO: 99029 - DNA, 1065 bp, Vitis vinifera
  Intron number 1 from transcript GSVIVT01019827001 (locus G SVIVG01019827001) derived from phytozome v7.0 (chr-ID chr2 ; pos 3679488 to 3680552)
cagtgctgattacgtcctcgattgcctcaaatccggttagtaggattcatttctccctcgtttggtttccgggaaagctgcaggacaataaattatgatgtgtcgtgttttttttttcattttttttccctttaattgttctcttccttctcgttatagccaattttaattatccgagctggatagtgtaacacaagcttgattgagatttttttttttctcgtttctttcaacggttggtttcgcatttcattttctttggatctcttaaaactcaaactgcgtttcttgtcctggaaatgaaaaggacaacactgaactctttcaaatctgtgtgcatgtttttttcatcaagaaaaggaaagttgagctaatctaagttacacaatggtgaacagagacctgatctgagttgatttttgaatgtaactgaaacaataaaacacaattatttacttggatgatggcaaaactacggggaagtgaggagtgctgtttgtagaaaacagtattctggatacaagtgggggctgacggcagagctgctttagggagtgctatttgtaggaaaacagtattctaacagtttcccaggtaaatgcggcgaaacttatgtagcgtatagaaatagcaaaggctaatcaatatagagttgacattttccaagtactccaagtaaatgggtgaagagttgcagagatttctgtgacaaggttagcataacttcaatccctttattcttaaaaatttgcatggaatggctcatcaatccaattctggatgagcaagaagaagcaacatctgaattctttcttaagcattaccgacagtattgctttaactttctggttgtgtgataggtttattttttctttcttcatttgttctctttttcttttctcagctgaagaaaggattttatataattattttattttcgctctcttagaaatcatttgaaacgttcttgtccttgtcctgttctctttgaacgttctaattatgtaaggtgatattatcttgttatcaggtggggtggttgatatctcggaagcaactaaaagg

SEQ ID NO: 99030 - DNA, 804 bp, Vitis vinifera
  Intron number 2 from transcript GSVIVT01026995001 (locus G SVIVG01026995001) derived from phytozome v7.0 (chr-ID chr1 5; pos 18713511 to 18714314)
ccaaattgattgcagttctcgtaagtttggagtcaaactcaattcaattcaactccgcaattcttattgtttttgtgttgatatttttgtatatatcgaatttatatatgccaagcgagatattctttgcattcgatgctgtcgatattttggtatgcctggactctggaaaggattcgtgtatgacaatactatgttgtgattcaaaccccccctcccccttttttttttttttttttttttgtgttgaatagtatttatgtatgacaatataatgttggacattttctttctaaataaaaagagaattgtcttgttgtgtcaattggaaggagaagtcagcttgtgttacattgctttgcagcagtgtattcagtaacattggaagcggaaatggaagtgaatataatttaataggtcattattactttgttattgtgactgccattttatacactcgaaatagcaattttatttttctctacctaatagaattgaacaaaaaaccctggaaatgtggcagaaaaaatgaagcagaaaaaagggatctactctctttgacatcaaaagtgttctgttcctactttagtgttttgttttactagtttgttctgtttccatcttttcctcatatcacaaaattgtagatttgaaatggataggccatccaaacctgttgcatctcacagaactttttctttcctatgcatatagctttaacaatcaatttagacgtatcacattgcttgcctttttctttttattgcagacatcttcgtttttccttcacatttttaaggttca

SEQ ID NO: 99031 - DNA, 738 bp, Vitis vinifera
  Intron number 2 from transcript GSVIVT01021150001 (locus G SVIVG01021150001) derived from phytozome v7.0 (chr-ID chr1 0; pos 1855488 to 1856225)
tcgattgttccggaaactggaactgctcctaccaagtaatttatgtcaaatttctgtatataaatgtgtttgttctgaattatcatggttcatgcaaatcgaaatttggtgtgataaaggagcagtggatgaagtttttttgagctaaggcttaaaacgtttagtcattgggttgttcattaaatgttaattgattaagctgtcattgcccttttttttggttgggagaccaggaaatcgatgtactagatttctggaattatgttgagcattgtaaagtctgcatgcaaaacatgttgtgatgctggaagataaagccatgcgctattgactggttctaaaaagtaaagaacaattaagatcaaatgtgaagaagcggggttagtcagaggaaattattgtcttcaaattgtttgttgatagtcctctgtaacatttaaagatacaactgatacataaaacaatccccacctgacaaagaaaatcttttattttgaaaaaaaaaaaatgctaaccattttattcataaaattaagaatagaattgaggagaatttagaagtttatcttctttatgggtttgcatagaaatggtttatcccttttttcatttgcagtcttttgactaataaaatgccataattttctttacattcagcaaggttttatagtttttctggaggttgttcttgtttatccaagtaattatatgtttatgcaaatatggtggaaaagcaaa

SEQ ID NO: 99032 - DNA, 735 bp, Vitis vinifera
  Intron number 1 from transcript GSVIVT01028064001 (locus G SVIVG01028064001) derived from phytozome v7.0 (chr-ID chr7 ; pos 3557619 to 3558353)
tgacgcccgtcgttccggctcagtacacatcggaggtagaaaattgggggttttgattttggaatttgtttgcttgcttgcctcttattcgtattagtatctgtttggttgctagctgagaaaattgggagaaagaaaaggaagaaaatttttttatgttacgttttgtgctgcttgtgttgcttgtaaaggagaggaattttcggcaaaagtaggctaattgatcgtgttaggccagttgagtggtaattcttaattttcttaggtttcgaatagagaaaagtcttaactttttctccgcaaccaaatggagcattaggatcatgttttctgcgtttccaaaaagctaaaatttcaactcctaatctgaataattgtagttggctcggttaaattgattttgttttcgttttgttcctttaaggttcaatatcatgattcctttttattttcttaggatttctcagcaactggaagaggcattggggattatggtttctgttgtctgtgttttttaaagaatatgcatttaaactcgacaaagtaaaatgtttgtgttaggcttactcagtggaggttctagttttctcagacttgaatgatgagaaatttaggattccaaattttattctcttgtcccttttcctacatttctgttcaatggccaaatgttgataggttattgtttgttttgttaattggtagtattttgattttgtaggcaagcataagggg

SEQ ID NO: 99033 - DNA, 822 bp, Vitis vinifera
  Intron number 2 from transcript GSVIVT01029874001 (locus G SVIVG01029874001) derived from phytozome v7.0 (chr-ID chr8 ; pos 883799 to 884620)
tcttcaatctctcaagttctagattttcatcaccagttagaataatgtcatccacataaactatcaacacaacaatctttccttctcttgagtgtttataaaacattgtatggtcagcttgactttgaatatatccttgaagcttgattacttttccaaatctctcaaaccaatccctaggagactgcttaagaccatacaaggacttctttaatccgcaaaccttttttttttctaacttttctttgaaacccggtggtaaatccataaacacttcttcctcgaaatcaccatttaagaaagcatttttcgcatctaattggtgtaaaggccaattaaaatgtactacaagagaaagtaaaatccgaatggaattgatctttgcaacaggtgcaaaagtctcttggtagtcaattccataagtttgtgtgaaacctaaggcttctcaaaaaccaaggatctgaggccatttaaagctactaattttaatcaaaagtttaagctacaaggtaattgaccaacaatgtatgctaaaatgactaacaataaggttgataaccttaacaacaaaactaaaaggtgattcatctttggtaagaaaaacttttggggagccatccatgttgcatacaaggtgatcaagcatctacccaatggttgagcatttgatattttaagaagtgaacatctttcttagtagcgggatcgggagaaagaataggaaaggtgatttcactatattttttaccaggaacaggacctatcacaagaatattttttttagtagggcgatagttctgaaaagatagattgcctatcttt

SEQ ID NO: 99034 - DNA, 709 bp, Vitis vinifera
  Intron number 1 from transcript GSVIVT01025047001 (locus G SVIVG01025047001) derived from phytozome v7.0 (chr-ID chr6 ; pos 5030619 to 5031327 reverse strand)
agggtggggcaaggtaatacccgaactcgccccgggtttttaaaaaaaatctcaaacccgttgaaaggttaagttaaacgagagagttgaaaaaatactatctcgttgaaaggttctatacatctgccctttcttaacgcatttctttatacaaagactctattttttcctcttttcagatggtaaatatttctcaaaacatggagtgtgaatcaaactcatatttgaattgaaattgagatattgatgcaagttcttcccttctgaatcagatagattcatatctaaaagaggttaacaataatttctttcaaaattgactatttatccttctgttagaggtgttctagaaatgtctacgatcgagtgaatagctcttagttagaatggattggatcgaattggaaaacagaaagatttgtacaagttatacgtcttgtcaccactttgtggaaaattgttaagtatgaatatgttagatacctgtgactcgattggtgaaatagtatctctctccaaaatagcatgttttttttaccgccacaaaaaaaaaaaaaattttcttgtgaatgaacaaaatattgaggaattgttcatacgtaaaatcaaaattattgatataggtatgagaaattaaatgggacggggatgaaaattgttttaaataaacggggtgggatcggacgggggcgtccattgccattcttag

SEQ ID NO: 99035 - DNA, 633 bp, Vitis vinifera
  Intron number 3 from transcript GSVIVT01027108001 (locus G SVIVG01027108001) derived from phytozome v7.0 (chr-ID chr1 5; pos 17824001 to 17824633)
ttccgtcagcgggagaaacatattggtaattgccctttcctttttactgttatctggatttttttgccttagttgcaagagacaccaattagttctcatggttgaagcggctgcttccatagtctttgaagactgttcttatgaacaattttcagttattaaataacagtgcacattgtttagggaggaggctaattcgatgcagttaaggtgacaaattgtttggaaagcacagacaataattgtataccatcaaagtattgtaacttttcttactgacgagtcttaaaagagtgatggaactcattgtgccacattatgccactgcttgtgctttagcagagtagaaaggatcaatcccatgagtctcaaaagattagattattatctagttttgggttctgcccttggataggactcaggacgcatcaattttaagtttaccctatttttcatctacttttttcttaacagggatagacaatttgtaaatttttttctccttatcatcattctcaccaaacatcatgaaatgcagttttcaaaatatgaattcaaagtctatctctagattcataatttttcacgcatttcttttttttttttttcttttaatgaaaccaaatagattgg

SEQ ID NO: 99036 - DNA, 623 bp, Vitis vinifera
  Intron number 1 from transcript GSVIVT01025635001 (locus G SVIVG01025635001) derived from phytozome v7.0 (chr-ID chr8 ; pos 13435791 to 13436413)
aagttaccaagttctcctcagatcttcctttgcaggtactttgtctttgtcggtggagatttttcgtccttccatttttagctgtcgagtgattttgcattgcaattatgtagatttgtctgcatttttgaaatgggtgtttgattttctcgaaattcatgcaatttccgcatctgggtagcaagtatttctttggaaactggccatttgtgggttggactccttgaattgtggattttttttttctttcttttccatcgtaggctgctgagaaatggaaaaatagaagaaactgaaactttatttctccgatttttcgttagaatccattattcagaagtattttcgttcattatgcttagctatttgagttatctggggcgagcttttgcattatttgtgaattaaaacaaaatagaccgaaaattcgaaattttcttttcctatcttccccagttttctcaacaaccaaacaggatgtcaacgttactgactctattaaacctataatcaaaatgacactgattattttcggcaagctgttttacatagttgacattttatgaactttgaatttgttggcaccaggtagttgaaactaaagctttgtggggttgagtaca

SEQ ID NO: 99037 - DNA, 697 bp, Vitis vinifera
  Intron number 1 from transcript GSVIVT01027938001 (locus G SVIVG01027938001) derived from phytozome v7.0 (chr-ID chr5 ; pos 9776062 to 9776758 reverse strand)
aacgggagttactcacaggaaattactttttccctgtactctgtgttgttcaatactgttctctcttgctgtggcttcaatcaatttcttcagttcatggtgttgctcttttctgtagtataatcatgtttgcgtgcgagatatatgtttttggttttacttatattgggtttatagataaccaagtaggctttaaaagataagtgttttttttttttttttcccattttaaattattggtgtatgatttttttttttccctcctccctcaaggattgttaacagtttttagttgataattactatggttatgattggttcccagaaaatgtgagagaaaacaggaggaaaagtagaaggaaataaaaagcgaaggaaaattttaaaaaagatttaaaatcaataaattatctctatatgctacttcaaacttattttagcttttttatataaagattacacagtttgaaaatgcatgaatttcttattaattataattatatttgattttctttgatattttccaaagtgcaaccaaacatgataaaatcatttttcttaattttttttttcttagaactttcttggaaccaaacataatgtaagtgttttaaaaagcttcttgattctgttgatcttttgttgcaggttgatctgaatagagctggagtgcctttgcttgaaattgtttctgaac

SEQ ID NO: 99038 - DNA, 834 bp, Vitis vinifera
  Intron number 2 from transcript GSVIVT01025228001 (locus G SVIVG01025228001) derived from phytozome v7.0 (chr-ID chr6 ; pos 3013254 to 3014087)
gaggtatgtctgggcctgtagttactgtagcagttgttattctatgtattgattgatttctttgttatcttagtttttgaaggaaacaagaataagtgaaaacatctgaagaacatgaaaaatgaaattttttattaattaatatgtaaaatttttataaaattaaggagattgatcttcatacatgctgaacttctctaccgtattatgagatcattggagaaatactcataacagatagaaggtaggttgctgtcccaaagtatataaaccaactttgttttgggattttcttttgatcatttttagcccctaacgcccaacttttctttttttaagagcattacagtgatttcaaacttaatttctcaatcatcttgtgagaaaaaatggtacactactctactccatcagccccctagtatgggaagtacttgaaggctcatcatttccatttcccacccataaaagggaagaaaacagtaaaggaaggccatacctctgctaccaaaacattagaaaactttgcataaaattgcttttctccttaagagatgtttcctctaaaacactatcattcttgcaaggaaaatgccactttccccctttagagtgtctgaatgtttcctccaaaagatacaattgcatgtgctattaattattatgatctttcttgggtagaattaagtacggtcttgtatatggtgctttgttagagaacttagtgggagaatctagttgaagagagcagcattgaagctagtagttatatgcatgtatttattgacagagcttcattgatgcaggtttctactcttcaaaaactgttgcgta

SEQ ID NO: 99039 - DNA, 187 bp, Vitis vinifera
  Intron number 1 from transcript GSVIVT01027184001 (locus G SVIVG01027184001) derived from phytozome v7.0 (chr-ID chr1 5; pos 17189864 to 17190050 reverse strand)
aaagaaaaggtagtaatagtagttattaatgtttgttttttcagtattcttttcctatcaaaagcaacccttttttttttttttttgtgtgtttggtttgtgggtgatgatcctttgattttgatgctgaaaattgttgctgttttcatgggggtttcaggagaatagtatcggagaagccaaggac

SEQ ID NO: 99040 - DNA, 673 bp, Vitis vinifera
  Intron number 1 from transcript GSVIVT01028764001 (locus G SVIVG01028764001) derived from phytozome v7.0 (chr-ID chr1 6; pos 19100770 to 19101442 reverse strand)
caagatgtctaaagatgattgaaaataataataataataataatagttatttatttttaatcataattaaaggttatcatatctataaaaaaataagcaacatgttgctgggaagggtatataagtcaatgcctggtgtgatcagaaatcaaaaaccaaaacttgcaaatcgttgttattccacagtatccttgctttgtgttgaacatgggtggaagtctctttcaacattttcttggttcttttctgcttttgctgtgtttcaaagctgggttgggatccagtttcatgctgggtgatgctaaagtggggtgcatggagagggagagacaagctctccttcacttcaaacaaggtgttgttgatcattttggaacgctttcttcatggggtaatggggaaggcgaaacagattgttgcaaatggagaggagtggagtgtgacaaccagacgggtcatgtgatcatgcttgatcttcatggaacgggtcatgatggaatgggtgatttccaaattttgggaggtagaatatctcagcttggtccttcattgtcagagttgcagcacttgaagcatttgaaccttagcttcaacctgtttgaaggtaattatatacataccttgtgaaaattcatcagtttatctcagcagaataagatatctcatataattc

SEQ ID NO: 99041 - DNA, 755 bp, Vitis vinifera
  Intron number 2 from transcript GSVIVT01018963001 (locus G SVIVG01018963001) derived from phytozome v7.0 (chr-ID chr4 ; pos 18296903 to 18297657)
ctttcctctgtggatcgcgcagccggttcagtaatgtactatacagttcttgaaactctttatctctattttcaaataacctttctatgcttttcggtagagcttggttttggaagatctgaattctgatcgcttattttttgtccatttttccttgctgatcatagtatgcagcaaatgatgattgagatcatttgaacatattctatatatttaacaaatagagatgcaaatttcataagttgataaaataaataaataaataaataaagccattgaatatgttgattatggaaaggattcttgatccattttaagatagaataccgtgaataattcaattttaaattataaatagaataaattgaataagttgactcatgtgagtcatgtgaccttcagttgttcatccaaattttgcagccattaggtggctggtagggacggccgcttaattgggatcctgctgttattctgaaaaagtggttagcagttgttgggaatttgatgtaatagaaatcatcactgtgacctggtttgtttatcaattttaatattatgaaaaaaaagaaaaagaatcgcagtggatttgtggcgaaaatagatcactctgaatgtggttattgtacatccttaattatttggtttttctggggaagaagaaaaaaacagaagaagaaagagaagaaaagtgtcttcaaactttctacatagccaagtttaatattctttgatgtaggttgggctcaatcacc

SEQ ID NO: 99042 - DNA, 780 bp, Vitis vinifera
  Intron number 1 from transcript GSVIVT01021553001 (locus G SVIVG01021553001) derived from phytozome v7.0 (chr-ID chr1 0; pos 6963256 to 6964035 reverse strand)
gtctcctgctgggttcacacaccagacccaggaaggtaggcttattgttggttgtaaaattggacctttttctttccttctttctttctttttctttttgggtctctgggtttgaactctctcttgtagttgtgggcatttatttcttttgcagcttaactaagataggaaagcttcggtggctttccaggctaaattgagttcttgggttgaatttgttttgtgattttgaggtgtcgctaaattgagttctagactgaagcatgctgaacctcttattattattattattattaacttttctggttggtgtttggttgttatgttcttccctcatgttctctttggcaactgagaaagctgtgggaaagaaatggaaaagtaatttgaattttttttaatgttttatttcttactatcatggtaatataaaactcaacatgcatggttaagctgatgtatatatatttttttttgacgaaagattctatgacttatcttcaaaatttcttttctttgggtttctcacggagcaacggtgttaatttcatggctaaaggataactggagagctttaccataatttttggtagattataggggttacaaaagagccatatttatgaaatgttcttttcctggtgcggaagccctgtacagcttctgtcctagcttgggttttcccccaattatgacttaatttatcaaattgttaaaaccatgagtgtaattcatctttagaatttactttgcttcggaattattgacaggggagaagag

SEQ ID NO: 99043 - DNA, 910 bp, Vitis vinifera
  Intron number 1 from transcript GSVIVT01026981001 (locus G SVIVG01026981001) derived from phytozome v7.0 (chr-ID chr1 5; pos 18864520 to 18865429 reverse strand)
gaagccgttgttggtactcgctctttcttcatatctctctgtccgattgatgcttattgaaatctacgattacttatttatttatttatttattttttggtttggtgatttatctgcttcattaggcaatgatttcggctgtcgatttttgttttttgttttttattttatttatttatttagctgttttacttgttttttaatgtggatgcgtgttcaaggtttaatgtgatggatgttagggtttttctgtattggattctgaagttgggttttagtttgggcttgttttgatgaaaaccctaattctttctgtctttgggtcggaatttgtgggtaagcatagtgttagagctaaatgtgtgataattagaaaaaataagcgctattattgatagagatgtttaaaggatatatctaaggggcttgttgatggttgaaattgcagtagttatttgcttattttttgttttggtgtatcccatgaatatggtattctttaatttaacaaaaaaaaaaaaaaaaaaaaagagggagagagagaaaagaaaagaaaagaaaagaaattgtggttcttatatggcaaaataataaaatcatatgtggaactggggactgccccatcccattccttaggaggagggtgaagaaagtggcagccactttgactatttttttaagtctgaaaattctaacatgttatttatttcccatgaactttaatggtttggttctccatggcttagtcgatggctattcattgctgttttctgttaacctactacccttctaattccccatcattgttttgtgatgaattttgttctctcatctgatttgtgtagtttccaagcatatgggcttgttttttggtttttaatttttttttttcaaatttttcccaggtttt

SEQ ID NO: 99044 - DNA, 940 bp, Vitis vinifera
  Intron number 1 from transcript GSVIVT01024111001 (locus G SVIVG01024111001) derived from phytozome v7.0 (chr-ID chr3 ; pos 991503 to 992442)
tggttattgttttggctcaggctcagtagttgcttcaaatttctatgaatttcattatggttgaattgtatgttgaaaagaatatcgacttgcttgtgtttgatattcagtatcaatgaatagtaaacatgcaaggaggtgtttgggcactagaatgattgttggaaaccattttagatttcaatgagaaatccattaattgatttgttatttattgaaaccctagttgctggtttgatttaatagaattaagggtcattgaactggccttgaactaatctgtttctttatttggcatttatattcatgttagctagagattccaggaagttggaaatgatagcttatctacacatactaagtagcccacaatatctctgactatagggtgaccagaacttgggttttatcagagaaagttaacagaccaacaatcatactgaactagattgccacacgaggaagtaaatataatgctaaaagatttaatttgaaccaaaggaggaaaaaaatgtctgcaaaaggatgatcaatttgcattgactgttcatatagtagaatcaaattgcacgcataaaacaaacttctaaaatgaatatgcaatggtacatcatacaaacatcagtgaaccaagtaaaaatgcaggcaaaataaaaatatatttttgtgtcatcttcatcatcaccattattgttaatgccaatcccgggtttcatatctaaatatagagtttttgtggtctcttaggcagaagtgaattatggattgtattcaagaactaaaacgatttaagtaattaagaatttgagagaaactatgagaagtgaaaacaaggggaattgcaagactgaattgaagttccactgcactgtattttttgttatccagttgtcttattcatcaaggcaattgtttgttgcaggcaagggtaactatccaa

SEQ ID NO: 99045 - DNA, 475 bp, Vitis vinifera
  Intron number 3 from transcript GSVIVT01026849001 (locus G SVIVG01026849001) derived from phytozome v7.0 (chr-ID chr1 5; pos 19987963 to 19988437 reverse strand)
agctggtacatatttgatactcccaattccataccttctatccatgtgtttgcctctttggggtggtctggatgtcacatagagcatgtttggcaaaattcaagaaaatagttttcaaaaaacagttttaaagacaattattaaaaatggttctccaccgttctcaggccaaagttcttggcatattcctcaaaaatataaaatattttcaatcaaacatgtttttgaattaaaccataaatattctacacatgaaccgctcccaaacaaaccttaaatattcttaattttttatataaaaaaagtagttgcatgacatgttagtttgtctattatgacatttttgtttcaatatttggtggacatccaaacacatctttattttattttctatcattttcttttcttccattaatactaagcgtatggattttgaaatcttttacagtcaagggctcctagcaaactctcttct

SEQ ID NO: 99046 - DNA, 292 bp, Vitis vinifera
  Intron number 2 from transcript GSVIVT01021427001 (locus G SVIVG01021427001) derived from phytozome v7.0 (chr-ID chr1 0; pos 5236107 to 5236398)
aaagaaggcggtctcattccctctattccactcaggtaaaacctctcgcgtgctgccattactataatcctctctttccgccttcttttttgttttcagaactcagcccagtttaatggcattagttgtttccagtggagattttttttgttttctggatgtcgaaaattttactactcaaaattatttaatttcttttcgttttctttgcgtccaagcagaccgtcaatggattatatgaaatcaattcatcccgttactgtattaattcacgagctgtgtttgttgatag

SEQ ID NO: 99047 - DNA, 821 bp, Vitis vinifera
  Intron number 1 from transcript GSVIVT01025673001 (locus G SVIVG01025673001) derived from phytozome v7.0 (chr-ID chr8 ; pos 13035248 to 13036068)
cttgcaacaacacgcttgatcctccaattcaaaaggtacccatttctcagtattcctctcttcttattgttgttttgttttctgttttatcattttcagaaaggtaatctgtagctgataattatgaattttttctcgaacttctttgatgggtattcttataaattagttttctgttggtattttgctgtctctctgggtaaacctattctgcgattcatgggatttcctcattttttgttttttttcccagtatttttctccgaaaaaggtgggtactgctgtttggttcttagagaatgaggtttcgaaggactaaagatgcaataattggtggaaaatattcacaagttattggatttcatgcgtcagaatagtgggtttttgtacggttcctgtacaaaagccctccaaaaaattcaggcttttaagtctctctaagccatccacacttaacctttgtgttggtcatttgtgacttaattcagccaagtgccctacttgctgacaacctcaacttccatactgactgatcactcatttgcaaaaacttactgtggataaaccacgtgggaaactgggaattatgaatttcgaatggagtttctttattggtgccaaatccttgatacttaggaattaactaacaatctgttaaggatggtttacttgtcccttccttgctttgatataatagctactagccaggtcttttacttacattgtttgagtgctaaagttcagtaagtgattgatatgcgtgtcattcgaattcattgtttttaatttttttgttgtaggttggaatttcatctgaaata

SEQ ID NO: 99048 - DNA, 907 bp, Vitis vinifera
  Intron number 1 from transcript GSVIVT01021316001 (locus G SVIVG01021316001) derived from phytozome v7.0 (chr-ID chr1 0; pos 3950355 to 3951261 reverse strand)
agcaaacagctctgcaaatccatacccacctccaggtcaatgcctgtctctcaatccacactttggaaattctcattttgggtgtgaggtctttgatcaggcttttctttggcaatggcggtgggggttctgggcttggggaagatgggttctcttgtattgatcatttgttaaatttcagttagttttattgtcattgttacctgtagatattaatgaatgccaaaatttctatgattttggagaacaaaatggtatcaattagaggaaacctgcaaaggatcgttctttattcctcattagccatctttttggctgccttgtaaattggggataattatgcattgtttggtgtttaaaaagaatgggagaaaagaaaaatgattttcttttttttcaggttaaatttatattttccgtattttttttccctgtttctccaattgtttccaagaaacaaatggagtaagaaagaaatacatatttgaggtattttattttgtgttgttgttgctcaaccgaagtggaaaaaaaatccacccaactaagccaagtagatattgcaggcttagagcagagttatttgtgggttctaaaaattgaaaaaaaatattatactctaaaattctgagttgttttcttttcctaaaaaaatgaggttaaaggaaagcaaaacgctatattagtgttagtatagccacagtatctttgacattgcctagtggaatgacaaaattttgaagacatcattcatggtgtgattgtgttgctaggaaataaattcatacatgaagaaacagtataggattgaaggaaaatagtttttttccttttgttattgcaaaggaacattgtatttaacatatgtttttcttgtgtctgattttctaggcatattgattattgc

SEQ ID NO: 99049 - DNA, 1065 bp, Vitis vinifera
  Intron number 1 from transcript GSVIVT01021759001 (locus G SVIVG01021759001) derived from phytozome v7.0 (chr-ID chr1 0; pos 10675688 to 10676752)
acagttgtctctctctctacgatctctgcaattaggtacttcttatgcattttcttttcttttctgcttctcatttttccgactcttgtttttgaaacgaaattattggcataaaagaggaaagtgttcttgaaatttatgtttattcttgtgatttcaacaatctttttttttggggaaaataggcatgttttagtagaagggtggcaattttggagttgaatttcagttgaaaattctgttatctcaaacttttgttgtttaatttggggaatttttcttttaagagttttttatttatttatttatttatttatttttatttgtaagtctttttatttttttattttttcatttgggattgctttcaaattcctagctttggtgttgaattgcaacttgttttaatttctggatttttctgtgattgtttgccgagaaaaactgcggaatattgaaggaaaatggatgtgaagttttacctttcttttgttccttcctttctacttgttactaaaatgaagcattcaagctaaagtatttttaatagattgatatttagttaacttttttaagctaaactatgtaatatatgaggtttgaatttttctcatcttttaaaacagctattagggccgggacgagaataccaaacggatttgaaagtaaaatcttacatcatgttaaaatttttaattttgctctgtgggcgtttttatttttattttttgaatttatttttattttattaattttaatgttttatgaaatactcagtcagactgagtatgtgagataaggcttcattgttcaatgcgctgacattttctttttgagttcagaatgggtggtattgtttcaaaatataaatgagtattttactcattccaatttgattaggtcatttgagtatgattgttctttttctttttgattttggacaatgtcataccaaatgaataatatggttgtgggtgtctgatgaatggatatggaactaatgaagatataatggttttgtctcttatagaactgcggtgaagtttgtcgagttgtgattagaat

SEQ ID NO: 99050 - DNA, 800 bp, Vitis vinifera
  Intron number 1 from transcript GSVIVT01026470001 (locus G SVIVG01026470001) derived from phytozome v7.0 (chr-ID chr4 ; pos 23048180 to 23048979 reverse strand)
ctgaaggcaatcaggtatttttgagtgggcaaaagagtgtttttaaggtgtttttggcttatgattccagtgggtttggtgcatgcgtagtctggaatatatggagtttaacacattttcagaattctcaagttgttgtactgtttcatcgtgttgtgagaactcgctcgtttttattgctctttgttctttgataactcgtgaggactgaggaggggtacctggggttggaattggattttttagcaattgttaattggtggagaaattcttggattccaattgttcttttttttttcttgcttggttactgtaattggacttttccgcactaagttcttttgctgaggaattagagattttgcatattattttcagttgtttaacttgcaaagggtttggttgagttgattaattagtatattcatgaactgggaacagctgaatataaagggtttcagtttccccattctggtgatttttcctgtttctcagaatcaaaaggagcatgaatatgtttgtgaaccagcatttaattgattttccatgagccaacatggtgttttttttcataaaaaggaaaatgttggacagcaaagtctaacctgaactcacaaacaagccttaaactgggtggtttcaactgatttgggctagcttatgtgtattggatgttgattgatggtgatatatgaggacatttttagactctctgtgcatgtttgtgttcttttatttgagcttaatggatcttcactatggcagctcttggattttccgggaggaaaggtggcattcac

SEQ ID NO: 99051 - DNA, 608 bp, Vitis vinifera
  Intron number 2 from transcript GSVIVT01030128001 (locus G SVIVG01030128001) derived from phytozome v7.0 (chr-ID chr1 2; pos 10107085 to 10107692 reverse strand)
atcaccaaatccgtactcctaatcagccagctaaagtaagaacttctcttcttaatgaggttttcgtgacattgttttcccagtgctttggttttttgaatttcatttcccttgaatggatccacttggactttatgaagagattatctagtgtatatgttcgccatttgtttgggggcagttttggactccatttcaatcaattttgttctacatagtacagaatccttttgtgccttttccctgaatgtttgaggaaacgttttgtttaatgtggaactgaattatgcagtctatatagtctatttttgtgtatatcttcatctcaagttatttatgaacattctgtatagacattgcatttgacaagtggcaactcatgtccatcgcaactgttaattatatagatggatagtttgtggagaagcagtctgtcttctatttctacttacacaattgccttattgaagtttttctattatgctaaattaccaaaaaatgagttgtctatgtgctttgtaaatcatgcccttttttgagatatttatatgtttttcttttccttctggagaatcaaggcaattgctttgttgtttcatttgcaggcc

SEQ ID NO: 99052 - DNA, 805 bp, Vitis vinifera
  Intron number 1 from transcript GSVIVT01025574001 (locus G SVIVG01025574001) derived from phytozome v7.0 (chr-ID chr8 ; pos 13963150 to 13963954 reverse strand)
attccaggtgggtttacccgatttctttcttttaccctctttcagcaattcacatttctgtcttgcgctccgtttgtttccactggaaataccttccgagaaagaattccctctaattttttttctctttcttttttttctctttcttttttgttctttataatttaccttgatgggtatctcatcatcaaccttgaggacaatctatcgtctatcttcagttcgattggatgaaattgtataggtagacctcatgggtaggaagagtatgatttctgatgcgtatggaagataagaattaaggaaagggtatttaacattcagtgattcaaagtttcctggatcacaagatgggtgtttttgtttgtttgtttgtttgtttgaattcgagtttgatttaaatcttatgtttgtcattcccccacaaattaaggctaggatgaagattatgggctttatctgaaacaaaggtcacggagggcaagtcttgacagagagtatcgtgctagaaatcatgtccttcagttcctgattcttgacaattattgggcttcatgtttctctgcaatgaaaagaatccaaaatatgttgaaaaatataagataaaaaatgcatatttgaaaaaaaaaaaaatccatagaattgaaagaaatcattttctatgtaatgataattgcttattactgttggctgggttgcttgttgatgcttcaatctatcaaacttgttgggaagatcacgaataatttcttatttatatagtttttgtaaattctatttgcaaactttagggttgggcggtacg

SEQ ID NO: 99053 - DNA, 966 bp, Vitis vinifera
  Intron number 2 from transcript GSVIVT01027500001 (locus G SVIVG01027500001) derived from phytozome v7.0 (chr-ID chr1 5; pos 16178403 to 16179368 reverse strand)
cctcaagtacataccagacaggtaatattgcatcaccatgtgtgcgctctaatgcatgggacattgaaaataagttcagtagggtaggataaaaatattggtaatcacttatatattgatattttgattataccgtcaacaattgcattaccttaaggttttattcttgagacttgaaaacacatcacataaatttttgacaaaaattaatttttaaaaaaatttctatcaaaatgggttgttttataaaaacatattttaattatttttacttattttttattttattatacaaatataaaaaataattcaaataatacactatagataaaaatttattttcaaagaaatatttagaaacatagaaaacaagttgaaagcattctaagttctcaaataaatttctgttttataaaatatcaaaactatttttcaaaactgatgtcaaaaattgttttaaaaaattattttcgaagatgctcccaaacaatacctacggcttttcaaaaataatttttgacaatagtttttaaaaacagttctataatattttataaagcaaaaatctgtttgtgtgtttcaaattttttaaaaaaaataatttttatttgtagtgttttataaaaaagcaagtgaaaataaattaaaacaacataaaacaattaaaatatattacaaaaaaataataataacactctgcagaacaagttatcaaaaaactgtttctgtacaaaaattattaaatgtattttgagtctgaaaaacagtttcatattttaaaaaaaaaatgttcttaaatgttgttccaaacaggctctaattcactggaaaatctaagagccttttcctaacaaagtaaaaagttaaaacaagcaagttgagaaacgggatgataaatcttaatcctaacagtggatcaacctattctcagattggcaggagcagcactgcttgcgcctgttataa

SEQ ID NO: 99054 - DNA, 408 bp, Vitis vinifera
  Intron number 1 from transcript GSVIVT01028724001 (locus G SVIVG01028724001) derived from phytozome v7.0 (chr-ID chr1 6; pos 19401037 to 19401444 reverse strand)
ttctctattgtggctgcaatttacgttgccggcaggtgagttcatcatttccacattttctttcctttttagtttttgctcgatcgcctctcttcatctttctagggttttacaactcacatttatatacatgcacgtaatatatgcctatataaacactttctgtttggttgcgaagaaaactgatgattgaagtttaaggatctttttcctttcgctccaaaattttcgttttccttttttctcagcatccgagcagagaattagttgtttcatttttgtccctctttaaaaaaataaaagtaacagtattttatttgtttttatttccctttgttttctcagcaaccaaacagcgggaaattgtactcgatgtttgatttgaatgtttaatttttctgataggct

SEQ ID NO: 99055 - DNA, 879 bp, Vitis vinifera
  Intron number 3 from transcript GSVIVT01028385001 (locus G SVIVG01028385001) derived from phytozome v7.0 (chr-ID chr7 ; pos 6896641 to 6897519)
gaaaggtggattccaaggtgaataatccctttcccactgcttattctgaggtctgcaatattcatagctgatggattaatcacaactgcaattcttgatattgtaatgaatttgtattagtgccaactttggtttgtctagcgagcacctcacaaggtaggactaattcatggcagtttcatgggatgagtttcaatgatcagaaacaaaataagcaaaaaatgatttcagagtgacaacgctcacaatagtaaaagtttggattgagtttgtgcaattcaagtagcaaattctagccaatttttggcttgacccaagtctgaattcgaaacttccaaatcaagtctcaaaacttgatagatttgatctaaggaaaatgctctttttagtgatgatatgcttccaaaggtgaggcatggtcaagtcagtatggcactaaggggagaagtgctgagcctcacgagtaggtattggcttccttcggtgtcaaatgggtgttatagcattttttccttttccagtatcttataaaatttttattttctagagagttgtttctctgagttcttgaatgttggaacttgtctctgaattttttgggaattattttcccttttctccctccttttccaagtagttgatgaattccaaacatgatttaatcgaatacctattttcatctcacaagtggattcgtttctccattgttcatggtatgatgaagcttgtgagaactgagaagaggaaggttagcctggtaatttgcatactgtttgatcatgaataactgaactcaatatgcatgattaatagctccctcaatatcattttccctagacaaattataatttattaaactttctgttttggtttcagttt

SEQ ID NO: 99056 - DNA, 637 bp, Vitis vinifera
  Intron number 1 from transcript GSVIVT01023007001 (locus G SVIVG01023007001) derived from phytozome v7.0 (chr-ID chr1 2; pos 16996037 to 16996673)
acatcgatagattgcttgatagctactctgagtatgtttctattttcttttgctcttgcagatcattcactagattggtgttttgtctctgcattgaaatcaaatcacttatttttaattttatggttgaactcattaatcacaataaaagaattttaaagggatctcctgccaatgcaatataaatgttataaaaattgaaacagaatgacttcaaatgctctccagaacaagatggaatggttttgatccccaaaaggtctaagaaattaggggttctcaatatgccaatcagaactggctgttcttttcctatgtatgtcctttaaattatatattgtaggttaataattaggatgcaaacttctactagtttatgatggtgatctatcaaattattgtgctggaatttctgggaagaattgaaagctactgagtttttctctgtcatcaatgattagccatgataaattgcttgaacaggaacactttttttttctttttctttttttaatattatcacagttataacatctttgtcatttgttggatgtggcaaatttggaattggaattataagaataaacttgttgggcacaatgacttcaatgacacaggatttttgatactggcaaca

SEQ ID NO: 99057 - DNA, 750 bp, Vitis vinifera
  Intron number 2 from transcript GSVIVT01023007001 (locus G SVIVG01023007001) derived from phytozome v7.0 (chr-ID chr1 2; pos 16996809 to 16997558)
agttcgatcgtagaatcgcatactgcaaattccaggtgcgtcaatatcattgcttacatttttccagttgtgtggtcaatgattttcatccagtttcttacgagaaaattgattagttagttacaagtgttatgtcaacaaaggatacagacacccataatgttcacattgcttgctgaggatccatcccgcccatgttgagtgggacacatcgcctgattattctggccatattacatgttatttgttctttggtcttgataatctctttttaggtgtgataaggtgcccagaatatgattactagagcaatgacatgtgtatgctagtctgaaaagattcagaaaccatagttttatctgttaaaaaaactatccccaattattgaaagaatttttattgaagtggatcatcattcacccatgcagtttcattggtttttctgaatttcagaaactgtgtaatgttccctatatgttatatgttatagatcttttagggttgcatgtagagaccaagcttctcaaatctgaatgttctgctaagatccattcaatgcaggacaatattctgggagcgtgattatggacttttggatttataacttgacgaagatatggtttttactgatttgattaccaaaaaatttgtaccccaccattgtcactgctggttttctttcataaatgttacattaattgagattggtatgcagatagcgagtttcattaagacgcacatattcagccg

SEQ ID NO: 99058 - DNA, 792 bp, Vitis vinifera
  Intron number 1 from transcript GSVIVT01023110001 (locus G SVIVG01023110001) derived from phytozome v7.0 (chr-ID chr1 2; pos 22460293 to 22461084 reverse strand)
tgacaagaaaaagaaaaaataaattaatttgtgtttagattagagccaatatctacgggataagatgataattttttgtttttaatattattttaatgttatatatcttcttcgtcgtggtttctataaatacattattctaatgctttaagatattaacttttttggataaaatattttcgaataaaaagaaatgccttcttttataagtcaaaataaaaattctataaaaagcaatattttggtgctttcatattaatctccattgtaagttataagcttctttaacaaaattatagcaaacaggcagatgattggtttattagaagtcatgattacaccatgatttggttgccttaaaataattttaattcatgaggacaaacttgaattttttttttttttttctttttgtatttttagccagatgggaacttaattatagatactgtaatgataaatcaatttatgaaattatgatttcttaacatgcacgccacgtggcaattcaactaacacgaggcgtggaagctgatgacatggcaagttaatcgtggcaaaattgtatactctgtttcatgcatttttgtcgtcttccttggtcatttagaggaggacagggagcagtgtgacagtgagcagcgagtgaatcaaactgcaactatggtgagtgggtcttcttcttcttccttttttcttttttaattataatttcttttatatgtctgatatgtttatatatgttgtatggggataggaggagagcaagctgaagctgtattcatcctggcg

SEQ ID NO: 99059 - DNA, 379 bp, Vitis vinifera
  Intron number 1 from transcript GSVIVT01022499001 (locus G SVIVG01022499001) derived from phytozome v7.0 (chr-ID chr8 ; pos 3970610 to 3970988)
gcttttcggccgatctttgggttcaaaccttcaaggtattcttccaaactctattcccagttagttcaatggactttgagattatatagaatcgtttgggtgctgaaaaaataattagaaaatgaaactttatttaatatttcaatggacttttagattatatagaatcgtttgaatcctaaatttttcacaatgtagtgctatgtttttatttatttatttattttttattttatttttctcattttctttgtgacccaaacggggggttggatttcactgtcagattgggaatgttattgctgtgagttttgatttctagggtttctctttaaatggctgtggaactattgctagtttggattacggctcacactga

SEQ ID NO: 99060 - DNA, 784 bp, Vitis vinifera
  Intron number 1 from transcript GSVIVT01021014001 (locus G SVIVG01021014001) derived from phytozome v7.0 (chr-ID chr5 ; pos 15301939 to 15302722 reverse strand)
aggtatttctcgaattatttggtgttctttgatgcgggggtgagaaattttttgtttgatttgttgctgttgatgaggaattcatctgggtttttagggatttgggggttttattgttgaattggtgtttttgggattgatgtgtgtggggattaggattttggggaatcaggggttcgatgttgcccagaaaatgtaggaaaaaagactacaccgggggaaacgctaatcaggaaaaattatttgtattttcttattgggattaatcaagtgctgttcttgggggttttaatctgggtatgggggttttgttattattgctatttttatttatttattcttggtttttttcgccatgcgttgatttggggttttagagcaatttagggtttgtttttgggctcttgatggttatggtgatttctaattgatgtgggtatggggattttgtcttaatttccttgtttttcatggctggttgatttagggcttccaggaaattgagggttttgttttgggaaataaaacagaagaacgtaaaattttgattctaatcctctgtttagctgttgagtaaggtgaagaaaaggaaggaaaacattaaacagtaggctttgtatacttctgggttttttcacagtgaaaacaaccttctggtttgttggccaaattgtttggttgcttctgaatgtttgtggtttcccctcatcatatacatacatttgatattattttagatcatccccatctcattcaattgatttggttggtctccaatcagggc

SEQ ID NO: 99061 - DNA, 696 bp, Vitis vinifera
  Intron number 1 from transcript GSVIVT01028649001 (locus G SVIVG01028649001) derived from phytozome v7.0 (chr-ID chr7 ; pos 11589670 to 11590365 reverse strand)
ttcttaggtaaaaagtttactgtatttttgccatctaacagaaattactcgatagtgttcattttcatcttatgattcttcaactttaggtcaatgtggaaaatatcatagttaacttgtttctagcctataaaacgtagtcagttgttgttttaggatattgaacttgtccatttgtttgatattgtgtaaagcccatgacccactagcctccaagaaaggatatgttttgctcaagtagagctttcttccatattctcttttttctgcttcatgataatacatggtttgtgtttgtgaggcatatcagaagtttatactgatactgatttttattttgattaaaatctgcatacaactctagcagtcccgattagatcctctgcagcatgacctggtgggaaggttcagtaccatcccttccttgcaccttaccctttctactgaacaaccgaccaattcttttattattcgaagaataaattaattaccattagaacataaatcctgatgagcagtttttaatttattcactctgttggcatgtgttatttgttaggtatattgatagggtcccatccattgagtatttctttgctgcaataattctgcagattctaacatttgctttcggggtttttgttttccttgttttgctattgttgtgaagcacagggattaggaaagaatacgaat

SEQ ID NO: 99062 - DNA, 654 bp, Vitis vinifera
  Intron number 1 from transcript GSVIVT01020437001 (locus G SVIVG01020437001) derived from phytozome v7.0 (chr-ID chr1 9; pos 19460311 to 19460964 reverse strand)
tccggatctcaaccaatttggagatacttccacaggttttgcttctcttcttctctccgttttaatttttctttttcgatagattttgtaattcagattttttttttttgttttcgttcttctttttgggattttgtagatctgctttctgagtcggcttttgatttttctttttcttaaaagtttttttggcaacccaacagaggaccgtgctgctgtctgatatccgcttttgtattattatggtgttattgttgttttttcgattggtttatttgggtaattagtgcattaattatgactgcggagttcagcctctgtttggttgcccagaaaactgggaaagaaagggaaataaatttcaattattttgtgtggacagccgtatttaattccaactgaagattgaatgcagattaaacaaaacaatcaggagtttataattttaaacctaaatagcattcgcaaaacatttttttatttatggaaattcagcttaaagttttcagtggttgtatcttaattgacaaacttgaagtgtaatactcatattagacgtggttggttggaggtttttgcctttgggttccaacaaaagaaaaatatatggttcaaaattctgattccattctttttcgggatggctaatagagc

SEQ ID NO: 99063 - DNA, 1014 bp, Vitis vinifera
  Intron number 2 from transcript GSVIVT01028519001 (locus G SVIVG01028519001) derived from phytozome v7.0 (chr-ID chr7 ; pos 9080144 to 9081157 reverse strand)
cagttgttctcttgtctgtttcaagaaacataaaggtatccccaccatttcattctttcatttatttgtttctttttacttatttattgattgattcattgagtagttcgggatggaactacaaataagaaaattggacaatttcgatacacaatgctagctaaattgtttgaggtaaggattgaaattatcagtataatggtaaggcgattcggggcgaaaactttagaaagtacaatttcagtaccgcattttatgttcagatattagtaattattctatatgtacggtttggaacagctgtagtttgcttttcttgtaaagatttatgtgaataaaaggtttctttatcatgttttttttttttttttgaaaaaaaaaatctcaaatcctccttatttaggtgctgtttggattttcttcttcttcttcatatatatatatatatatattttaatttttaaataatagtagttcttatgtaaaatgcaagaaatcttaaaaaatcaggaataattagtataataatatgaaaactgtaaaatctattcaccaccatttctggtaatacatccagtttcctttaattacataattttttatgattgatttgtactttcaaatgctatgtaaaattaatagagctgatcaattttctcgagagaaccaaacatgattcttgctagtttgttctatattaatttagctaaatagagctgatcaattttctcaagagaaccaaacatgattcttgctagtttgttgttacttattaatttagctaatccttcatacagaaattatgggttgtttagttaggcagtcacggttattattttgcttctttattgctctgctgattgggtgcttctgttatttctgcctcctctagatcacaaggtagagcttaggtttgacaatatcattttgttttgttagtttggaagtgttcatatcaatttgataagaagatgagaactaatttttggttcatatgaatggtgcagaaattcc

SEQ ID NO: 99064 - DNA, 582 bp, Vitis vinifera
  Intron number 2 from transcript GSVIVT01023380001 (locus G SVIVG01023380001) derived from phytozome v7.0 (chr-ID chr1 2; pos 19177558 to 19178139 reverse strand)
caaccaagtgagttgaaaattttgaatctcttataattgccttcatactatgcttttttttttataagttttgagtttcttctttcttctacttcactctctctccttatttatataaggttgttgtgtttggttgctgagaaaagtgaggagagagagggaaatgaagcaattgaatcttgcgcttttatgttgctttctagggggatgagcgctgagagctgtaagatttaaatttttggttctgcaatttctcagcaaacaaacagtgctttctcgtactggattttaaattttgagcttcaattggggagataggttatttctagtgaagatgttctcagggaaatataaatttcaactgtacagagttattttactgaaagtcaaaatttatttttcccaagcttaacagaaatatattcaccaaaataactggagttgccaagagaaaaaatgtcttttgctggaattgtatttatttttgggtatcattttatttatgatgaagcgtttttttttttttttttttttgaatcttttttttttttgtattttttaatcagttgcagagcattttgc

SEQ ID NO: 99065 - DNA, 441 bp, Vitis vinifera
  Intron number 2 from transcript GSVIVT01021468001 (locus G SVIVG01021468001) derived from phytozome v7.0 (chr-ID chr1 0; pos 5847590 to 5848030)
ttggtgactctcttcaggtactgttcaccccaaccccttcaaattttgttttttttcagacgacaaaaagcaaaacccaaccagatcactcctattcccaactttccacctcccctcttcccttgctcataatttctctctgttttatctcatctctcaagaatttttcacccagaattcaaacaaatggcttcctctgtttctctccctatctcgtatcaagtccggtctcttggtaatcttcttctctctctctctctctctcccctgttattttttttaatgggtatattctcttctctttcacgtttttttccctcttccttggctctgtttgggttatatttttaattggtattttcccttttatctctttgtggtttcttttttggccttgtgcatgtgtactaacttggatgtggactacgaatgatgcaggtg

SEQ ID NO: 99066 - DNA, 874 bp, Vitis vinifera
  Intron number 1 from transcript GSVIVT01026821001 (locus G SVIVG01026821001) derived from phytozome v7.0 (chr-ID chr1 5; pos 20208747 to 20209620 reverse strand)
aagggttcgaagccatctcacgctcatttggccaggtccgtttgggttaccagaaaatgtggaagcaactgaaaattatgtgtgttaactatggttttttttaacgaagctttattgggttttgcagaatgtgcaactttaattaattagatgttatgtttagtcgatgtgaaaatatgggaagagatgaaattttgagtacttcattttatgttttgtgtgtctccttggggttgtttggtttgtttatttatgtagtgtgaggagaaaaggtacatatctagttttcgcatgttccgtttggttgctgtgaaaatatggggaaatggaaaggtaattaggcttccgtttggtgagggcagtaccatagtttcccgggcttgaagagaagaaactggaaatgttgaatcttttcttttgtgcgcttttggttttcacttttcaccatggggtagtcgtaataggctctcttgagtgggtcttagttttctctggtatggaaaattttaaagttttattttatctgcaaccaaacagatcattaccttgtgcgcttactttggtcaatagcaaaattctacctcacgggaaaatttcttgaggtgcatttaattttctgaggaaggatttgggcttttgagaattcggagctgctttataactcattcttttaatctctcattatagatatatttgagtatttgagaaaatttctctcctttttctacatttggatcttagatttgatacgatgttctgagtccgggaaatcaaaggaaaaaacatgggaaaaggaagattacctaaataggcatcatatttcacttgtatggtgctgacatgtttacatatttgttttttaaatgccagcctc

SEQ ID NO: 99067 - DNA, 649 bp, Vitis vinifera
  Intron number 3 from transcript GSVIVT01018980001 (locus G SVIVG01018980001) derived from phytozome v7.0 (chr-ID chr4 ; pos 18132082 to 18132730)
gtcactgttctccttatcatcctcttcttaggtaataattcaccatctatttgtctcacagatggtttatagtgagtaaggttccttggagagttagacttcatctttatttcttgagtgcagaaggttgctccataactgtttttgaaaacacatttaacaaaaaaaaaaaaagaacaaaaaatcttttaaatttagattgtttttacttattttttaaaaacaattatgcaaatacaaagaatgatcattaaaaactaaagcattacgtataaaaattatttttaaaaatataaaaaaaaaaaaagttaaaaacatatcaaattatcaagcaaatttttgttttacaaaacataaaaagaaaaaacaatttttaaaaactcttttcaaaaattatttttaaaaattatttcctaaaacacttcttagcttgctttatttatttatttaatttttgtaatgatgacgtaaggtttcttcttctaacttaataacttttttttttttttcctgtgcaattataatcttcttttacaagttagtacctctttctgagcaactgcatatcttctctgttaattatgcacttatgctcaaaactataatggcggtaggtacatcaactaaggctttattcaaaggcatagaa

SEQ ID NO: 99068 - DNA, 603 bp, Vitis vinifera
  Intron number 2 from transcript GSVIVT01029194001 (locus G SVIVG01029194001) derived from phytozome v7.0 (chr-ID chr1 1; pos 18712920 to 18713522 reverse strand)
cagagccctggtggagtatcatcttatttcaattcatctttcagtatctttccattagatgacaagccactttccttaaaaatgattcctgttttggcaatttgattggtttacttgagaccctaacctttctgctttagcttactgttatatccaactctttcactccacaacagttatcctgcaggggtttgtgcagattccattgaacattttctaaatttaattacttggttgtgcatggaacacctaaatggatgctgctcccctcccaaacatcaacaccataaaaaacagaattccctgataacagatcttttgcattaatgtggaattaataggaactgcaaatacactcacatgtatatgtatgtgtgtgtgtatatgtatattgcaaacaattctaaagaaaaaactaaggaaaaaaaattatgaagaaggaaaaaaaaaaccttcttaatcttatattttttctatctttgtattttaagaagtatttaatttttaattaacaagatcataatgttggttaatcttcctccttttaaacttaaatttcgtatggcagggagttacggctacaggttggaagaaggatcaaat

SEQ ID NO: 99069 - DNA, 700 bp, Vitis vinifera
  Intron number 1 from transcript GSVIVT01027903001 (locus G SVIVG01027903001) derived from phytozome v7.0 (chr-ID chr5 ; pos 9218763 to 9219462 reverse strand)
gcttacaccttcgaaaccgtcgaagaattttggtggtatctctctcgctcgttatttctttaatctttggtttcgaattttttcttctgtttggttgatcggaaaacacgcaggaaagtagtggaactttaattttggatcttagatttacccttttttttagcttaacaccaaaaaaaaaaaaaaacacaaaaaaaagaaaaatggaaaaaagtagcaacaaccgatcaattgaacgatttgattagtttgttttagtttttgttttctcggacaatggagggttaattctcgtgagctgcttgctttttcatcggtttgctctttcgttcgtctcttggatttggtgggatgtgttcattggagttagataagggatttttttttttatttttaattgaacaaaatttatattgatgttcttgttatggtctgtgtttttttaatttctctcgctctctgtttggtagccaaaaagggaaggaaatataattctcaatcttatgttttggttcctttggttccctggaaatcattgtttttcttgctttgtttgatttgtttgagtcaattctgcaatatttcccacattgggattgattcttttgtattcttttttatcaatatcagttttttaaatcagattcatttatgtaccttcttacacatattgaaaactgaacgtctttgtgcagtctgt

SEQ ID NO: 99070 - DNA, 645 bp, Vitis vinifera
  Intron number 2 from transcript GSVIVT01019032001 (locus G SVIVG01019032001) derived from phytozome v7.0 (chr-ID chr4 ; pos 17564245 to 17564889 reverse strand)
ctcctccagtagcaaaccccgtttcacatcttggggttggattgatgagagggtttgcaccagttcgaactgcaagatttggtaatttcgcattgtctgctgcttttggtcatttatctccctccctgttcaatattcacgttcatggatttcctgatcctagagtatatggggcaactcctggttatcccctctggttttcaaatgcaatgcatgggggcctagggcatatgcacagatttcctcacccaataagtcaaagacagcggaccaactactatctgaagaatctccttttgtttacaggtgtgttggtgattcttgctttgatatggtaggaaccaacactcccctttgccagtcatctgtatcttttcaatgccttagtttctttgttatagcatctgcaatgtacatgtgtttttcataaatggctcacagaatctctcttctgagttttactcagaaactttgtcatctctgtaattataatatattgttatggacgatgattatttttatgcttcttgaagcttataaaaataagagatgatagttaattttgagtacaatgttatcttttgttgaagatgtttgacttgtatgtcaggattctgttataaccttgttctataaaaaatttat

SEQ ID NO: 99071 - DNA, 487 bp, Vitis vinifera
  Intron number 1 from transcript GSVIVT01019032001 (locus G SVIVG01019032001) derived from phytozome v7.0 (chr-ID chr4 ; pos 17565233 to 17565719 reverse strand)
attgaaccattttattttatctatcggaagaaaaggtcagcaccattattcaattctacccgtctttacttttactgttctcaatcgttgctgtttgtgcatttgatgtcggtttgatttatttgtttttttcaattttttggaaagcatttcttttccgtgtcaccgtttggttgctgagaaaaggtaggaaaataaatcttagtttttcgttttcggatttcttgggaacaaaaacaccctcgaaattgtggctgatataggtgttctggaaatcaaagcagccttaaagtacatgatctgaatttcatgttcctttgtttccacggttttctcggcagtcaaatggcggcctaaggttctggtttttgccgttgaaaaaggaaaggaaaaaaaaagggctgaatcctttatgaagttgctgtagttttgatttaagttttgtctgatacgcaggcatttgaatcgaagttgataggggtaggaa

SEQ ID NO: 99072 - DNA, 369 bp, Vitis vinifera
  Intron number 1 from transcript GSVIVT01026066001 (locus G SVIVG01026066001) derived from phytozome v7.0 (chr-ID chr1 8; pos 25045025 to 25045393 reverse strand)
ctccggtggttggagatccgcatatttcatcatcggtaagcacagttcagaaactatctaattttaatttcaaccattttttaagctggccatcatagattgaggttccatttgggttttccaaactaaaaattgaagaaaaataaactaaattatgatttaaattcaaatctgtttctcctttttcgtcttccatacgaagaaccaaacatttgaaaataattttgattacacttaatttttcctgcagaattttaaaacaattttgtaattttagatgataaaacaaaggatatggctcttaagttttcccctttttttttttttttttctacacaggtgctgaagttttggagaggtttgcctact

SEQ ID NO: 99073 - DNA, 700 bp, Vitis vinifera
  Intron number 1 from transcript GSVIVT01030178001 (locus G SVIVG01030178001) derived from phytozome v7.0 (chr-ID chr8 ; pos 10809354 to 10810053)
tggtgctggcatctgcagcttctcgggaggattcggttagttctacttcttaattagggttctgtagctctgagcaactctgtgcgtattgtttgtttgattatctctgtcttatcttcttcttctattgctttgctttttgttcggttttgagtttgctgcattttgtttctgttgtttgataatgaattctggctttcctagaatttggttggtttttgttgcaatttaaaggtcgtgaagaagcttatcctatgtttggttgtccaggaagtagaaggaaagaatatgaaatggaaatttacataatggtaacttaccttgtcgtctctggtctctttccctccaattttccctgccagatgtttggaattattgtggggtttccaggcttagatatcaacccaattgaaagaagtggaatagttgggaaaagaaggtgattaactagataagtcatggtagtcatacaaagctatattttcctcttcactaatcactacctcgttcaatgataaaacatctctcaatttctatgcgtgtctttttatttatttggatgactgattttctgagtcaagcatgcagtttatttttatttatctttttgctcatgttgtttttcttttctacttccttttcaaatttgatctagtctttgttttccagtcaaagattgaagtggagaaggaaaatacta

SEQ ID NO: 99074 - DNA, 952 bp, Vitis vinifera
  Intron number 1 from transcript GSVIVT01020360001 (locus G SVIVG01020360001) derived from phytozome v7.0 (chr-ID chr1 9; pos 20594986 to 20595937 reverse strand)
ttgccattgtgcaggttgatatctttttaatttattttttcagttccactgttttgtttattatttgcaattatatttatttagtgggcatataaatggtgtctttcaattaattcagcttttctctttaggaaaaaacatgcaccttctaattaatgtatattctggttcctttggtgaaccagatacatctatgagtgtgtgagtgtgttgcatgctctcatgtgtgtgcatctctctctctctctctctctctctcacacacacacacacacacacacatacacactaagtacaagaggcacttgcacctctaattcaaaactatgagtaatcaaccaatatgagctttgctaaaactttaatcttgaacagaacttaggttgtttgtttggtgatgtttgccatagcttcccacaatttttctcaaaatataacaaatagaattgaggatccttggaaatgtttctagaagaagtgcttctcatctaatactaaatttatgcttagcttggaatgagttttagactagtacaaaatgaaggaaaatattaactttatttgtgggaagtcatttttagggtactgtataggcatgcctcatttatattattttatgcattcagcaatattaatagaattctagtatttgccatcatgagcttatacaaacttccataggacatactacttttgcgttttttaaccggtgtacctcatttgcacgttgaacattgataactttttgcatggattcatcttgttttatgtattcaccttgctctattcccttgttcatgggccagcatgaatttgtatactcagaatgaaatgattggagtcacaatagtgtcgaactctggattagcaagacactcagaacaactttatggttggttttcccagtaggaagaaatttggtcattgaatcctctgatacttgtttcaggga

SEQ ID NO: 99075 - DNA, 774 bp, Vitis vinifera
  Intron number 3 from transcript GSVIVT01019561001 (locus G SVIVG01019561001) derived from phytozome v7.0 (chr-ID chr2 ; pos 1624825 to 1625598)
acggcgatctcattatctgtagggtgagttatcgagtttttaatgctttctttgaaatggatttggtttgtttgtgttttgaggactggttttggagagtgagtaaaccctaacctttgaggtagtgtgatttattttttttcgtgttattttgtttttaagaggttgtggagcttagccgggttgagctgggctggttgcgtgtggttttgcacggctacggacttaggattaggctttgtttgggtttggagaaaagtgaggacaacggaaactgaaattttgttgttcatttctttacattgctatagacttgatgttagggtctgtttaatttccgagaaaaatgaggaaacaaaaattgaagaaatgtttgtgtgatgttaatcatgttacatggctgcaggcttagccttaggctcggattggttgccgggaaaactgagggaaatggaaaatgaaatgttattgtgcattatcttacattatataattcaatgttagggtctgtttagtttctaagagaactgaagaaaacgaaaagtaatatatcaatgactcaataggtctatagggttcagctgaggggagggtttgtttttctcggttctcaaggttcctatctttcctatattttctttgaaccaaatagagccattttaaatttgtttttaattttaatttttattttttaatcttctaatgattggattcctgttatttatacgtggttatacagctatctgataggagaagggtgacaattcaagattt

SEQ ID NO: 99076 - DNA, 634 bp, Vitis vinifera
  Intron number 1 from transcript GSVIVT01025129001 (locus G SVIVG01025129001) derived from phytozome v7.0 (chr-ID chr6 ; pos 4158280 to 4158913 reverse strand)
tttctgcgatcatcagccgctttaccagcgtgtgagttcctcttgattcttgtcttttgttttttaattccttaagttgaattctattgctatctcctttaaattctttatattgggtcttgaatgcttttgctttcctctttcacttcttttggtagattttgaattttactgctattttctttcaattttctttgttgactttgaatgttattgttatcttctttcacttatttatgtggaattttaatgctattgctatcttgaatgttaaattctgtctataaaggtatgaatttttggtgtgtttttactggattcagtgggaattgaattgctagtgttgtacgtgtaattttttttttttcaaatgtatggttggaaatgggtttgtgacagaagatgggaaattttgaacctttggcaaaagctatgacttattgcttttgtgtgtatatttcatttcttttgaagtcattgttttaaggagcttaatgatggtcagctgataactgaactgcccattttgttgtgcatgcaagtttatgtctaaatgccattattatttgttgctgaaaaaaaaatgaggaaatagagttttgagtcctttggttcttgttttggtttcaaacaa

SEQ ID NO: 99077 - DNA, 652 bp, Vitis vinifera
  Intron number 1 from transcript GSVIVT01023956001 (locus G SVIVG01023956001) derived from phytozome v7.0 (chr-ID chr3 ; pos 2188868 to 2189519 reverse strand)
aaatcttccacttcctccccaatttccatctcctcgtgagtcaaatctctttcaaaccctggttctttgtttggatttcgaggggaaaaaaaaatagaagctaaaaacacgaaacgaaagcagaagtttgagttttattctgtttattaatttgtccttgttgtttttgtcgataaaaaaaaattgaaaattcaacttagagaagccactggttgtttaattttagcttgatttttctttgttttatcgtctgcctcgaaaggagggtttggaataggatccttgtttagatttgtagatccgaaatgtataaaatcgctagcgcggtagcatgaatttcgaattctattgagttcggattccatatcggaatcgaattttaatatcccgattttcgtgatcgttaattttgattgtttttgtttgccttcagtttcgcctcaaccaaagtgagcatgagtttgatgtttttgttttaattttttagcggttcttcaaatgttgaagattttaatattctcaaattcgaaattctaaaatttatattctttcttttttttcccccattcagttgagtttcttggcagctaactgttcttagatttgatgtgttcattttttttataaattttttgggtattttcaattcagg

SEQ ID NO: 99078 - DNA, 750 bp, Vitis vinifera
  Intron number 1 from transcript GSVIVT01022342001 (locus G SVIVG01022342001) derived from phytozome v7.0 (chr-ID chr7 ; pos 18722641 to 18723390 reverse strand)
agaagaaggtttgaagaatgttttcatatttttcttcactttctttgcactattcaaatttgactttttaaaatctattttttcacatgaagtaacaataaaattgcttaatacttaatagtattattttgagtcacaagtgatggatttatttttctaaaaaaatagggtacgaagaacacgtggatttatttctttatattcttggtacccttcaaattcttagtgctctccaaacttaaaattgtaattaatttttttcctatttcaatttaaaaaaaataaaataatttcaatattctatccaatcttcttcatttaaaaaaaaaaaattaaattacaataaaaaaattaaagaaactttttttcagttaataataaatagaccatcattctaatttttaacaatacatacttaatttaatatatttataaatatttttttcatgaggtcttagggttatgagtttatattaataaaataaatattttatgatatcataataattattctattacgaaatttttattattatcaaattttaaatattttgttatttttataaaataatattttaaatgatataattgatggttgtaatgagaatagaaaaactaacattattattattttgaccatacgtaggagggaggggcttctggtcggtacgaaagccacgtctcggccaaaccgatattattactcagttctgagaaaccgatatcattactcaattctgagaatcgaag

SEQ ID NO: 99079 - DNA, 327 bp, Vitis vinifera
  Intron number 2 from transcript GSVIVT01022464001 (locus G SVIVG01022464001) derived from phytozome v7.0 (chr-ID chr8 ; pos 3360908 to 3361234 reverse strand)
ttgagatcctccggttcgttccttttttcttttttcttttataattaattttagtttttttttttttttttttggtaattttttgttctgggtcttattattttttgggtttttattttcctttcggttcggaggaaaagaaataaaaaaaagtagaggaggttctgaatctttcaagtgagctgaaagattcaaatggtgctttcttgtttattttcctgcattttctgagaagacaaatggtgggagagggttgattgggttgatgaaattgtttgaactttgggtgcagtgattctgggcaattgaggactgcttttgtgacat

SEQ ID NO: 99080 - DNA, 926 bp, Vitis vinifera
  Intron number 2 from transcript GSVIVT01019857001 (locus G SVIVG01019857001) derived from phytozome v7.0 (chr-ID chr2 ; pos 3881257 to 3882182)
ctactggtgagcataatttcatgccttttacatgccttatgtttctggttttagcagttgaataaaacaataatttggcactgtgtgcgtaaaattacctgaattgagtgattacaagtgcccctttgctttaatggatttgataaataaggggggaatttaagcaaatgagctttatagaaatactctaatatatattggactttgatttgcaattctatcaatgttttattgtgaaaaaaaaaaattgagtcataaaatagagagagaagtaaaacaagaaatccttggttggtatcaggaaaggtttcataacattattttttaaggtggtattggtgagggacaatatatccaagagactagctttgcagtcttatttttatgttatgtttggttatcggaaaatattaaggaaaaaaaatgttatggaaaatggttttcttttgtttggtttcactatgaaaaatacaaaagaaaatcaaatataattaaaattagttagaaatgtattcatttttaaattgttcaatctttatataatggaaaataactaaaatgagtttaaagaagtatatgaaaataatttattgactttgaatctattttttatttttcttcactttctttttccttctacttttcctctctattttctttcccttacaatttcccccaaattttctagaaaccaaacataaccgtaggtttcttgtttgaaatccttgctcgcagacatgcaaatattggtttctgtggataaatccttgaaatgatccacacataaaaactttgataaattgtggattatgttatgatttataggagctttgagggttttaaccttgggtctctttatgtgcaataaattataatgatgaattactaatgttggatcaatttcgtgctgatgtataggagctcta

SEQ ID NO: 99081 - DNA, 800 bp, Vitis vinifera
  Intron number 2 from transcript GSVIVT01024222001 (locus G SVIVG01024222001) derived from phytozome v7.0 (chr-ID chr3 ; pos 78965 to 79764)
gtcacacagaagggtaagaagaaatgcacctgaagaaaatctacatgatttttatttttatttttcttagggaattgagtgtgttaatgtgattgataatggctgctttgagcttctatgccctgttatttgcttagtcatcgatatgacatttaattattgtttttgttcaatttaaatctgcattagcgtttagaaaataagttctttacttgtttgggtaattttcatgattttagtttgttctacattgattgaagttaaattgttatgcattattctcagctgccaatttttagctttcatggaaagagtagtggatgtagttgtctcatacgtgggtgctttcttgcttgcatgaacatacctgtcttcaaattttgtatctacttccaaccccaatgaagcattcatggtaacagtggggatagttttcatgccagcaagagatggtcatgccaaagcaatactaagccagtgtgcgtgcatacttagaattgctatggatttttatttagacagtaaagcttaagtgtctggtaagtcactaacgaagaggaaggctttgaagccatcaaacgtaaagaagagacctagaaaatctgtagacctgcttgattgagttgaaataaatcatgctaaaatccttcaattctccttcttcactcttattagttgaaaattgaaatcattgtctgcatctataatgctactaagtgccaaccatttacagtgttctaatttgttccttttttttgttcacagggtcaaccgaacaccggggatttggttttgttcaa

SEQ ID NO: 99082 - DNA, 715 bp, Vitis vinifera
  Intron number 1 from transcript GSVIVT01024158001 (locus G SVIVG01024158001) derived from phytozome v7.0 (chr-ID chr3 ; pos 694834 to 695548)
aatccaaacgccagctcaaacgagaacgccgccaggtcctcttatctctctctgaaacttcatgtacttacatcaaacaactgcgtttttgagttcttcgtggatattatttgtttgttttggtgagaatgtgattcaatgtgtatgagggctgtatcatgatccatcaatgtataatttgttctatatactgtgtttggctccaaattccaagcttgattttggtatttggaaacagttgggctgaattgggatatggaggagcatcctatatggaattcgggtggcaaattttctcccataaatttgggaattcagataaggttatgaagattttgggatagaataggaggaaaccgagtttctaatacattttccagtatcagcattcagcaatttagccagaattggtttatatgggattaactgttactcgtactgaaccattggaacaataggggttatgaaatgtggtaatttgacctgggtttgtgtattagtggtttacctgcgaacgattgtgaaagaaataaacagtttctgagtgcttgtcttgtagcttttgtgtttaagttatgtgcccttgggtttctgatttttgagaattattgtcttgtttgttaattggataagcttttgattttgtaatctaactgcaagagataattctaaccttgcaggagcaaaaatcagccctaaatatctgttccgagat

SEQ ID NO: 99083 - DNA, 530 bp, Vitis vinifera
  Intron number 2 from transcript GSVIVT01025105001 (locus G SVIVG01025105001) derived from phytozome v7.0 (chr-ID chr6 ; pos 4435305 to 4435834 reverse strand)
agattaaacttcttagacatttggatcacgaaaacgtgagtgtttattttggaattttcattcaattatttgaatatacttcaaataatctatcatgtctttagactttagattgatacaaaacgacatcaatctctctatttgattgattgtggtctgataggataaacacttcctgatggtatcagagtattgtagcttgaggaacagtgtctaagaaaggtctccaggagctgtgaccttagaaggattctagcatttcgaagcacaccgattatccaattatcttcctgtttttgtaatagttggctgtaaatttctaatttgagaaggcaaatatgaataattgatgttgatcaactttaaaaggatgacatctcttgttatctctctgcttcttttgtggaaaacaaaatatgattgtagaagtagtttttgttgtcaatgcaagtttagcggttaactttgacagtttctaaatcttttttcactaaaaatacttcccctgaaacaggttataggtataagag

SEQ ID NO: 99084 - DNA, 903 bp, Vitis vinifera
  Intron number 1 from transcript GSVIVT01022377001 (locus G SVIVG01022377001) derived from phytozome v7.0 (chr-ID chr7 ; pos 19325249 to 19326151 reverse strand)
aggctcgctgatttcattcctaatctcgtttgcaggtatactccaaaaggcaattcatttttttttttctttttgctctctgtctggagcataggaaaggaaaggtaaatgacaaaatgctgcgtttttcatttaaattaaagatgaattttttttttttcgctgttgtttggttttgccttgtttgagtggtggaaagcggggggaaatgttgaaattctctgtttgctgcattgacgttcacattcacatttccattctcgttcaaatgtgaatgaagacaattttttgttgttgttgtttcggttttcctctgtttaggtcgtgggaaagggaaggaaaattttgaaaatcggttgtgggatttgaatagaaagatctttgtttatcattacaatcccttgtgggatttgagataatgttttgttaattttgtgggagcagttattaggtcatcacattctgattaagtcaacaaaatgagccaccacctgaggcggcatacagcttcatctgaattccagtttgcatagattactgatctgtattttagttaaaattgttttcaaaatgctgctggaattttctctaatagtaaattattgtcttttttattgctctcagcatgaagtttagcattgctctattataagaatattaaattgtggaagaatcatagcttttaattatgtcaatggataaaagaacctggttgtagtcttgcattttgttatccactttgctgccctcataatattgtattactcgtattagtggcttttattatggcccttctactctgttttgaaaaacttagcatgtgattattatcataatttgactgaatttcacatcacttgattgtcagtgggagaataccttgtccacatcctggaaggatat

SEQ ID NO: 99085 - DNA, 679 bp, Vitis vinifera
  Intron number 2 from transcript GSVIVT01029771001 (locus G SVIVG01029771001) derived from phytozome v7.0 (chr-ID chr1 2; pos 14448371 to 14449049 reverse strand)
atcaagatctcgttactcttgttggtaaaagcataaatattaggcgataattatttttgaaataattttcttttctcggaaagaaaaatacatatttggcaatcaaaaaataaaaaacaatttttttattcttaaaacaaaaaataaagtgttttttgataacacattctattattttcaattgttttcacttgtttttaaagttgctttaaaaaataattatacagaatgataaaaaataatgcactgcaaaagaatgttttctaaatatattaaaaacattgaaaatatgttaaaaatgttttaggtcttccatcaaaattttgttctctaaaatactaaaaaaatagttttaaaaaagtattttaaaaaactgttttttaaatatgtttccgaaaacacttccaaaacaaatgacttaaagttcatttgacaacaattctaaaaaatacttttaatctttttaacacttaaacttttttatcatttaagtgttaaaattgttagaaatattttctaaaatcactctcaaacttacttttaatgcgataatgaaccaaagttagaattattagtactgctgcttattctgtaacctaattccatgtgtctgtttgtgtgaatatatatatatatatatatatatatatataggaggacacaccatcggaactgcagc

SEQ ID NO: 99086 - DNA, 865 bp, Vitis vinifera
  Intron number 1 from transcript GSVIVT01029720001 (locus G SVIVG01029720001) derived from phytozome v7.0 (chr-ID chr1 2; pos 13758101 to 13758965 reverse strand)
tatttttgattgggctatttcaatcgggacacaaagtcttcctctttgaaaaattacaaaacacaatttttcttctaaaaagtcaactcttggagtttttgtttttgttttttgtttttttttaataacaaaggttaaagctcttatattgttaaaaagttgcagtgattttcgaatttataatttctttcacgatttgagataaaatttaccaataaaattatcaaatcagggttattggacatctcaacgggtattaaaaggaaacctgaactttcccataatcaagcccaatagaagaggctagggaataatttttctcattaaaaatgagagaagaggattaaggattgacccccctcaaatagtttgttgggtatttatatccaatagatgtgctcgtggcttaattttttagagtttgctatgaaagtaattttttttaaaataaaaatttagatttattttctaaatattcatccgagtaccacgattatgccatattagagggattaagtatatatattaaaactgtaatgaaataagtttgaggatagagtgttcagtcagaacacaaagtcttactctttgaaaaattacaaaacacaaattttcttctaaaaaagaattcaactcttggagtttttggtttttttattttttatttatttatttatttattttataataacaaaggttaagactcttatattgttaaaaagttgtagtgattttcgtatttatagtttcattcataatttgagataaaatttgccaataaaataatcaaattagggttattggacatctcaatgggtattaaaaatgagagaagaagattaaggaccgatcccctcaaatagtt

SEQ ID NO: 99087 - DNA, 568 bp, Vitis vinifera
  Intron number 1 from transcript GSVIVT01030395001 (locus G SVIVG01030395001) derived from phytozome v7.0 (chr-ID chr1 2; pos 5196913 to 5197480)
actcctaaagtatttattgttcggtgattatatatgttggaatttacatagttgaattaagactttttttgttttttttttggttgaaagacatgttgtttctaaatagacaacttattttaaaggatttgtcttgtattctaaaagtcaccatcaaatctataaatagggacccccatggcatttcttatttatttattcattcatccattttctccactatttcttcttttttgtcattctagtcctccttagcttcaagtctaataatttctcttttctaccaaatcaagtgattcgttgtttcttataagttgaagtgctactatcacaagaaagtgattgttgtatcatatgagacgattgttaataaaccgtaagcacctgagcaggacaaattcgtcttaaggacatagagtcaaactttagcctcgatcaactttatttatgagttccaattttctacttcattttatttgtatgtttattataagcacttattatccatatattttcagtgatttagattacagtatacgaggatctaacttttattcactatcgccca

SEQ ID NO: 99088 - DNA, 454 bp, Vitis vinifera
  Intron number 3 from transcript GSVIVT01027458001 (locus G SVIVG01027458001) derived from phytozome v7.0 (chr-ID chr1 5; pos 16583825 to 16584278)
aaaagcggcttattcatcgagatttaaaaccacaggtatagccacttcttctcactgtttttgtagcattctgtcatttagtcccatgtaactaggaatgcagacacaaattcgaatttggcatgaatttagagtccatttggtagtgataagcgcgtctaacctttcaagcgcttgaaaatttttatttttcaagtgttagaaggagtagaaacacttcctagaatcattgcccaacagactcttaatgtctaatgtaatttgtaagatttcagttttaatgtttttcttgggatgaaggatttctcttgaaaacgaatttgagtttcagttaactgatttctgagcatttagggtttaattttcaaactaacacatttttactttttttcagcttatgtctttctaatacattgtgcatactctaatttgcagaaccttcttttgtcaacta

SEQ ID NO: 99089 - DNA, 642 bp, Vitis vinifera
  Intron number 1 from transcript GSVIVT01027547001 (locus G SVIVG01027547001) derived from phytozome v7.0 (chr-ID chr1 5; pos 15795122 to 15795763)
tccaacgactccaccatcggatccaattcccgcaggtaatattatcgcctcctcctttctgcgcattaatggcgatttcaatctgatccgtccatttctctcatcactcttctgcctcaatcgtaccctgattttatgttttatccgtttggattgtttttaaaatttaattttattgattgatttgaggcaatggttcatcgttcaagtaattttcctgagctagatctgtaattttattgctctttttaattaattcatcttttataactctggatctgcttcagatcaaattcctaatcctttctttgtttgaattttgtgttttacatttgcttggattctacacggcttacttgagtgggcattttgcatttttttttttccggatgtgaaacctaattagatttgatgaattctattttcctcccccgcatttttattggcaatctaggagagtgtaaatatggatttttttaatcttgtttaaatggcatttgaatgagaagtcactgattttgatgaatgtgtcaactttgtaatggatagagattaatgtattatttattgcatgtggtcactggtgtttttgaattgattttgtttattctaatatttttaggtggcgtgtaaatagtccga

SEQ ID NO: 99090 - DNA, 631 bp, Vitis vinifera
  Intron number 1 from transcript GSVIVT01019529001 (locus G SVIVG01019529001) derived from phytozome v7.0 (chr-ID chr2 ; pos 1377920 to 1378550 reverse strand)
atacgtcagagactccataggagaggcatccagggtatgtcaatgatctctctgaatccatcgtttgcaatatccgtttcatttgtttctatcttttatttttattttaaattttgaattgaatttagaatttaatgttatgaaagaagcgatttttttgtgtttttttttgaggattgaaaacatcagaatcatttgtgttttttttgcttatttgttcatcaccctgcatttctaggttttttttaattgacaatttgcatgaacgttctaataatatccgtttggttgttgagaaaatgttggaaaagaaaagaaaagaacttcgacttcggatcttaggtttgtcgtcttttcgaagtgcaaaggcatgcaatctagctcaactattttgctccttgaggttcacttttcagtccttggaggtcaagacggcgcaattctttttcttttcttcgttttctctgcaggcaaacagatgactatggttatatatagttattttttttcaatgattttatattctcaacaaccaaacagactgctgcgactttatgttctaattttcttatccagtgattttatttttgtgaactttgctcttgtcaggagaactttgttcttccaagag

SEQ ID NO: 99091 - DNA, 674 bp, Vitis vinifera
  Intron number 1 from transcript GSVIVT01022880001 (locus G SVIVG01022880001) derived from phytozome v7.0 (chr-ID chr1 2; pos 18475186 to 18475859 reverse strand)
gcaattgttcctacgcaggtatgtgtatgatttatgttgagttgagctatattacctgaaaggcatgacatggaaagcatttggctaacaagatatgtccacaaaactatttcttgagttggtcctcaatctcaaacttgcagcttctagagcctgtttgccttaatatttgtttcacaattttatccccgaatgtccaagttagccatgtcataattctccttccctccttcgaacccatggggcaagaaaaagtcactattaacaaagcttggagtttagagccttattttgacaagttgattcctatctataatttgaagtgtaataacttcccaaaaaaagaaacgaaatttggttgttgtttttcttttctaaaaaaaattataataagatccttcaatcctacatttgatggccaaaagtttggtgaaaatgccagttgtttgtgaactgattttgtcaaatgtggcctattcctcatggagtgtgaaatcaaaatgagattcagttttccattcagaagcagttaatgtggcatactcgtaaacgccaaaagttctaaatcatgcccttttgttagtcttcgtatttattagctctttggtttaattactttcatcataagaatctgatctatgctttccaatttttgcaggttttgtacacacaca

SEQ ID NO: 99092 - DNA, 388 bp, Vitis vinifera
  Intron number 1 from transcript GSVIVT01020623001 (locus G SVIVG01020623001) derived from phytozome v7.0 (chr-ID chr1 2; pos 3677964 to 3678351 reverse strand)
caattttactcaaggtatgtctaagtttctcttatcagttacttggcttcgtcaggatttaaaagaatgagaaagattttttaaaaatgtcacaaaatcattatttccattatctttatttcctattattctgtttgagatttaaaaaagaaaatcagattctatttgttgtctgttagttagggttcaaatatgctaaaaattatggctcaaaacgctgcttgtctttacccttttaaatagtcaccagtcaacaaatctcattattgttttatatctttctactttgtaaatagcctaaacagtcttccattactttttgcctaagtcttccattagtttttgtccatttctaactggaattcaaattgcaagcagtggatattgc

SEQ ID NO: 99093 - DNA, 906 bp, Vitis vinifera
  Intron number 1 from transcript GSVIVT01021833001 (locus G SVIVG01021833001) derived from phytozome v7.0 (chr-ID chr1 4; pos 6728709 to 6729614)
cagcttcctggtttccgtggcattctcaagcaaaggtctttgagaattctccttgcttttccctcacttttgaattttacctatgtttggtttccggagaaatgtggatggaagaaaatattaaatttgaatttcgaaagtttattgaaggacttgaggaaaccgaatcctccaattgatgttttttgtgttttcgatgttccgaaatcaaactaggatcaagggaactacgatttcattttcttttgaattcattcatttttttcttctactaatcaaactaggttgttgagctgtgcttggctgctttttcgttcttcattttcatgtacaatattaagctccttgatgaggaaacgagggagaagaaaacaattacaatttttgattctcgaaaacctgctttatcttttttaccctagaaaaagaatagagcaattttttactacagaaaggactctattttcaattttcagaaaaaggaaaaaagaacaaagaaaagatagtaggaaccatcactctaatcttttttttttttttttttcttttaaattttactttgttttcttggcagccaaacggatggtttctggtgttttccttgaatttcagctgtttttctatctctatttctacgttatcgcattaaagttatttaaacttcttccttttttttttttgttaattttgtttttttaatgggatttcgttatccattccagagccaatttaatcagaattcaatttgatagaatatttacttcagtatatctcttttctgaaatttgattttgtttattttagtatgcattcttagacaaacttatggggaagcacatgtaaactgtgtttaattttgtattttttttgttgaaattccatgtaggtactgtgattttatcgtta

SEQ ID NO: 99094 - DNA, 747 bp, Vitis vinifera
  Intron number 2 from transcript GSVIVT01020702001 (locus G SVIVG01020702001) derived from phytozome v7.0 (chr-ID chr1 2; pos 2997802 to 2998548)
aaatcattcctatttataaggagaagtaagtaattcgtgggtctgtttggtaacatatggagatcaggaaagaaaattgtgggtcagatcaagatgtggtttttcatgttttaaagtatgaaacacttttaataattgaatactgtctgaaaatgtcaatgctctatgctttgagtatgcaatctgccggaataaagggtcctaggatcctttagtatcattgctttctttaatttaatttcattgagttccttattttaatttagttcccttgtctcgttaatcctctgtaagttaccctctgtaatttcattgagggcctcgtttcaaaaaaaaaaccgccgtttgggggctttaccgggactaactagtaaaaggcctagagcaggaagtgatcttagaaaccaatcacgttccaagaaaagatctcaatatcgtattagtttagaagaaaaacaaaagttgcgttttcattatggtctgacagaacaccaattacttaactaagttcctatcgccggaaaagccaaaggggcaacaggttgggttttactccaattacttgaaatgcgtttggataacatcctttttcgaggagccttatgtaaaatagggagagtgtaatgggaaaggtaggaaaaataatctcaataagaaaaatcctctcttgggttttgtaaatgtttttctaactctatcactcttctattaggtggccaaaagccaagccacttcctggtgctaatc

SEQ ID NO: 99095 - DNA, 889 bp, Vitis vinifera; identical to SEQ ID NO: 96061
  Intron number 1 from transcript GSVIVT01029014001 (locus G SVIVG01029014001) derived from phytozome v7.0 (chr-ID chr5 ; pos 10733515 to 10734403 reverse strand)

SEQ ID NO: 99096 - DNA, 872 bp, Vitis vinifera
  Intron number 7 from transcript GSVIVT01021879001 (locus G SVIVG01021879001) derived from phytozome v7.0 (chr-ID chr1 4; pos 6089574 to 6090445)
aggaagcttgcattgaaaacaaggtccatgtcttctcttttcagtaactccttttcagagaaaattgattctgttgatagctaatatggaacagtttattaattttgagttggttcgcttatttatctttcttttttttttttccctatggctaaattttgaaaattgattcatgataagtgaaataccctaacagtttttatggaaatttaagtcatgaagggtgctccaaagaggattagatattagggagagtaagcccgtgtgttaataacctatttcattcaacattacactagtggttaaagaacaagcattctaagattcaggccggaagggtggaaaatggatgttatggacaaagagatgctatgattaagatatttaattagaaaaggtatccagtagaagtgaatcattggtaaatatttgctcaaatgtgggtaattcaaaactatgttattcaaaattgttataataaaatcatacaccggcatggtgttactgcattactaaatggcagccataactgagatggagtttaaaaaacatcacggttagaaaaatcataactaagatggagtttgaaaaacattatgcttaagaaaaaaatgaagtaatatggttataagggagaggttgggtcatcggtttcttctttaggtttattttacttgaaagcagagttgctggtgacttgctggagttttaaggttatgttatcgagtggtgcatgattttgctttcattttcattttttttcttgattggtttaactgtttatacatgccgctgttccacattgtgaggatgagtaagtttatttctgcactttgatttggcgttgaatgtcattgaacagggagaagata

SEQ ID NO: 99097 - DNA, 330 bp, Vitis vinifera
  Intron number 2 from transcript GSVIVT01023826001 (locus G SVIVG01023826001) derived from phytozome v7.0 (chr-ID chr3 ; pos 3179969 to 3180298 reverse strand)
caatgtaagtcatatatgtgattggacactatcttctctcctccctttttctttaaaaaaaattacttgattgctgagaagggaaagaaaagaaaatttaaaaatgtatatctgtgtttgaattgcagctcagctgaatatttgtaaatatattttcagtttattggagactcaagttccaaaaaaaaaatgatgattttcatattccaaaatttatttatttcttttgatttcctcacaattaaaaaattgttttatgttagatgttatatttgaaatcatttagtttcacttttttttttaattgaatgcacaagaacaattgtagtt

SEQ ID NO: 99098 - DNA, 632 bp, Vitis vinifera
  Intron number 1 from transcript GSVIVT01019077001 (locus G SVIVG01019077001) derived from phytozome v7.0 (chr-ID chr4 ; pos 16995084 to 16995715)
acggtgaccgtacggcggtctctgctcttgtcaaggtttggcctcgagtttctctctgtctctcttttctttttgaatgtgtttgtttgtttttttgattcctttcaattcttcatcgcattgtgcagttctagctatgagtgaagtgatctgatttctgttttagggaattgaaaaaaatgaaaacactaatgttcttcaaaacagttttctattgaatgaaaaacagttttataacttagaaaacaggtttggaaaatgaaaacaatttttttgagaatgtgttcgaaacagatttgtttttggaataatgttgaagtgttttcagtaaagaaagccgtagaaaatatgagactgtttggcagtggtgaaaatgttattttctcatgttctagaaatcatttatttttatcagaaacatctctggtgtaattttcatttttctattaccgtagttttaaaaaaaaaattcaaacactttaataattaaagatgattgaggcttgaaatttatagtccattgttttaacgaattgcataaatagttaaatgattgattttggtgtcagctcagcattgacatatgtctgacattaggcaggaattacacgagctgttgttgggatcaggca

SEQ ID NO: 99099 - DNA, 744 bp, Vitis vinifera
  Intron number 2 from transcript GSVIVT01026939001 (locus G SVIVG01026939001) derived from phytozome v7.0 (chr-ID chr1 5; pos 19227166 to 19227909)
tggcagaagttgatacggcagtcatcaaacctgaggtaagttagttatgctcttttatgaagcatttcacccatatttgattggccagtgcaatgttttttatgaatgtagatttaaagttaatatttgattaccttgtttttaaacttgccctttttttttgttactcttatgttgtgaatttcttcttatgtttgggtactctctttgagtttatgtgcacttaggttagctctcatcaaaaacctcaatgaatgtacttacatccataaagctgatcccaaatagttgggatggggcttgtgttgataatatggtctggcaagacttctatcatgttgccttcgatgtatatctatcttaattggtggtcttgaccctaaactacattgttactttttttccatttacctacttgatgtgtgcattaatattatgatcttgtagtacttgaaaccaccaccattgcatcgatctatattttactcagttgatggatgcaccaatatatatttgcttcagttcatgtgtttttcctgataatatggtctggtaggatcctaatccaccattttaccttgatatatgtttctttgatgtatggtatctaggaccttaccctaatatgttgcctcaattgcttcttggtttgatataaagataaatttccctatttaatttttgtggtcttttaagagtgattgatgattctgaagctacaatggcactgctatacattctcag

SEQ ID NO: 99100 - DNA, 1027 bp, Vitis vinifera
  Intron number 1 from transcript GSVIVT01024183001 (locus G SVIVG01024183001) derived from phytozome v7.0 (chr-ID chr3 ; pos 529107 to 530133 reverse strand)
taggtgcatcggcatcagtagaacccttcatcaaggtgcctctctccctatatatgcatatttttctagttgtatttatttctctctctgtttgactcctgaggaaactggaggaagatcgaagaaaaatcagaaatttaatctgacgcggcactgtgtggtgctaagtgctaactggcattatggttgattaggatcttcaatatgggattagattgaaacgtcaggtccatttgtgtaatgtaaatttacctctttttctagggcatgatctgtgatgctattgatttaattaaagtaggaattgatgcttttttctatagcatgtatgtcatactcatggagtggcttcaagtgtgtggtatcaatatagaatttgaaaggcgatgcaaataaagcttcaggtcactaatcttgaaatcactgttggtacattggaggggttcacttctgtgttggtttttctttgatttttttatgttctagggttttagtcaagtctctaaaacaatatttgcgaagcaataatgttgaatcatgaatcaaatctcctgttttactctttggatagatccaatgtcatagcttgatatccatccagagaaccaaattttagactctttttaaatcgcaaataggtccgcattgtgaatagatagatgcgctttttctgtgctaagctgtggagtctaggccttaatccttacttgagataagtcgctttgatgtgcctggtgcttctagatatttgttgcctttcattctcatactgaagtgcttgttaatgttttgacccatggagagcttcatatcttactgaatatgtatgtatagaagaaaccatgttaagagatttcactaatttctaatcttagtagctagttttttttttggtgttttttttaatgcattgatcattcgtttcgtgcctaattaagagttatattcgttaaatatgttatatttgtattaattttaaagtttatgaacagtaccaagctatattgtgggagaatctgagttggaa

SEQ ID NO: 99101 - DNA, 591 bp, Vitis vinifera
  Intron number 1 from transcript GSVIVT01020406001 (locus G SVIVG01020406001) derived from phytozome v7.0 (chr-ID chr1 9; pos 19968096 to 19968686 reverse strand)
ttcaatcgtttttctcaaaggaatttatccttctggtaaataaataaacccatttcatggcttctttgtttggtttccaagtaaacttgagaaaaatcaaatataatctaactttttgagtcttagattttctgcttttcatctctgggcaatacccactatttttcccaaagtgggttcgggtgttgtctttcttttctttttctcttctcattttccattaagagaagttcaaatatgaatttatgtaaattttcttttattttcctctgttttctgggcaatcaaacaagggtaattggaattcctgttgcatttcttaaaggattttatcctcgggccttacacttctctgtatggtttccaagagaacttgagaaaatcaaatgaatcaaaattttgagtcttacattttcattattcaattctgcttaatacccactgttttggccaagtgggattaagttctccttgcatttttcggtgtaatttcctttatttacctgacttttctctccaaccaaacaagcctgactgaactttcgcaaaaattgtggtgggtgtgcaggcgcatttgagagaaggagatat

SEQ ID NO: 99102 - DNA, 489 bp, Vitis vinifera
  Intron number 2 from transcript GSVIVT01025217001 (locus G SVIVG01025217001) derived from phytozome v7.0 (chr-ID chr6 ; pos 3143130 to 3143618)
aaggtaaggagacagcctttctctttatctttaactttgatatgccttttttaggataaaaaaaaaaaggaaaagaaaagaaaagaaatataaactaacccatcttatatgtagtatgaacaaactgtgattccactttcacaaaattagaagaaaagcaatcaaagcttattataattccttcatctaatcatgtctaattaaatattcaagtcatgacatctttaattaatccatcgaaacaatcttatcatacctaacatggccctacccttatagaaatgaaatgattttaatttgaaatcataatgtttagagttgtttgaaagttgtgttaggtgaagactacataaaagtactattccttctttgaattcctcataaatagcgaccttcttcattataatggaagttagggatcatgtaaatttttgtccaacttttcttgctctttgttttatttgtggatgcagttgagttgggagggcg

SEQ ID NO: 99103 - DNA, 1053 bp, Vitis vinifera
  Intron number 1 from transcript GSVIVT01024921001 (locus G SVIVG01024921001) derived from phytozome v7.0 (chr-ID chr6 ; pos 6017583 to 6018635 reverse strand)
tctgtcccccattctgcgaattccagtgatttcaggtttcgtgcaacgcttttttttttttttttttctttagattctctttggttgtcgagaaatctcagggaaaagagatgcaaaattcggaatcttgaaaactggaattcactctcccatggttccaggttttttctgcttttccttctgtttctcggcggccaaacggaggtttgtttcgatgttgttgtgtggatttccgatgtgaatgtttttgtaagaagaatcgggacaatgtggatcttgtgttgttggaatcggtgtttggagatgtactagcgctagtagaagtagttgtcgttgtccatcagtggtgttgaggtgtggtcgtgattttgggtgtattaatcgctggttctggagaaatttttaggagggatactgattagggttttactggattcttcctctcctggcaaaatatggggaaattgtgtgtttgttgaatgttgcaattgtagctgttaattaaaattgtagctctaaaggagcggttttgaccttgtttcgaagtaatgctgtaggtctgggattttttatgcaatggttttgcaatgtggtggaaaatgatgctttgaaagtgtaaacagatctagaattctttaataagaattaaagttgactactgcttctagatgatgagtttagttcattttaatttaactatattgattggagagtgggagatcaaggtttcatttagcacatatggttggcatgaacattttgaagataagggattgcggcttcttgctttgtgatctgatcattttaatatcgtttattattattattattattattattattttgggtcgtacttcctgtgtgaggataagcaaaaccttaattgccgttatatggggttggttatgcttgaatttagctgagtaatttataagcttcaaagcttttacagattctcgaaggtgtggatagcatatttataactaatatactttgtgttcccctatcatttgattcttttaggtaaggaggtttgcggtcactcctgcgacc

SEQ ID NO: 99104 - DNA, 489 bp, Vitis vinifera
  Intron number 1 from transcript GSVIVT01019563001 (locus G SVIVG01019563001) derived from phytozome v7.0 (chr-ID chr2 ; pos 1639176 to 1639664 reverse strand)
caagagaatctcaagagacagctctttggtaagcccccgtctctgtttctctgattctatttaccatttttcagtgtccttctttggggtttgattctgattctgttttgcgttggtgggtatctctcaattgcatgagcaatcaattctctgtcttcgtcttgttgatactaccacacccctaccccccacccaaaaaaaaaaaaaaacccatatttagttgactttgatacagtcatcttcttgattttcatgagagaagataccatttctagtttattttgattcagtatttcatcagtttatctactgatgaggaaatgatgaaactagtcttgtgcagaattctcttggaattatcaattttttttttttttgacaacaagtttagattgttttgactgattcgtggtttccgatctctttctaatgttctcctttgtatcatctccaggtttgcctcccaggtaccgtgattcagtgcgggct

SEQ ID NO: 99105 - DNA, 360 bp, Vitis vinifera
  Intron number 2 from transcript GSVIVT01024905001 (locus G SVIVG01024905001) derived from phytozome v7.0 (chr-ID chr6 ; pos 6137699 to 6138058)
ctgaagttacgttgctgctagattttctggtaataattgtcttccctttgttgggaatttgattttgttgtgctttaggatattttggaaatggatattaaggtgtctcattgccttgactgttgcttcttttgttggttttttttttctggttaaatatttgcattacattttgaaagttatgttatcaactcttgtctgctgctcaatgtgagtttaaggtattcttgcagttagaaagtaatcaggtctgttgggttgactgatctaattaattgtctctgagggcagaaactagagctaaaggtggtcttgataatatgagattgatactaagtcggctttctggttaattgatag

SEQ ID NO: 99106 - DNA, 399 bp, Vitis vinifera
  Intron number 1 from transcript GSVIVT01026542001 (locus G SVIVG01026542001) derived from phytozome v7.0 (chr-ID chr4 ; pos 22059175 to 22059573)
tccctcctccttcaatcccaacgctccatcccctcgtgattcacgaccgccactctgatcccccaatctcacggccctcaaccccacgagcctctctgcgcggtcaacactcgaataaaaataacttaaaataatagctccccctttgaccaaagaccaaagctgtagaatataataataataaaaatattaccagaaaaaagtaccttttgctcgcgtcatcaaagctttgactctgtttctctctcttcttaaatcctcccttcgctgccctttttttctgttcttcttcgtcttcttcagcagctctactgctcttccagcaaaataattctgtgctttcgcagaagttgaagatggtgagggataacttgtttattacagttcccagccttttcc

SEQ ID NO: 99107 - DNA, 859 bp, Vitis vinifera
  Intron number 2 from transcript GSVIVT01024736001 (locus G SVIVG01024736001) derived from phytozome v7.0 (chr-ID chr6 ; pos 7349255 to 7350113)
gatattccttttcctgattggtctttctggggttggtaagaatttcaaacacttgattcttctatccttattcggctttataattcccgaagtatgtataacctactctgctgctggctagctcctgttgtttgcacttgttttggttggttgtatagtcactcacaatgcaaatcacagcaattatctttgttatgttatatgtatagtattagcttatttgatttggaaaattaatgcaccggaagcataagtttacacatttgaaagtcatgatgcttggtttgtgtctccactctctaaaatggaccaaatctatggcaataagttgagcgctctagggcattaatggttagaatatggtgcttgatgtaaggcattgtgttcctccattggtggcactacacaagtgatcctattctcctagatgataattccatacaatgtttaagtttaactgtttgttttttacatatgttgatatctccactaatgattccataatctctgcctcactgttggtttagtataaccattcacaacagactatgtcttgattttggttcgtgcggtgtggataagaagttatgtgaaggaaaaaatgaaaataaaacatctccttccaccacgcctcatgcgctggtccttttgctgtttgttgacttgattagtgggctaatagttgaatgttattgcaatggcagtgataaaattgctgggattaaatctgtttcataccctaaaggtgtatgatatgatgattcgattttacattggttttttatgcccaggcatgacctgatttgttgttcttggaagtgattctcctgcaggccagagattgatataggaccctggg

SEQ ID NO: 99108 - DNA, 612 bp, Vitis vinifera
  Intron number 1 from transcript GSVIVT01022106001 (locus G SVIVG01022106001) derived from phytozome v7.0 (chr-ID chr7 ; pos 16617176 to 16617787 reverse strand)
ggcaaagaactgctccatctgaccaagaaaatttggtaccaactgcttctattttttcttgtgcatgtatattggagttccaatctctgacaaactaatttatcatgttttttttagttatattgaattgcacaaatttttttccaattcatcctaaaaccaggatattggtttcagttcatgaagcatttttccctggaggtttttctttcctcatttttctttattaccatattaattaacttggacatccataaaatggagcatgaaaagaaccatttctccaggacttcaagagttccctttaatccatctataaaatcttctatagtcacatagtcatctctcataaagagactgcattgccccgggtcatgttctgatcttagtatttttccagtacttggaaatttcctttgtaatgcacatcatcattctccttttttcttttcccttctttattttcttaattaattccttgagtacattgttgtttccaggtccttattacacaatcaaattgttgtttccatgaattttcttttcacatcatctgtaataaattatcttggagctcttattttccagcttgttttccataacaggttgaca

SEQ ID NO: 99109 - DNA, 920 bp, Vitis vinifera
  Intron number 2 from transcript GSVIVT01024241001 (locus G SVIVG01024241001) derived from phytozome v7.0 (chr-ID chr1 6; pos 136248 to 137167 reverse strand)
gttgccaaggttagcgaatcgcttatcctatcctttttcttattctttagtttttattatttggatatgagatgtgatggtgtgccgtttttatgaaatttccatttgtatatttggttctgttgtagaatctaaagtttaatgacggttttcaattttgggttttgaatgaaggatgtggtttgaactatttagctcattggaacctaattatacgatgatgaagagggagtttgtgttcttgtttcgggttccccatttgtggaagtgccccaactcgtggggtttgtttagtgaggtgctaggttgaagatgctaaccctaattttagaagggtgtcctatttttttttttttgggttgttgggaggggggtgttgggtaaggagaagcatagggtatgcaagaggttgtcgagggcctcttgggatgtacttgaatgggcagtgagttttggaaggtcctgtttgattttcgatagtggtgctatatgttacccctaatatggtgtctttgactagtgtagatgggttacattttagtacatctgcacagctccataccaacttaataacttgtaggttcaactaggctgtgctcagtgttcttcaaccagggtttgttgaggctggttaacagggtttcttcttctccttttcccttctttcttttcttccttttttttttttgacttaaattctgttcatttgtagtagttctagccacaaccacccttttatggcactgatagtagtatatcaagagataaatggcctgatgggtggtgcactacattcatcagtcatgtgcagctaactccagtttaaattacatctcttctctttttatatgacattctgtggagagttttctgataacatgccccggcagggatcttggcattgcctaccgggtggttga

SEQ ID NO: 99110 - DNA, 778 bp, Vitis vinifera
  Intron number 1 from transcript GSVIVT01027549001 (locus G SVIVG01027549001) derived from phytozome v7.0 (chr-ID chr1 5; pos 15775689 to 15776466 reverse strand)
ggatatcggttgtgatccaagcgtttggtcgaacccgaatgcattcatgcctgagaggtttctggggtgtgatattgatgtcaaaggccgggattttgagttaattccatttggtgctggaagaagaatatgtcttgcactgccattagctcataggatggtgcacctgatattggtctctcttcttcattcctatgcttggaagcttgacgatggtatgaaaccagaagatatggacatgaatgagaagttgggatttacattacagaaggcccagcctctacgggctattcccatcgaagtttgattgtatttttaggttttgatgtatgtaacttctatgttgtttatctagctaccctatcatcacctaatacccacccaaggttttcaaaatatttgttttttctttgttgtgtcacttgcatcagaaacaactaaaagggtggataaaagttttagtagtcttgctctataatatagaagaaagaactaaagaggaatatactcatcggagtcatcgaaatcatggtttaatgtagtgtctttattgtaggaactaggaacaataatagagttgacatttttagacgactgaaacaaaaatattcatgaaataagtgagctgagacaaagatgtttggaaaaacgaatataaaagttgggaaataagtgaggcataatttatggcccatacaatgctttgaaaaatttaccctatgggctacttcgacagaccggccgattcatcggttaccaagcacttggcccaacccaa

SEQ ID NO: 99111 - DNA, 1009 bp, Vitis vinifera
  Intron number 1 from transcript GSVIVT01025274001 (locus G SVIVG01025274001) derived from phytozome v7.0 (chr-ID chr6 ; pos 2552641 to 2553649 reverse strand)
cctgtactgctttctacctcaagatttggttccaggtgggttcgctttcggttcatgtttggatgctgagtaatgttggaaaaacatttgaaaatgaattgcaaattttgaacgatattaccttgttcgttgtttaaactgccctctagcaagtggctgttcggctttcttgagttgagattttttaaattttgtctcaatgaaacaataacaaggtaagatagaagattcaatatctggttctgtgaatttctgattggttgctcagaaattattggagaaagaaacaagaatggattaaagttattgaaaattttgtgtctttgttgtttaaactgcaattccgcaagccacaatacgactgtttagctttggtgagttaagctttttcctttttgattttgggaaacaagaacataaaatgtaggacccagaatctcgttttactaatttctgcttggcttctgagaaaatccagcaaggcctaagaaaaggaattggaatttctaaatattggtgctttcattctctgaactataatacacccctacaaaactcatcctgactatttgtcttcatggaattaaggtgttttatctttgatgttgtaaaaccaggatagagaacataggccacacgattgatttctgtaagtttccctctggttactgaggaaatgttgggaaataagataaaatgtattaaggtttttcattattcaggatcaagaaaactaaagaacaccattcaagcaactgcaaagttgagtcgactctctcatactgagttccgtctttaaatctggtgtcattttccttattgcgatgaatcttctataagtactgttttccaatgtggtttcttggtgatgccagttaataccttttcacaaaagattggctttcataagttcatcccattggcttttctgcacatgggaaaaattcttagttggatatggttctgattttttgtaggaagactttgagaacttttggagtgagtgccc

SEQ ID NO: 99112 - DNA, 1030 bp, Vitis vinifera
  Intron number 1 from transcript GSVIVT01019263001 (locus G SVIVG01019263001) derived from phytozome v7.0 (chr-ID chr1 5; pos 2399846 to 2400875)
tctggaacagagcctccttgagagttattcatctagttgaaggcttccctttgtggtattgctactttatgcttgctagaaatatttaatcatcaattaactatcttgtgtttatctcaaaatatgatggccagtttactatgagggattttatctgcattactagttgataatcacactttggaaggtgaaaagaccttcatttaatagaggttcgtatttttgatcggataccgaattttgtttaccactttgtcaggctatgcacttcaatttggcattgggttatcatttctaattcaaattccattccgattgttaccctttccgaataatgcacagcaatgacacacagcgtttggaaatttcaaaatcttgtgtacaggatgccatgaatttaaacaatgtactaatatctattatgtattacctatctttccgtccttggattcatgttgtggttgttcaaaaataccccattatgattcatttcatactgtgcaacatgaaaggagaatgaaacttgaagcttctaccaaggcaggacatggatcctttctactcttgatagccagttataatatttgaatctatattctgttatttatagtcattggcattggtgtttagtcccttgacttctatagcagtccatggtgacatgatgaaaaaggaaatggaggcaagtgctctgctagggtccatggctttgtagtgaagcttaatgtggtaaggccattcatatcaagattttgttttctggttttctttcatacttcattttactggggttatgtgttcacatccattgttgacaatttggagaaatttatgaggttatgcaatttagactacatttgaacatatgaatttcaatattttcatctgggaagttattttccttagtcttcgatcagtctccactgtagtttccaataagatgttttatattttgtggtctatagattattgcacttggcaatattgttttcttcttggaacctatccacgctgtagtagttttgggtag

SEQ ID NO: 99113 - DNA, 892 bp, Vitis vinifera
  Intron number 1 from transcript GSVIVT01019942001 (locus G SVIVG01019942001) derived from phytozome v7.0 (chr-ID chr2 ; pos 4642600 to 4643491 reverse strand)
tttcgagcttcattactcgcaattcagtttggaaagtaagttctagatctttataatttggaggttttgattcccctgtcttttctagaatttcttaattgccacttgttcttcggtttcttcactcactgcgtcatctcgtgagtccgcgctcgttcaggaagatgacctcgacgtcatctaaaacactaacaaacatacaaatgaaaataattctctgcttgaaaatctcttttaacttttcacatgttctcttttagagaaatcacatccgttgtcgtctatatatatatatatatatatgaaataattatatttcccatatatgaaaataaataattaaaattttacaaaataaaactaaaattaagatttttaagttcagaaaagaaaaaataaaataaaaatgaaaatttataccgccccttggcaacggtttaattttatgatcttatttagaaattgctttcaaaaatgatttttaaaacatatgtgaaaatcaaaaatagaaaatatgatgtttttattatattctttaataacaactatgatgctaggatgtcttaaaatagtgtatttaatattttattttataaataaatatttattatttattttattatttttctttctatcatcatatttaagttccttattattcaaatgaatttgatttggaaaataatgattttaagaattgtatttaatttttttaatacttgaaaatttttattattcaagtattaaaaagattttaaacaattttttaaattattatcaaacactcttaatggaatagaaaaatgagtctattattaaagaaacgcatgttttgacatataaaaggggaggtgcaggtctgaagacgggggagaagttgataaacttgggg

SEQ ID NO: 99114 - DNA, 251 bp, Vitis vinifera
  Intron number 2 from transcript GSVIVT01027441001 (locus G SVIVG01027441001) derived from phytozome v7.0 (chr-ID chr1 5; pos 16698582 to 16698832 reverse strand)
gatctgtgagtagcccccattttttatgctcgtttggttgctgagaaaatgtggacaagaaaaaaaagaaagaaagaaaaagaaaagtgaagttctgaattcactatttggaaccccagataagaagatcgacataaaacatagtgcttgttcaaatttcgtttctgttttcttactttctcagcttcagcatttatccttatcattatcaatcaaagaatcattcacaagattatctcctgctgtgaagg

SEQ ID NO: 99115 - DNA, 905 bp, Vitis vinifera
  Intron number 1 from transcript GSVIVT01020805001 (locus G SVIVG01020805001) derived from phytozome v7.0 (chr-ID chr1 2; pos 1764283 to 1765187 reverse strand)
ctcttcatcgggttttgctcatcaaacagaagaaggcaagcttgcatttgcccaaaacttgttgtttttcttggaattttaaactttgcagaacatttgactcacatgctttgatacattgtctttcctgagaatattttcctctcacaattctcatatatgcattcccatatatgaaaaaattgaaccttgtgagtgtatgagttgatatcattgctcacagtgtgcagagctttcatttgtttgtgcgtctgcatagttgttgatgtgcaagttgaaagcagttagtttgatgcatagttggcccagttcctaagcaagtagtacttttaacatggtatcagagctgcgtttcctagatgttcaaacctcattggttaattttccctctatttgtgtccttctatttgatgcaaatgttttctgctgtccacgtgggttagggcctctcaggctgcacagaggttttaacttgatgtatactgttgttagtttgatgcatgttgttggctcagttcctaagtgatactttaagatggtgtcagagctttagttcccggaggatttaaccttggtgtctattttatccaacctttttttgttctgaagagtgtcaacttgatgtgtatcattagcccattctcgaagaacttaataagtggtattttgacaaaaattctgcatttgatgtgattgaacaagcctatggaaaaaaaaaaaagaaataaaagaaagaaggtgagagaaaatagtgagatgaccaaacagaaattctacctacaaaaccactgatgagttccacaattttgctgtttttgatttgttccataaattgtttatgcttgtttcgtatcacaatttgtgcaaatttattcaagtgtggaatcttgtacaggggaaaagaa

SEQ ID NO: 99116 - DNA, 904 bp, Vitis vinifera
  Intron number 1 from transcript GSVIVT01020042001 (locus G SVIVG01020042001) derived from phytozome v7.0 (chr-ID chr1 ; pos 11232366 to 11233269)
ctcgaccaccaactggtttgccttcaattcatgttgctttgttttcatttttctaatttcactcgaagctacatacttagatttgtgatttcactgtttcaaaggggtccgaatttcactgcagcagaaaaattctgtaccaatccaagggaggaattcagaggctcctatgacagttcaagggaggaattacacttcaattcaaaaaaggaatccaacgagaagtatgtggtttcttcaatagtatagtttttccttctccattgtgggctttctgagttgtatgtggattttgtattttttggtgcagaaaggcgtcctcgaggcaagaaacatggtccaaatactcaaagagatcggtcattagcaagggctatcaagaaagaagaagttcttcatgcttacaggcctacgcaattcagctacaatgtgttgcacgctgccactaataaattcagtaacaaaaatttgattggaagaggtggttttggtgatgtttttaaaggatggatccattcatgcgcaaagactccagcaaaaccaaatgatgggcaagcaatcgctgtcaagaggctcagaaacaagcaaccacaaggccatgaggcatggcagaatgaactgaactttttgaccaaaataagtcatcaaaatctagtcaagctgatcggatattgttgtgagtgtgaacataagattttagtatatgagtatatgcccaagggaagcttggatgctcatctctccaaaggtaaaaactaagcaaccaaagcactccatatagtctgagagagaacaatttagcatctctaggttgcctggattttggacaatatacaatgcattaacacaaatgaaattggcataaacagagagggatacagagctaacctgggggagaagaatc

SEQ ID NO: 99117 - DNA, 450 bp, Vitis vinifera
  Intron number 2 from transcript GSVIVT01026949001 (locus G SVIVG01026949001) derived from phytozome v7.0 (chr-ID chr1 5; pos 19145039 to 19145488 reverse strand)
ttcatagtaagctattcttcttcctccctgttcttcaagtcatcgaatactattctttatcgttttttctaaagcctttttatgtgaatgatggctggatgtgatattgaaaataaagaattgaagttggaaaaatttgggaatctggagccgtttattggaaaatttctttcccggtttcatacatcttctggaatttgagcaaattttcttaaaaacaattttaagcttttcaaaaacatgtgtttgataaattttttatcaagaacaatttttttcaaatttgttttcagtgttattaaaagtatcacgaaaaactattaaaatatataaaaaaaattattgaaaatatgaatacatagttaaatttagttcattcataaagaaaaaggcaaattttatatttgaatttataaaaatggcagatacgaccggtggtagaaactgggt

SEQ ID NO: 99118 - DNA, 1027 bp, Vitis vinifera
  Intron number 3 from transcript GSVIVT01026595001 (locus G SVIVG01026595001) derived from phytozome v7.0 (chr-ID chr4 ; pos 21240509 to 21241535)
ccggctgttacgttcatcttcgccctttttttagggtacgataaccatatcaatctttattttctaatcattttttattattattattattataaaatttttaatagaggtgggaaaattcatttgaacttatcacgtgagtataaaactgatagtaggcaaacctaatttttggtaaagattagttcggacttatcttgtgaataggaagtatagcatgaaaagttagtttggagccaagtcctttagccctctttcaatcttaagaagaaaccctattaacttaaagaataaactctttagataattcttttaaaataaaataaaattacaaaatttaaaagtctatttaattttcaaaataattttatttatttttcatcttttatataaaaattaaataatttaaaattttataaggttgccattcattttaattatattttcatgataaatcaaatataaaaaattattttcatttaacttttttttaatattttcttaaaatcaaatataaccttaataaaatagaacataacttatgtttacttaattttagtctttgatattttatttcatgacatatattctaagatgataatttaactattttaaaaattagaatattatatatatatatagatggataaactctctactttctcgattaaagacttatattaaaaaggtaatgattttaaattttattttaaaatattaaagtatttaaaaaaacttatcatcttgattttaaaattttttaagaatataaggtaaatccacgtaatagagtttttattttttatattaaaattattattattttttgttttaaaatttaaaaaattataaaataaataaataaaataaaaagagagagaaatgttacaacttcttgtttccatggtcatgaattctgacttgtgtgtacattaacataacatttatgtttatgtgaactaaatcccgagccttgaatgaataatgaataggttggagaggttgaagattcgaacgtgggcaggga

SEQ ID NO: 99119 - DNA, 810 bp, Vitis vinifera
  Intron number 2 from transcript GSVIVT01024623001 (locus G SVIVG01024623001) derived from phytozome v7.0 (chr-ID chr6 ; pos 8298936 to 8299745 reverse strand)
aggagatccgttgtttggatctctcttacttaccggtaattctgattttcttccttttctctctttgactctccttttggttgctgagaaaatgtaggaaaagggaagacactaaaattttgaatccatattatatgttcgtttaaagaggtttttggcttgtagaaaagaaagtggaaatcttgtattaacgaagccaaaaagttaagcacgattagcggaggattttgttccctgggtcccatgtaagaaaattttggggtttccaaattattgcattttccttccagtttcctacattttcccagcaaccagtcaggaaatttctttgctgaaacttttagcagcgtttgatgcaatcactagtgtagatttaccttatggtacacgtttttaatgttgttgttgtgtgctttttgatatttagtgctgttgatgatctgtctatttctactgtttttccttgttcatgaacttattgcctgtagcttttaagaaaaccatctggaaaaaagtggaagatttttttgcaaactatttcttaatttttcattagaagtatgaaaaaccaaaaatttggttctcaacgatgcgtatgaagggcggtcctggtaccaatgtagcatagctggtcagaactgaataatagggtggtgataaaactgcaagttaatttatttttagttcaatatgttgcaagcgtgcttggatcaaatgcacattcttcaatctcgatgtgtttatgtgtgaggttcagctactatatggaaattgtatcaaactgatcttcaaattgcagatcacaaagaa

SEQ ID NO: 99120 - DNA, 902 bp, Vitis vinifera
  Intron number 1 from transcript GSVIVT01020985001 (locus G SVIVG01020985001) derived from phytozome v7.0 (chr-ID chr5 ; pos 15921860 to 15922761)
tagcatcagcggttctccgattccttggctttcaggtttttcttgaatagcgttcaaagattcttgtcttttttcctgacccgatttaaaaatccgggttcttttttttctcgattctgcttctttccatttgcagttctaactgccgtgctgtaagtttgaagaaaaaccttgcatttgcaactgaaaatgggttatttctttgttttgaagaataggagaaattgatgcctttgtttggttatgttttgaaagatagcgaatgttaagggccttttgcttggcggaaatgaaaaaaagtttggacagataatttcatttccatgtgtcgaggcttgttgtttttttgatagttttcagtagttaaatatgctattaccttgcctattgtttctccatgtaactttcatttgttctctttttgaaaacaaaaatcaaaatttccattgctttcctccattttctctgtttttggtggtaatcaaagggagatggttgtggatatatttgttctgatgaatttttgtatcattaagtttggttgggaaatatgactatatgagctacttatgcctgaaattcatttttctgttctgggaagaatttacctggaaacattttccattggtgaattgaatggtggcttttccaaatgaaacctgtggtgatttaaaagaatggatttcaagaatgcacaattttgtcggtaaaaaataagtagagtctatacaaaatacctgatctgtttatatcatagagcccagatagggagtgttaaaaattttagtttaggatcttgaagaatttgattactctgcagtgaatatttttttttaatgataatttttcatactttccttttgaaatgttaatagcatggtttatagatatgctttcaggac

SEQ ID NO: 99121 - DNA, 945 bp, Vitis vinifera
  Intron number 1 from transcript GSVIVT01024555001 (locus G SVIVG01024555001) derived from phytozome v7.0 (chr-ID chr6 ; pos 8876518 to 8877462 reverse strand)
atttggaggtcggtgatcaccgctgcaatcttcaggtgatctcttcctctgatcattatcatcattgtcgtcgtttttcggcttcagtgcctgaccagtggaattcttttcggagtattctgtatggaaaaaaaagaggataattcgttgtagtcttagtctattcttggttttgagtttgatggtcagaacactttgattcatttcatgtccttaccgactcagaaagcttcttctaaagctgcgacatcttgaatgcctcaactcctcaacccaaaatccttttctctatctcatatagtcttgtggtgtattcaatccacgttgtggtccttttgtggattggtaccaaaatctcttgctttaggttggattatgctcatagagtaggatatcattatgtctaggtttgagtttctcatgtttaattttgtcattatcattttcttccttctttttctttggaaggaccatttacaaattgtttgaaaatatacactcaacttaaaaatttggcgtgccagtgctgttattcatcactcgtagacttgcaattgcctttccttctgctctactgccatgctcatgatcaagatgttttgacaactatgcctttgccctccattttgtttcttgttaggttgcagattttgaatttctccgtctttatttttcagaatttataggattagaattttgtactgctaatacgagtatttaatttaaatcatacttccccttccctcaataaagttttcttatgaagttgattcccagatttcctaaattctgcataatattagtggaattctttgcattagagtactattgcattcccaacttatgcaatttagcagtgagaataactaaaaacacttctaatgaattttcatatccatcgtaatgaattttgcagataatcttgactcttgagcaattggattt

SEQ ID NO: 99122 - DNA, 406 bp, Vitis vinifera
  Intron number 1 from transcript GSVIVT01022121001 (locus G SVIVG01022121001) derived from phytozome v7.0 (chr-ID chr7 ; pos 16746991 to 16747396)
ctcttgctcaattatttaagaggtcagtgatttcattgttgatctccatgatctggtttgattttctttttcttcaaattctctgataatgtgtagacatatctaccatctcaccctgtatattagacatgtagttaggtatgcaattctatggagtttttgtgtgttattatccatgataagccatatcaacttggcctttctgaaccccttactcgtctttacagctcggactttctggtttttcctcaagaattgctttcctattctatactgcacaagtagtttaattttgacactaaatgaggcttttaattaaaggggttctcacagcaaaatggatcaattttgtttgtctattcaaagactaaatgtggatagaataatgttgtatagggaaaatcca

SEQ ID NO: 99123 - DNA, 572 bp, Vitis vinifera
  Intron number 1 from transcript GSVIVT01020224001 (locus G SVIVG01020224001) derived from phytozome v7.0 (chr-ID chr1 ; pos 8864778 to 8865349 reverse strand)
ttcttctgcttcttctgctttgctttcttccataggtgcttgggtttatgctttttgttttttttgactttttctctctttgcttctcctcaaatcactgcaagtttcttgatttttggttggctaattcattgagtttgatttttggatatggcaaaaggaaatgaacgcgattgttgtatctgggtgctgttcccctttcccctctgtttggttgagagttgtttctagtttctagtttctagtttcttcccaaatgacacagcacctatgtaactacaactgtctggttttgataagaagattgatccattttttggagttgagattcttatattgtcaatggctccgttcttccatccctgtcttatatcttttcaccttttccatgactttactttttgaggggaaaggctggttatcttttgactaattgtattgttctgttctttcccattgctgcttttgctgtttgtggagtgttattttatctgttgattaagtgaaatacctatgtttgatatttccaccactcagggaggaattcatcccggaggggcgggatctttaga

SEQ ID NO: 99124 - DNA, 732 bp, Vitis vinifera
  Intron number 4 from transcript GSVIVT01025641001 (locus G SVIVG01025641001) derived from phytozome v7.0 (chr-ID chr8 ; pos 13403398 to 13404129)
tctcccttggagaatttttcagagttgagctcaaggtatttggttttattttttccacagttcttaattttggaccaccatgcgcatatgatatctttcactttaaattgcttcacagttatatgcattgtaaagtatttcgtttaaataatattgatgctgctctttgacttttcagaaagatgattcaggaaaatttaagatagaattttttttttctttttttcttttttgtttttataggatggtgttggggctttggaacatatatgttttgtaaggcatttcgtataaataatgcctataaaataaaaatcatttcccataaataatatcattgctgctctttgtatttttaataaagatgtatgtcaagtgaatttaagatagaatttttttttcttgaaaattatacacttgatcatatataagatggtatgggggatttggaactaggagcatcttctacacagcaaaacctcgtatggatgctaggtttaattacttgttggctcacatctctatgtatttaaattattcacaatggaaaataaatcaagttaacttgggttattttaacctttttcttttccatccctggtatatccaactttttgactctcaccttggaagactattgcttctacctacatggtgttcttttacttcttaaaatgttacttagttgtagtttttgatcaacataaaaatttatttggttatttcacagat

SEQ ID NO: 99125 - DNA, 530 bp, Vitis vinifera
  Intron number 1 from transcript GSVIVT01027494001 (locus G SVIVG01027494001) derived from phytozome v7.0 (chr-ID chr1 5; pos 16219904 to 16220433 reverse strand)
tcacttgcctcgtctccgtcaaacctgctgtcatcgtaacaaaaccctcataactttctccttttttctttaatttatgttagtgttactgcgttttgttgctctgggaagaggatgaattttcaattttgtttttgactccgattcgatttccatttggatctcgagacggaaaaaaggaattttcgattccaaatttattaaaaacaaatatattttcaaatttattttcctttttttttctcaatctgtaagggtagaaatttaaaatagattattcggctaaaagttttctcccattctgttgtcccactaagactcttaagttctaaattttcaatttttcatggacttgggaaaactgtaacctccattctggcatatttcagctatttgagttgagttttcagtcattgtaggccaaaatgtcataaaatcatatttttcttttcttttcttccaatttcttcaagaaccttaatgttttgttcctgcatttttgggtttgtagaattatttcggtggactcc

SEQ ID NO: 99126 - DNA, 959 bp, Vitis vinifera
  Intron number 2 from transcript GSVIVT01022982001 (locus G SVIVG01022982001) derived from phytozome v7.0 (chr-ID chr1 2; pos 17322319 to 17323277)
aaccatgtaagcttcaggaaatctggtcttaattttttcattccttaatttattaaaataaacatattaaagcaccacgcccctattcctactctctttattctattagtttctactttcgttctcacttcccctcccttttgtttctttacgggcgctcaaatgatcacaaatagtaattaatcaatactttacaaacctacttaaaaataaataaataaaagcccctttgttttggttgaagtttattactccaagctgctttcggttggcaataaatataaaatacatatatttaaagtattgacttgtccttgttgaggtccttcaactgtctagttcatccataagagtgaagcctagggtagggcattctgttgttttgacttgatcctttatttatcttacctttcttcctaaacatcctatgccatatacacaaccacaagtggtaccatcttcttatttttcttattatttatcattattatatgctactattggtcttatatgttttgtctatttttctattcattattttttttgggtgtgtcgtacctcaccaaattattgaggttgtcactatcaataagcatcggtcttgttgctagtccccgcaatttttaatcattaaatatcttggtaaagttgttttaagtgaatacatttttccataatcaatgattctaatgaataaatactttttaattaattttataaactactcttcaatgttatgttttaattatccttatttaaatatatacgcattctaattgaaatattttttttaatgtagaaaaaataatattttattttaatttactttattgaagagtccaccaaaagtctttagcgaccataaagacaatttattttgagttcgatcatttctttcaatttagtgaaaaatactttaatttctctaggtacttgaaggtgaaggtgattataagtgg

SEQ ID NO: 99127 - DNA, 1031 bp, Vitis vinifera
  Intron number 1 from transcript GSVIVT01028080001 (locus G SVIVG01028080001) derived from phytozome v7.0 (chr-ID chr7 ; pos 3658225 to 3659255)
caactccatcaaccttgccgaagtctccccgacttcccagtgtcggactttgtggagcctagttttattttatccgatttgacaacccgatccgaataatattgcctgattttttaattggagatttactgaggcttagtccatgaagcgaaggctttggccaataagcccaagtcgaagcgttgctgcccctgggaaaaagtttttgggcccgattagcccattgtgaaaccgccttttgtaattagggtttttttgtgtggtgttgttgtcgtattttatgtagagagaaaatattgcagcccaaagttatactattgtattcttccctgataatagtgatattcctgtaacaacgtaagcaaatttttgaatcacgtaaatattgttttgtgtgtgtgatgatttatttattttttttgtttatatcaggttgggaattcagcttaattcccttcaccagcaccttcccaagtaaaaaacgccgctgtttcagccattctctctgacgtcaaccagtacaggttggtgcggttgtcttgtattcaacttcttcgcatgtattcggcatagactctatttggttgccgagaatttgaggataagtaaacgtcaaaaagcttaattgttgtgctgtctcattttcttggaacccagatggagaattttgaggtttcaattttcgttgtcttttatttcagttcagcgtttctcagcaaccgaacagagcattaatgtgtgtaatatttctaatgtttgagttatggaagttgagttgagtatttcattttcccaggatccaaagccagaattttgaggtctcaattttcattttctttttgtttttgtccactttctcagcaaacaaacggagtatttaatgtctttactctttctgctgttttagttgtggaagacttcgagaaagaaatttgaggctttgaatttccttttcttcaattttcccaagttctcatcaaccaaatgtagcattagggaaaattagcccaacacagggtgaggaaacatac

SEQ ID NO: 99128 - DNA, 774 bp, Vitis vinifera
  Intron number 1 from transcript GSVIVT01023596001 (locus G SVIVG01023596001) derived from phytozome v7.0 (chr-ID chr1 1; pos 7777094 to 7777867 reverse strand)
tactcgataaacccctcagcaagggcaaacaagaggtacttaaaaagaaaaattgcttcattttcttctgtttgttttccaagaaagccaaggaaaatgcaacgaaagaaaagaaaagcaaattttgattttgaatcttgtgtgtgtattgtcctacgtggtttaggttctgagaattgtcaagaactcaagtcaattaggtttagttgtctggagccttttgttttatgggtttctaaacagtgcaaaacctgagatggggagttttgattggcttgctttctgccgttcccttacaacctcacgtaccaatatttagcgtcggatctttgtgagagtgtcacatgggttttttgatttgttctatccatttcctcttagataccgagattttttttctttttttttttggcgatcccatggtagttgtttcataaaatatcgtatttttcttgagatctcacttttttcagctatttgatgaaataaggctccggttggctgctgggaaaatttagggaaatcggacgaattgacataattcaataatttgactgtccctggcgttgggggtggggggcggcggaatagtgtggctcaaatcaatggggaaaacttaagttttaactttcatttgcattaatattctcggcaatcaaacaatggtttactatggtttcaacctttttaatttcgttctggagcgtatagttttgttaagaattgattttggtttcaggtgagtttgagtgcatttgctttcttgttttcgga

SEQ ID NO: 99129 - DNA, 738 bp, Vitis vinifera
  Intron number 2 from transcript GSVIVT01023120001 (locus G SVIVG01023120001) derived from phytozome v7.0 (chr-ID chr1 2; pos 22359331 to 22360068)
gttcaaagtggacgtaatctcccttctataaattgatgcatcctgttttttgttttttttttggtattatttccatttttggaaggaaaaagaaagaaaaattccagatcagtggaggtgtttggtattttcatcagttatcaagactagcatatgtcctttcttgcattgtttcaatcattaagttatattttattttatgatagttttaacttctgatatgttaagtagggcactgtgcaaaacgacccaaacttccgtaactgtcctatcagctaggacttgtataaagtctatgattggtaaaattttccattccactggaccttggccttcagatttttactgggatcttcttagttggaacaatgttaatctggcttgtagtgtttctacttctgctattgtaaatcttgcctctgtttcagaatgatttcagtctcttcatccaccactccagtatttttctatgattatctgtgtacttatcagtttcactttttgctattcaatgattgtgagtacaattcatgaaaaatcaatccatcttccccctaaatttggttgttcactaagttctattcaatttttttcttttgataggttctaatgtcttatggactatcctaacattgcatttcttaacctgcatcagttgctttcagatgtgtgcaactgactcatttcttgtccctgaactgtttttgcagactgaatttccccttttattaaggttga

SEQ ID NO: 99130 - DNA, 656 bp, Vitis vinifera
  Intron number 1 from transcript GSVIVT01026648001 (locus G SVIVG01026648001) derived from phytozome v7.0 (chr-ID chr4 ; pos 20764286 to 20764941 reverse strand)
cggttgccgcccaagattaaatcgtacagatcgcatcgcccttctctatctgttagtgagagttctttggcttgttccagtttcttatacttgcaaattgctccctttcttctgattttcaggaaattagaagattatgtttcaatttttttctgttaattttttttcttcctgatttgaaacgtagttttatgctaattcgcttctcggaatgtataaaatgcagttgaaaacaatgagagatgtatctttgaagtatttcaagtttttgaaacacacagaaacatgcgttttaattcttagtatatatagaaaaacttttctggttgagtttttgttccctcaacaaatttctgtttgaagtttcaaatcagcatatccagagatatggtcagtgaatactttcctgaaagtgggtatttttctataaaaaattttctttttctcctatgattcaaagttccaatttcttcaagataagggaaaatgaattgtgataataattgaatcctgaagtttttttctttaacattttggctattaattatggatggtattcctgtcatattagcttttgtttatgtttctgaatttatttttgtaatatttggtgctcttgagtttcatgagtaacacgtaatttttcctcttgtagg

SEQ ID NO: 99131 - DNA, 885 bp, Vitis vinifera
  Intron number 1 from transcript GSVIVT01027437001 (locus G SVIVG01027437001) derived from phytozome v7.0 (chr-ID chr1 5; pos 16729985 to 16730869)
ttaccttctgtgaactctgttttctttgtactttggtatatgcttccatacatgttctttcataattcttactgcattatcatagaaactactttaatccaagtgagaatgtttgtttttgatggttgtgttgtgcttcttcatgttgtttcaggcatattttgggttggattgtctttgtcattgccattattttcataaatgttcttgaacatgttccaggattaatatcattgaatcctattttcctcagattagtctgcttcaatattttgttgaagtttgagaagtccaattctctagtatgataggtaactccagggtttgggtcattcaattcaagatttgtagcctggggaagccaactgatttgcttcaatcatcataatcaaccatctgattaatacatggctgatacaaacctccacagttagcgtattggtttgaaattctattagtttttcgatagacagcctaaaaacagcttcattttccttattgtgcttctaagaaaagaaacaactactgcatactcctgaccaacccttgtttatgagacaaggtgaggtaaaagaaacaagacccagcaagtaaaatttttgtatttctctatgataatgagctatagtgaaccattgaaagcattttgatactaattagtttcttgaatatgccttatagagctgaagtttggaacatgaaaaccagatatcagtttataaaattggtttttgttgatgtatatcacattgattattgagtgggtccaatgtcaatgtgctggatcaactattaaggatctcaagtgataaaattcatttggaaacactttaaaatcccgattctctaactccttgtggccctttccagaacaaaaagtcagtg

SEQ ID NO: 99132 - DNA, 1015 bp, Vitis vinifera
  Intron number 1 from transcript GSVIVT01023951001 (locus G SVIVG01023951001) derived from phytozome v7.0 (chr-ID chr3 ; pos 2225484 to 2226498)
gcgctcaatcttcgtcagaaacagactggtacctccatctctctccagatctctctctacatgtacagaatatttgtatgttcttgcgtagatctcggttttagggctttaacgaagcaaaggatgtgaaattgatacaattctgatggaaaaatcattccatttcgtggtatttcaattcgatctgtttttttttttacccctctccttgaacttgaaaatgcgtaattcgaatattgcatgtgaattactggttaactcaattggatcggaaaacgaagaaaatggtgtgaaaatagtacgtttaaggtaagatttaatttgtgtggttttatgtctgactctgatgctgtatgtatttctttagacctttgacgaagaaaatgatgcgagaaaaatgcatttgagatttaaaaaaatattcattttctgtgattgttgtcggtgagttggattctttttaccagaatgatagcttgaatgttgaatctgcaccaatcagttaattcaacagaaatcaatacatttaagataaaagaccaatcaaattgtgttgtttcatgctgcactaaaatactggatctattcctttaaagttgtaaaggagaaaagaaaaaaaaagatatgtaatcaatgcaattgagataaaacattatcagttagcgtgatttcatgtttactcagattggtgaattggatctatttatttttttcatttttaatttctttaattttaatcttttttattgaaccagaatacccatcttgaatgttaaatctgaatcaactgttgaactaactggaatagtaaatgaagaaaatgatatgaatttgatattatataaggtaaaatcatttgtgttaattcgaatgttagaactattcctcttggtatttaataaaggaaatggtatgaaattgacttaaatcagacaaaagatcatctgatcagtgtgatttcatgtttaatttggttggtgaatttgatctatatttttctttgccttgaaccaga

SEQ ID NO: 99133 - DNA, 497 bp, Vitis vinifera
  Intron number 2 from transcript GSVIVT01028856001 (locus G SVIVG01028856001) derived from phytozome v7.0 (chr-ID chr1 6; pos 18054629 to 18055125)
accaaagcaggtagagattttgactaaaaaaattgagtttgtcccgcccctgtttggctccggagaaaattgagcttaaaaagatagtacttttgaataatagtttgctcacatggaatggttctgagattaagagttagtgattattctaacagaaaatgaaccttagagaaagaaacctaaaatccaaatttatttttattttattcatattctccaatgccttccattcaactaaacggaatgtttggttgctgggcaagttgaggaaacgaacaagaaaaagaagtcagaagaaagaaatctggtttcatgaatataatttagttttgttctcaatttttttcctctataaccacacagagcatcatgggctgatataggctatagcatcattggatcatgctcatgttttaagccatttggtctcgctttgattgattaattgtttttattattcagatctggtgaacaatttgggaacaattgcgaggtct

SEQ ID NO: 99134 - DNA, 842 bp, Vitis vinifera
  Intron number 1 from transcript GSVIVT01028324001 (locus G SVIVG01028324001) derived from phytozome v7.0 (chr-ID chr7 ; pos 6159923 to 6160764 reverse strand)
tgctgttgttgttgatttctgggttggttttcaaattatgttttttttagagtgattggtgttcagggtttgatcttagtttgtgtcggcttagtagtttattgctgtttatttcttatgatcaaggataagatgttgaatttgtatttgtatgtgatgggttttttttttttttttttggtttttagaaagggcaattttgattggaaccgatggttttgttgaaagaaaatctgtttggttgctaagaaagtagatgaaaagcagaggaataagtggattttttattttttattttttgaaattttctgtttatttatttatttttttgggttatcagaaagagaaaaatgaagagaagagttacctcaacttaggcaaatggttgtattaagattagctggggccatgactttctggatttcaggggtttaaataatgaaataatttccttcgaaaattctctcttttttcttacattttctcaacaaccaaacagaacgtgatcgtgttttctgttttattttatattttattttttataagacttcctttttcaattgaattgcgggtgcatgtgatcgtccttgattatgttagattctaattaatctatttatctgccaattatttcttgtattgactcgaagtggtgctttgatttaattaaatataaaattagaaaatttatttcagttctttctcacagattcccttgcaaccaaacagagggaagatggatttatggtttaatatatatatttttctttttcttttttcttttagaaaagaccttcaatgaacccactgttatgcgtctgattttctttttctccagctaa

SEQ ID NO: 99135 - DNA, 855 bp, Vitis vinifera
  Intron number 1 from transcript GSVIVT01019600001 (locus G SVIVG01019600001) derived from phytozome v7.0 (chr-ID chr2 ; pos 1850955 to 1851809)
ttctcggtttctcacatgttagttgcggtctttcttgtctgtcaattcaattgtttcggtgtttttatttgttgtatttggatttagtttatctgaattggaaatgttgaaaaatttgaggtttttaatgttgttgggaagttctttgcttatagtagatcgtggatttttctcatcaggtgtgtgtttcgttagctgtgacttctgtgtgcttcttttagttcatatttcttgctgaattcatggaaaagattcagatttttcaccgtgtattgagaactttttggttttcttttgctggaactggcgatttcgatgctattcaggtggttgctcattgctacttggttgtgattcgaaatttttttgctcgcctgagccttttttggattttgtttgacctaaactctgtttcgttgctgagaaaatgatggaaaaggaaggagatggaattttgaatctgatagtacgtgctgttcttgtttctaggaccaaataaaagctcattcagcagagtcataaaagctctttcatgtcaatcaagtggtcgtacaggctcaattctattagtgaattcgaccttggaagttctaatgtttctccctaaatcttctcaaccaccgaacggagattagtccatcttatccaaaagtttatttctagtcctggtttttatgacgttgcattccattattttctagaaacagtcattgtagcacatgcttttattggttgtgcatgctaaatagtaatataacttcccgatttctgtaagaggtttattcatttatgttaacttgaaaattttcactggatataggtaatccagatttgatacctgaaagcagaacagag

SEQ ID NO: 99136 - DNA, 847 bp, Vitis vinifera
  Intron number 1 from transcript GSVIVT01025999001 (locus G SVIVG01025999001) derived from phytozome v7.0 (chr-ID chr1 8; pos 26075846 to 26076692 reverse strand)
ccaatctggagcctccccaagaacccccagacgtaatttcccctccttttttgggattttatttgattgtttcttgatctcagattatgttgtgggttatattccagcagcccttttcttttcattttttttaaaaaaaaatattttatgtttatttatttattatttttcttttaaaagaaaaggattttggtatttttatttttatttattttattttattttattttctgggattgtcttcttcgaagattttatttatttatattttgtatttctggttagtgtagtcatatgtgatcatgggtttagctttttttgtttttttttgcacaccagtttccttaggggatttttgtttttgatttttttggtctaaaattgaagattttgtttacttattgattgatatttgtgcttctggttattgtatattgtgttagtgatcatatctaatcatgggtttagctgtctttagtgcacatgctaaagctattacttattaattgaattgaaaattttctgattgcccaactgtgaggttgcaaataatctgtgattaatgagaaagattacaatgagatttagatgatgtgagctatctacctggctaatgtgattagtccatgattcaattaaatggattggtgcatgggtgagagatttttctctgtgttgttgaacttgaaaatttgttgattagtagcattcagcatggcttttcattgtcttttttgtgcagatgaatggttgctcctattttgtgataaatttactgattgatctataatgccattttttctgttacatcttctttcacagtagtagagacgaagctagggacaga

SEQ ID NO: 99137 - DNA, 862 bp, Vitis vinifera
  Intron number 1 from transcript GSVIVT01027015001 (locus G SVIVG01027015001) derived from phytozome v7.0 (chr-ID chr1 5; pos 18563389 to 18564250 reverse strand)
acgtcaattgggaccaaattgaagggtacatcagtaattcaatccgctttgatgatgtctcacgcgttattcttattgacttggatgccaccgcctcagcgcataaaaaatatctgacacagtcattataacgtgacagaaaattaagtttatctcttatttaaatttattattaatgactttaaattttggccgtaaatatcttcttggcatttcattgtccacatcatcagattttaagcctaatttgaattaatttctaaaaaatatatatatcttatcatctacaaattatagaaaattggaatatattatttttattttaataataattttatgatataaatattttgatttaataattaagatttttgacttttatttggattttaagggtaaaataaaaaataaaaaaattgctaatttgaatttaggtttcaaaattccgtaaacttggccattttcttcgtggacctggatgcgacgcagacatttctgtcatttatatatagggctcttattcccaatcagaataagaaaaaacaaaaccagattatcgtaaacccaggaagagagaggattggcataatcccagacgagagagaaaaaaaaaaaaggggagagaaggggaaaaaaaaatcaaatcaaatcaaaaaattccctgcgtatgggttgttcttgagaaaacccggaaaaggggcattctttggtttggtttgatttgaggattttcgttttttttttttcatatatgtttttttatttttagaattgtgaattcagatctatctgctaattccaatccgggatattgttattcccgctttggatttttcctgtccttgattttcttcaagattca

SEQ ID NO: 99138 - DNA, 738 bp, Vitis vinifera
  Intron number 1 from transcript GSVIVT01020739001 (locus G SVIVG01020739001) derived from phytozome v7.0 (chr-ID chr1 2; pos 2457681 to 2458418 reverse strand)
ttggagttgtaagttctttatgccttcctctatggatttcaatagctttttgtgttttttctttccctgaagaaagagtttggggtttttgtcaacctcttctgtttctgtgtttggttttttttttcctttgctatggaaatggagggaaaaggagggacagtttggaaattttgtctctttttattgttgttttgggctttagaagagatggaggatttcgactgagacaagtagttgttttgatcagctttggtttaagtaaagagcttcttcttctttccctgaggctgtgaaagacaaagttttttcttcccttatattttctagaggacgagaaggggaatagatgaatttttaaaatggttctgattttaccttcaccttgtgtttggttgctgggaaaccagagggaaagatgagatcagaggagaaatttttaaacttttagcttctgcgttcggttgctgagaaactgggggaaaagaaaagaaatttcactatttggaaatccagaaagctgaagcctttctcgactaagcgtgagcgtttcatattcttgtttgtttattttagaagcaatgaataagtggactagattggcaaataattttcctttccctcactttctcagcaagcaaaaagggtacttataatcttgattaactgtacatacattttctaatgcgtgcatgaattgatgggggcttttggtcttgtcaaagggtgcctaccgcg

SEQ ID NO: 99139 - DNA, 1020 bp, Vitis vinifera
  Intron number 1 from transcript GSVIVT01024596001 (locus G SVIVG01024596001) derived from phytozome v7.0 (chr-ID chr6 ; pos 8562240 to 8563259)
attgctttgtcaatgtaatccttctagcttcttgttcttagtgtatgggcctgagtgttgggtcatgcatgtttcatatttgaagtctaagaaaaatcttagataaggtcatagggattcttagctcaattttgggttaatttgggagtgtcttttacgaggttgctgttttaatttttgttcttaggttttttattttccggagtcttgggccttgccgacatccaaccttcacattaaacatgtactacttttttctttggtcaaaggggtagcccgaatagctactgcatgaggtgtaggttaaacagattggctgggaaggtcgtagttaaacacttgaactcacctcgagattcgttcttgaccaggtcaagagcttcttaatatgcttttaggtgcatttatagtttaacatggtatcaaacttgtccttaaagtcgtgagtttgagagagtttgtagatcattatttcaaacctatctttgaggcaagaaggtgtcgggactaacttggattagcctgatatacattgttggtccataatgataatagttcaaactgttggtagcttaatatgcatagtattaaatttacccatgaagtcatgatatacattattgacttactatctaaccattctaagtttttgaaatatagttttactaaattgttatgcttttagggactaattctttttgtttctagccatgccctggaaaatgaaatttgaaatgaaaaggcctggttgctagaacaccccaattttcaaatgaaatggcctagatacagcttgagaagaaataaaaagtcaacaggcttaaaagaggtggtgtcctcaactaaaaaaaaaaaaaaaaaaaatcacaaaaaatcatcttaataattaatatctgcttcagactgttgttctccattaatttatcatagaaagtaaacgatacaagctagctatagttattaatatgaccaattcatacttactctgtttgatgcttggtgtttaattacagggctgcg

SEQ ID NO: 99140 - DNA, 419 bp, Vitis vinifera
  Intron number 3 from transcript GSVIVT01024879001 (locus G SVIVG01024879001) derived from phytozome v7.0 (chr-ID chr6 ; pos 6297017 to 6297435)
acacaagaatatctctgcttattcagtaaccaaaggtatttcatcacatgatccgtggtatattccaagtgctaggagcaaattcctatttaagagagcaataccgaacatgagaaacatatagaatttatagcggttctcttctaaagggagagctacatccattttaccattgtagattttcattatgaaaaaaaaaacctacacaacgatctcatgtcttacaataatcatctctcctctaattttccactgagaaaacagtcaccatgcatgtataaaataactaaaatatccctttgattgattctcagtcaccaggaaaagtgtatattgtaattagcaaggctccacacaactgaacagcaagtccttggattgaccatctgccattatcattttgtgatttttcaggagca

SEQ ID NO: 99141 - DNA, 905 bp, Vitis vinifera
  Intron number 1 from transcript GSVIVT01024609001 (locus G SVIVG01024609001) derived from phytozome v7.0 (chr-ID chr6 ; pos 8453697 to 8454601 reverse strand)
tcagtccttccttgttccacttctactccaacccagtgagttttcggctctttcagacctagttcggatttacaaatcagattttccccctttttgtctatttgtatgggttttgtagagcaagtttctgtttctatgtgctttggtttttccagatttggattttacaaaaagcattaaaacgtacggttttttctttgtaaggtacctgattatttgtagatatgaaaatggattcaatggattctagtcttatgatcatggtactaagtgttggagtgattcgaagcttgtggaattttggaaaaatggtgccgttatagagtgaaatctccaacactgttgtgtattttcctcttaaatcaggggcattgggaaagtgctggcatgttctgtaattcttttagaacgataagggacagttagggcttgatctttgttggagagcttattccgggaatgcatcattgctcaagctcttctaagttgcttgcaagattaaagaattaaagttcttttttttttaatgattcgttaatagcattagctaatgtcatgcaatgggatgctttctgagtgttttttttaggttgtaaaatcaagtttcttgatgttttggatcttgttagagaacccatttgaagaaagaactattactcatcccttttttaagttggtataagtttaaaggctaaaactcattcatttgtttggttggtatgattagttggtgccgtgcttcggttttgattttgatgacttgaaatgaattgacttaatcagaattttgatgttgaagcatctgtagaatcagtgtgatccagtagtcaagtgggttactgtaggctatagttttaaaggtaatttatggagatgtgtgctatgtcaacagttgaacttggtag

SEQ ID NO: 99142 - DNA, 740 bp, Vitis vinifera
  Intron number 3 from transcript GSVIVT01028124001 (locus G SVIVG01028124001) derived from phytozome v7.0 (chr-ID chr7 ; pos 4013761 to 4014500 reverse strand)
cagattatacggttagcattacagttttttttttttttcgcattttcttgtgttttgttctctaaggcaggtagccaaacaaggtgttttcagcacaggtagaaacttgatagcaggcctgtggtacaacctctgacagaggttaccagctaagctaggagacagcttctttcctattttcaatttgtggtgcctcttgttggctgacaggcaaactaaaggattttgtaatatatagtataagctcataacacacccagtttttagttttgaaatctttaaacagcataacatttttaaatgtatggctctatgcaccaattgttttatattttgaattatgtgaagcataaaaaattttaattaaattaaattaaatatatatatataaaagggagattaagcctatgctgggagatacatgcatcaaggtttactcactcagcatcaacaacctggccaaatttaccttttgaattaccatcatttcaacattggaagatggaaacgttattttggttaggttaccctcaaatggagttccatgtcctacatttacttgacctcagttttcttggtggaagagtcatggttctagacaaatctatacacctcgaaattcactgtaggtgaatcttcagagaaatcaaatagaatattgagtttgccactagaatgctgagctgctatacagaacctacacattaattgattcattaatgttgtttcaggagcaagag

SEQ ID NO: 99143 - DNA, 520 bp, Vitis vinifera
  Intron number 1 from transcript GSVIVT01021142001 (locus G SVIVG01021142001) derived from phytozome v7.0 (chr-ID chr1 0; pos 1786752 to 1787271)
cccagctcactcagacttttcaaaacaaagtgagggttaatatcaatcagtttctattttagatttaattaaatacacataatacccataagtttgaagtttcttcaaaccccttttttaatttgaatgtttaatgaatttttaaaactaatctaataaatccagagatgtaagtctgtgccctaaattgtatgttgcagatgtggtttgtgtttccctcttggaaaaataatatttttgtcttgaagattacatattagtgttactttttgtctttttatttgaaaatcatagctggggagctacgttcccaatcccaaatttgaatgagtttcggtggaatgaaaattctctgaaaacatagaaggaagaaaaaggaaagccataggtatgcttgattctttatctaaaagcaaatggagaacaaaaaaaaatctaaatatggagaatagtgaggtaagtcttgagcatgaggaatccacaagcttcaagaggaagactccggcaccgccatctgtca

SEQ ID NO: 99144 - DNA, 229 bp, Vitis vinifera
  Intron number 1 from transcript GSVIVT01020609001 (locus G SVIVG01020609001) derived from phytozome v7.0 (chr-ID chr1 2; pos 3800547 to 3800775 reverse strand)
tggtcatcagatcaaattgcaagaacaggttgattaattcccatgcacagaattttcttccttttcttttttggtttttgcaaatgatgtcatgatttttccctttttctttttaggtctaattgttatttaaatgccaagaactgcttttgctattgatactatgagtttctttttctcacttgtgtcattgtttaattttgaattaaaaaaaaaaaggctcgaattc

SEQ ID NO: 99145 - DNA, 439 bp, Vitis vinifera
  Intron number 1 from transcript GSVIVT01022633001 (locus G SVIVG01022633001) derived from phytozome v7.0 (chr-ID chr2 ; pos 13886774 to 13887212)
tttccattcccattccttctcttcaaaatccgaaggtaacatcaaaagttcttttttactacattaattttcaaaataatatcttgcatttgttttattcattgatgtttctattctatttttgctttaatttccaaatgagtccgtttggatgctgagaaaacactgaaagaggaaacggatgtagattttggagatgagaattttaatttttgaaaaaagcagaaaccttttccaaactttcttcccaattttctcaaatttctgggcgaccaaactagtgtttttttgttgaattagcttaaattacagaacaaaatgttgtggcttagttaatgttggattatgtatttttctaaaagaattctgactaatttgcgttgttcaatttatctgaattgtaggtccttagctgcagaagtttccaggttaaaaaaga

SEQ ID NO: 99146 - DNA, 333 bp, Vitis vinifera
  Intron number 1 from transcript GSVIVT01027167001 (locus G SVIVG01027167001) derived from phytozome v7.0 (chr-ID chr1 5; pos 17291753 to 17292085 reverse strand)
atctgagcctgagtcaagccagatctcacttctgggtaagtttccgtttcttcactttgactgctgcctcacgaaacgcatcgttttagactcttttatcatattattctacagaccataatgcgggtaacgacattttctgtttatcacttttgtcatcaactcaaatctgtaaagagagcttttgaacatttttctaagatgaaaatcttgaggatttacagaacagtctaataataataataattattattattaaagaccgacgtgggtatatagagattaacataaattttttttttttgttgatttgataatgacaggcgagcgtgt

SEQ ID NO: 99147 - DNA, 632 bp, Vitis vinifera
  Intron number 2 from transcript GSVIVT01021293001 (locus G SVIVG01021293001) derived from phytozome v7.0 (chr-ID chr1 0; pos 3592110 to 3592741)
tcacagtatgttatctatttctgaccctttcctttaaatactgctactattgctgctggtgctacttcaactgatagttttgtgtttctgtttgatgttgaattttcctcactgtgactgaagtaatctggcctgggcattgtgtttctgttataaagagaagaactaaaacataagagatgtaaaagttgcaatcccattttaaggaagctaacaaaggcctttttattttttaatgtttgaccactgatttggacagataaaagaggctatggtgaaataagatatttgaatgtcaaaattgtccttacataaatgacggtccaaggattaggcaattttagcttttgttgccttatttaagtgcattgtcctttttatgggaagcagaacttgtctagatggtgtcactttcgtaaatcaatttgagttatggcttctgtattgtggacttggtttttttttattgttattattatttatttattattattattattattataataatttcatactgaatcaatgaacacaagtttgttaagtatttcttgactcttacatcatctgataagcttggtattttgtttacttcaggttctgtaccttgtgcaggtgagacttagagaact

SEQ ID NO: 99148 - DNA, 897 bp, Vitis vinifera
  Intron number 1 from transcript GSVIVT01027617001 (locus G SVIVG01027617001) derived from phytozome v7.0 (chr-ID chr1 5; pos 15034358 to 15035254)
gaagagataattcgagttagaagtgacttttgcaggtcgtgatcttcgaagactggagatgattttaattttgagcttgatttttcaaaaattttctctctttttttttttcactgattttttgttttttgttttttgtttttgggttgaattcttttttcttggtgtttttccccccttgtgtctatggaatttttgtttgtgttgaagggttttttttttttcacttttattttttattttcattttttatctttgattttttaatttttactgattttttgttctgagtcgaaggttgtgatgcttgaagattgatgaaaatgttgagtttgaaagtgaatttttactgcatgttccagaagttggtgaattttttctgattttcaaaagtgaatttctagtttttgattttcttcgtttagattcttatggttttcttgtgaggtgagttttacagattgcagaaaatgttgagtttaaattatttttttaatccgacttgtaaagaaattctggtttttattagaactttgatcgatttctgggttgggttacagcttgtgatttttaaaggttgaagaaaatgttgtttgaaactgttttttttttgtctgatttcagcaatttttttttagtaatttgttagaattttcttttttgggttttcttgcttgtgtttcgggtaatgaaagttgaagcaaatgttgatctgcagtagatttcagcaatttttaaatcaattctttacttttgtaattttgattaatttaaattttgttcttcttttctttgttttattattattattttttttaaatctagttcttttttgaattcctgatgaatttctctgttgcaggtatttgtttgtttctgcgggaaaattggattatt

SEQ ID NO: 99149 - DNA, 936 bp, Vitis vinifera
  Intron number 1 from transcript GSVIVT01025492001 (locus G SVIVG01025492001) derived from phytozome v7.0 (chr-ID chr6 ; pos 356051 to 356986)
caaagtcaggtgggtgttcattcatttttttttttttttttcttttctgtatagactgatttttctgggactgggtattgctctccatgtgatttcagagatgggtttgtgttattatgctttgctttttcttcttcatttgattcaagttgattttttttaattttttttttaatgaaatttaggataaaggtttgatttggatgagtgatccaattatcaaaacttttaaagttgatactctgttcacactcggtttcccctttttggcttttctgatcctcggtttttccttgttttctagttagtaaattcttcgaattgggacctttttggatctactcttgctatccttgacaatcagaaagaaatcaacaaatgaactttctcactttccctttattcctactcaaagttttacttttactctcttctactgtgggatgctgaatcttcaactgaatggcactttctgcaataagtttagaaatgtgtccaatttgagatctttatttccaatcttcccaattgatctagcattttggttccataatcttatgtttgatttgtgctttgtcatgctgattcaagatcaggaggtgacttacagtaggcctttttggaatagatactttttttttttgcatcattttcctgtcaaaatagaaagatttgtttttttccccaataattgtgggattttaatttggttcaaaaagataattttctttctccacaagtgtatcgtcaagttgaggaggaaagtttcacttctgtttctctattttgactccttttttggggggtctttatactgaaagaagaaaagaaattaagtctgatcctggtagtattttattgtttgacatgtgagcttacaatatctcatatttcctttcagagtcaccaaaggatcagagcccatcggtgaaacca

SEQ ID NO: 99150 - DNA, 710 bp, Vitis vinifera
  Intron number 1 from transcript GSVIVT01019927001 (locus G SVIVG01019927001) derived from phytozome v7.0 (chr-ID chr2 ; pos 4509656 to 4510365)
tcgggggagtttcgataatcggttaaagagaaaaggtatggaaccctaatttctgattgttgattcctgttcttttctctgattttacgattcatcaaacaagggtagaagaatctttttggaatttcttgtggctttggggtcttgatgatgatggaaagttttaactcgaccgaagatcagatcttcatctttttgagtttttttcatttttgttttttctcgtttgaatttcgaattggattcatcggcgccgttgatcctcacaggatcgccggtccggtgttagggtactggaagggatgtgtggactcttctcgaattgactcgaattcgggtttcgggccttctgttatctatcagtcgggttttgtgtttgtgaaaagacgatgttgtcctttgctcaatagaaacatagtgggatttgggaatgataattgcgtctttcaggaggattgctttacaagtaagagttaaattctattttttggagtcaagttattaaacctttgaccaaacacgccaccaaaaaaactataactatcgggttctactgatcttttgcgtaaaacgcaatattaagatttatcccgagaaaatctactaggctttcgagagaaaaagcaaccgcatccgggaaaatttcaaaaccctaacccttagtcttctttctttttggttttgaaggaaccagactgtgagagagaaag

SEQ ID NO: 99151 - DNA, 489 bp, Vitis vinifera
  Intron number 1 from transcript GSVIVT01023603001 (locus G SVIVG01023603001) derived from phytozome v7.0 (chr-ID chr1 1; pos 7878495 to 7878983 reverse strand)
gtcccggaatttcaggcagtctcgttgattccgaggtaatcttgcttttccatattcactattattatgattttgaattttaggtttattttcctgcagtttcttggctaccaaacggacagttagtcaatgattcaatgtgattgcactttgctattatgctttcttttgttttccagctttactggtcatgtttagtttctgagaaaattgaggaaaggaaagaggggaaacatgttttatatgttctgttcttttttattcctgagtaacaacaaagaagcaacaatcgtatagagttaagtgagtcttaaaaagctttatttttggggttttattcatttatttatttatctaaattacttctttcatcaagtttatcgtgaaccaaaggaaacattgttgtgttttctaattctcttatttagtctttgtttttggttgattgctgtaggggtttcctcggtcagatattgacattccaactgt

SEQ ID NO: 99152 - DNA, 840 bp, Vitis vinifera
  Intron number 1 from transcript GSVIVT01028369001 (locus G SVIVG01028369001) derived from phytozome v7.0 (chr-ID chr7 ; pos 6733709 to 6734548)
gaaaggtaacttctaattacatttgttagaagtggatgcttgtttctagttgtttcttctgttaagacaaaactcttaagattcgttgtctcttccttgaactcaagcccttatttgattttaagaaaagtttcaagagaactcaaaccataacagttagcaagtaattgaataagaatcatgtgaacctgtacttaaacagttatacagcacctcatagattttcaattttattggagctgatgtaatcatttaagcagggcctttgcttatgattgtgtaagatgtgatgcttcatatcttttaaatatgacaccaatccacacatcatttagtgaattttctcattttttttggttaattatttctagttttagtataagtttagaatgattttgtggttttaataattagcatctgttgcttattggatgttaataactcaaccatattaataaaggtccaatttgcataattgatcactgttaattttccaattggaatataagaggcccatttcatcaaatacaaggcttatttctcctgttataacatcatatgaaactcctaggtttgaatttatgtatctatttgtccttttgatacatggcttcttgaatatggttttatagtttttattctttaagtgcatgcatcatatggttgccacagtttttgcccctcttaattttttgtggtgcccttaggtgtatgttgtatactttctgtgtactttgggatgctctgttggcgttgccttttttataatactcttttgctttacctatccaaaaacataaaaaagactgttgccacaatgtttcttacaggaccttggag

SEQ ID NO: 99153 - DNA, 946 bp, Vitis vinifera
  Intron number 2 from transcript GSVIVT01030477001 (locus G SVIVG01030477001) derived from phytozome v7.0 (chr-ID chr1 2; pos 6005845 to 6006790 reverse strand)
gattctgctgtttacttgaggatttactggaccgggtattttcaattacatctcatttccattcatttttcatctctttctacatggttttgttatttgacagggcaacttcagttaagtgtttgttttgagttgcaatttaaaaagttgattttatccaattcattgtctaacaatgtgaggttgaagaaatttctatcatggtgctattcaataacatttttcttttcctttttctttgtttaatactttagaataaagtattttgtattcatcctgaggatttctcaatcactggatataattaaggaaaatgatgcgtctcaaacttaatttccaagagccattaaactctgaataagcacaaaaatatggtgatcccctccatatgcaaatgtcatgattaattcaggcattcttctttgttccctggaactgttattaacttgcatttgaggttttttaattgtgttactaatgttggtccttattggtatcaagggtagggtacttaagtctcatatcacaatgtttgaattttgtgaacggattgaaaatggtaaaagctttgaaatggctaaacattgaaatgtaatcttgattttttttcaagatggataattattccatggacacttgccctttttttttttccttctctttttttgcagctcatcctgagtttcccacgagcatggtcattttccattgagcagttttttctcgtgtgaaatgctgttttggattgcaagaacataatatttcaacagaatgttcctctcaaattggacattgctttattgcttttttgttctctcggactgattcaacttcttcttcttcttcttctttttttgttttctttttctttttctttttctttttttatttatctttggttttttatgcaggcttaaaatttttgttcctattgcattgcttgcct

SEQ ID NO: 99154 - DNA, 1031 bp, Vitis vinifera
  Intron number 1 from transcript GSVIVT01030477001 (locus G SVIVG01030477001) derived from phytozome v7.0 (chr-ID chr1 2; pos 6007069 to 6008099 reverse strand)
ctgctgatcagagcctgttgctgattgactcaagggtattgtgaattttttaaactctggtaggtgggtttgagtgggaatgtgtgtttggttactgagaaaatatggcgaggaaagaaaattttgagttgtttggaactgggaacaaatgggacatcctcctcagccgagcttaaggttttttccatttatttgtccttttccgtggttttcccagcagccaaacagtggagggtttactgatcattggttcttttttttctttttctttttcttttgttttttgcatttacttgtttatttttggtttgatccagcattttcttttcgtagaaattatatcttgagtgtctaactgtgtgtcacttagcatttggagtttatcaaaccatgatttagaatggggccattaaagaaaattgtggctatttccacaactaatgggatgggatcagttttatgatgtcaggggatgattccatttcaaagtttcaaaattagttgtattgttggatgccatattctgttgatggtcccattcatgatgatgatgaatttatacataaaagctcttgcaggacaaaatgggactgttcaattttcatgcgacaatcaaatgtgcatcttgaagctggattatttcttcttattcctctatatatgaagtgggtcagttttagttgaatccaatctccattttttagagtagacgaagctctttcatctacactatcggagaaccaattctgttgacaacttgggcaaattgaacaaccaaatcacgcctttgtaaaaaaggaagatcctttcttcaaaatgaagcactgaaattgaaaagtagccttcattcattaagggtcatttaacatttaaattctgtgatgaaaaggagtgtttgttccctttatcaagaatagcttatgtccacatcagtggcctgtaagttctcttttgtttaagtatcatctactatattaaagcttacttattttacagggaataatacacctttgttgattgaactggaagca

SEQ ID NO: 99155 - DNA, 268 bp, Vitis vinifera
  Intron number 2 from transcript GSVIVT01019122001 (locus G SVIVG01019122001) derived from phytozome v7.0 (chr-ID chr4 ; pos 16545732 to 16545999)
aagttacccaattgtgtaagctcctctttctctatgtggggtttttttcccttttttttcctgggttttgaatggtgaaatggtatgtttgaacattgtgaataatgggtttctttgtatattttctttctgggaaaattatgctttctgagaagatttgatttggtcatttttttctctttatttacttatttatttattttgtttctttttttttggggggggggtttcaggtttctcaactggctgattcgaaaagcaggagatc

SEQ ID NO: 99156 - DNA, 622 bp, Vitis vinifera
  Intron number 3 from transcript GSVIVT01019122001 (locus G SVIVG01019122001) derived from phytozome v7.0 (chr-ID chr4 ; pos 16546053 to 16546674)
tagggagtgtattaataggacaagattattcagaggtattcatatacatatatatttcatagcttctttgcttttttattttttattttttgtggattttttgtgtgattttgtgccttttaatctactgtacttttgggttctgcattattgcattcatatatgtttcgtagcttctttgtttttttgttttttgaatttttgtgtgattttgtaccatttagtttactttactctggttctgcattattgttttgcaatttacattgttgatataaggatttgtaagtagtatgaaaatatcaatagagaaggaaaaagagtgaaaccaattggattgatattataacttgagagtggggattgcttaagagcaggaagaattcgtagtggaaggaaggggagatctcgagaagggaaggaatttttgtttcaatactgaaaaggaaaaattcaaccaatgatcatgttctgtgtatatggttgatttttgttgttgttgaattcgggaagaagattttctcaggttttcttgtacttgttgtgattggaaattttagttttgaatgcgattagtttatgtttttatgtttttgggtcttgatatgcagaaattatcgag

SEQ ID NO: 99157 - DNA, 1005 bp, Vitis vinifera
  Intron number 2 from transcript GSVIVT01023488001 (locus G SVIVG01023488001) derived from phytozome v7.0 (chr-ID chr1 4; pos 11054397 to 11055401 reverse strand)
ttgtagcttcagcctcccatagttcaaagtcattgcttctttcatgaagctctgaattcaacttctctcctctgattctatattcttcaatttcttcatgtaacatatccaattcagactccaagttcccattcatcttgcgaagacattcaatttccctgttctgacttgtgttttcttcagatagttcaagaatctgcttttctgaattttctcttagaacttctgatttttcacattccctcttcaattcctcaacagtgccaaataattctgcagtcaagtcctgtgcagctttgagcttctgttttgcttctgaaagatccttttccttctggcttaacaaatcttttccaactgaaagttgattgttcaactgatcacttaaatttgtaacttcatgcagctccttgtccaacttctcaacaagccctttcagatgtaaattttcagtttcttacagtcccaatttctctgtcaaaattcccacctcctccccaaggtcactgttaaccccatggaaattgccaaaatcttcagcaagtgcttttagttcccctaccttctcagaccagaagttgttcaaaaccaaagacaggttactgagggcaacagcttcatggagaatagcactgttttcctcttccaacatgcacttctccttcttcacatctgataatttttttgacagatatctattttcttcaatctccttctaattttcttccttcaattctacgttggctctttgaaaatctaccagcttcttgcataaactctccacatcacactttactccctccaggtggtctctcttgctcacttctagccccaactgccggttcatctctagaagctcatgtttcttgttttgcagcaccaaaagctgctgtgctgtgatattcaattcctgatcaagtgttttattctctaactcaacttctgcaccatctactctcaattgctgaagtacagttaaaagaacggagttctcaacttgtatag

SEQ ID NO: 99158 - DNA, 860 bp, Vitis vinifera
  Intron number 2 from transcript GSVIVT01020914001 (locus G SVIVG01020914001) derived from phytozome v7.0 (chr-ID chr5 ; pos 17268231 to 17269090 reverse strand)
tgcctgcaggtatgctgtatctgtaattttatcagacatcagattttgattgcatatcttgaattgaatatagtggttgattgggagtacagggacttgacataatccgtttttcaattcatggcgtttgtgtgcgtgtgcgtgtgtgtttttatttttatttttttcaaaaaataaaataaaattgaatgtgtgcatgattggctaataatttcaaaaagtgaataaatttttatttgtacaagttggtagtagatttttgtctgtccattcagttgcttgttaacttatgaaattctgcatgagtaccaccgtttcatggtttatttgggttgttggtcaaaattttgagattttatctttctgtctgtctatttctatattggtttgtgcttatctataatgtttggaggttggtcctgtctgggtttttttccattccataaactttgaagtattctataatgaatatagaatgccattcttgttcctttccacaaccatgctaacccttaaaaatctactgtattgcttttggtaccaacacataagattaagattgcaacaaaatgtcttgacaaggtgttgctgggtggatcttctttatgtccaactagttagttttcttatttgtggttgctcatgattgtcaatatgatcaagcttgccgttttcccttgcttcatgagaatttccccttgaattattgttctaggccttggattttttttcttcgctcaaccattctacttaagcatgattatgatgtctaactgttttctaacttgccaagataatcatcatgtttccatgtgttggttgcagaacttcccttgtcaagaagttgaaaggcataacaa

SEQ ID NO: 99159 - DNA, 238 bp, Vitis vinifera
  Intron number 1 from transcript GSVIVT01023687001 (locus G SVIVG01023687001) derived from phytozome v7.0 (chr-ID chr1 1; pos 9287829 to 9288066)
ttagtgaatactttgagaatgttcaatatatagcaccaatacttataataactttgagatattatcatattaatagagaggctagagcagttgacacaattggagagaaaacaaaaggaaaagaaaagaaagttttgataataatattattaaaaaaaagaaaaaaaaaaaaaaaacctaaggtccttgtttagccaaggaaaaaggaagtcaatgaagactgaagagcaattccaag

SEQ ID NO: 99160 - DNA, 603 bp, Vitis vinifera
  Intron number 1 from transcript GSVIVT01023170001 (locus G SVIVG01023170001) derived from phytozome v7.0 (chr-ID chr1 2; pos 21725144 to 21725746 reverse strand)
gacccctgccatagatccaatatataagtaggtaatgtttctcccactcacctcgtactgagaaccaaattttcttccattgttgttggtgcgaatcttcagtccttttagacctttgttttttcttttttttttccctcactaatctttcaatagttttaaagaaaaatatgaaaagtcttcaattcattttttcttttattcattcactgtttttttctttattctatgattttcaaggtttttttcatcgtcatttgtttttttagggcatttgtgagaagatttggaggctttctaggttatccccctcgaacaagccctaaattggttatcgccaattgagcattttagggtttcaactatttgagtagattgtatacctcaaatttgtttgctccttctcatcttgagctctaaagttgttcttaggtttgcatttttagatcaacataaagtgtttgggaaagtattgattcatatccttctacaggtatgtgttttttgagattttgagatttgatccatgacttagtctatgtgctttttgtttaatgttggaatttaggtggggaaactagggtctcaaagcaccaagaaagg

SEQ ID NO: 99161 - DNA, 818 bp, Vitis vinifera
  Intron number 2 from transcript GSVIVT01028067001 (locus G SVIVG01028067001) derived from phytozome v7.0 (chr-ID chr7 ; pos 3573640 to 3574457 reverse strand)
gggtattacttgttttttttttttttgttgttgttgttgtagttgtaattactaattagcctatgttgattggtggaatgaggatacttttggatgataatgattttgtctccattttttgtttttatgacttgggtcaaaaagttcataaatgatataaaacctttcaatttgctttatccaggtcactaagtagtttttggaattaatctggtaagaattattggataggcttctttgcttctttatggggtatgcttttgatgatgagagaggaaaatagaaaagttgatcatcttgagtaactcaatccagaaaagccttaaagcacagctatgttggataggttaccttttcgcactggacttgataggcagtcaataattacatcactttggagaattgcctctccacttcatctcttattttatgggtcatgtcatctttaaattaatctctttctctttatggatgattaattgaagatatcataacgctcataatcatcgggttttttgttcccccacttgtactcatagatttaccgaagttatattccatactttgtcctactttaccattatgcaaactcgtaacttattgaagggtgggggttggggattttggtctgcctgtccttgtgggggcaagggagtgaagacgagaaacatttggatatgagattattgccaaatttgtgctgttatgctgtaacaggagcatacttgtttagtaagttttacatggatttttggactctaattgtgccttcattgaatagatgttgctcacaatctgccttctttttgtttgcagat

SEQ ID NO: 99162 - DNA, 526 bp, Vitis vinifera
  Intron number 1 from transcript GSVIVT01019396001 (locus G SVIVG01019396001) derived from phytozome v7.0 (chr-ID chr2 ; pos 304795 to 305320)
tgtccagggttcttgggatattaaaggtgatgatgaaattttattttctctttttgttggggattttatggcgaagttttgttaatttctatttggttgatgagaaactgagggaaaagtatcgaaactaattgaaaaatcttccctcggaattgtctaatgtgattatttttatgatttgtttggtggcttagaaactgtaggaaaagaaaggaaactgaaaaggaaaagctctggttaagacgcccaatgcaatcattttggttctgtttggtggctaagaaactgtacgagtagaacttcatcctcctttggggaaaaaattcacgtaattgcgcccaataacccgtttagcttaattgagtagggattttcattttgggaaatcaaacaaacacatgtgtgcgtgaaattgaattttcctttatggggtcctcagctttctcagcaactaacgatgggtatgtgtaggtttctgacctgtttgattttcttacaacttaggtttcagctgctatcgagtttg

SEQ ID NO: 99163 - DNA, 536 bp, Vitis vinifera
  Intron number 2 from transcript GSVIVT01026269001 (locus G SVIVG01026269001) derived from phytozome v7.0 (chr-ID chr1 0; pos 15217007 to 15217542)
agtccacagttgtaaaagctatatctggtgttcaggtgttttttttttttttttgggtttcttttttgaatttaacactgctttttattagttttatttctttagaagagttgagtgtaaatttgtattgtcaccttcttttgctagtttgttcagtggaaaggaagcaagtcctttggaccaactcaggcttttcattgttacattcaaactatgagtataataatgaaaagccttaagttaacataaagatagtcccttgagaacttcaggcaacaacaaaatgaaatctatcttgtttctttgaatttgtggggattcaaatgtgtttctgtccctgctttggttagctgaacttgctaggttatggaaaattattccttactgctgggtttttcgttggagaaaaaaacattgacttagaagatggttgaccatagtaatcctctaattactttgttaaaaatatttacaggcttaaatctgaaaggtgggtcctttatggtttatttatctacagactgttcgttttaaaa

SEQ ID NO: 99164 - DNA, 699 bp, Vitis vinifera
  Intron number 1 from transcript GSVIVT01019475001 (locus G SVIVG01019475001) derived from phytozome v7.0 (chr-ID chr2 ; pos 946407 to 947105 reverse strand)
tacatcaaaactaataaaggttaaactcaaatcacgtatgataaaactataatatatgatagaactatatggttatattattatgtactaaagtgcaaatttttgtaaataaaataatgaaataataatatttccaatggtgttataggctttgatcatgattgcattcaagtttcatttgggagtcatttgaaatttaaaatcaacctttaaatgccaaagataattctttttagatttcttattcggatttattaatattttgaaaatgtacgtaaatgctttgatgttaaaatcaaagttttatttcattaattttaaaaaaatgtaaattgtttttatatttgctaaaatattttttaaatatggttttaaatatgaaatcaattatatatataacaaaagtaattatttcttcttccattgctttatgataaaaaaacatatcacactagatcttattagataaaactcctacaacacttaacttgcaattgaaaagttggacttatgtttaattaatttttttttaaaaaaatactaaaattataaaaaaaaaatttatgaaaacattttaaaggtaatttctaggacaaaatgaatgcataacaataaaaacatttttttttagttaagcacaaactagaaagatattctaatagtgaccaagttaccaagcatttaattagaaatatagag

SEQ ID NO: 99165 - DNA, 892 bp, Vitis vinifera
  Intron number 3 from transcript GSVIVT01028558001 (locus G SVIVG01028558001) derived from phytozome v7.0 (chr-ID chr7 ; pos 9786639 to 9787530 reverse strand)
gattctgggtacaagtcttgttgaaaatattatttctttggtttttttttaatcatgttttcactggagaaacattctggaactatggtaaccttatttcaacaaggtttagatcatgttcattatgcatattttcgtaagctggtcggttagccctatttgggattgtcttcaaaatctgatgaaaaaccctgttttctatgtcatccaattgctgcatgacaatctcaaagaatacattaattaattgttttagcatttttttcctatttgagcctagtgtttcagaagtcttagtctagtagatcatgcttaagtttatgctttcgggcttgtgttttagaggccaaagatacctcagaagttcccatataattattaaggaatgaacatgaaacttctgaataaacaagtctaagaagaaataagtttataaaatttaaagtggaaacctgaattttcctattaaatgtaccaactaactctctgagaattccagtaaaataatcaactgagaaattccagaatgcatattccaaacaaaatgtagcactaaaatctcctttcttcatttttttgagggaaaaaaaaattatgaaccacatttaaagtgaactggtcaaaacagtattttctgtcaccatgcaacggaatttatcacatctgtattagtgttctctatctgttaatatttttttgtatgctagagatgaatagtgcagattgcaactttgattgtgcatcacaaatgaccagtgattggagatgacaacaatactgtgttgaatttcatatatatcggaaatgtcataatgcagtaagtaatcttatatgggacttcaaattcacattgttgttttattccttgtttcaggagtgcggatcacactaa

SEQ ID NO: 99166 - DNA, 689 bp, Vitis vinifera
  Intron number 2 from transcript GSVIVT01028558001 (locus G SVIVG01028558001) derived from phytozome v7.0 (chr-ID chr7 ; pos 9787646 to 9788334 reverse strand)
acatcgtaatcttctattcccctttcttcttctctttttctctccaccatctatcattgttatcattgcatcaattcttgtttgcttttgaaaaaatcaatattggtgctaatgcttgcaaacaaaaggtgaattactgaagactgaagaccaaaatttaaaatcttccatcattcttgctgaatggttatttgaatgcaaaactggtactctcgcaaaacctagttccttctatggtttctctgtcagatgcagtaatagttatacttttagtttatacttctaagaagctattcagagaacctatatggagaaaatagcactctagaataaatgcattttcattggggtgctataaaaaaattgacatttttggcctgtggactaggatgtttactgttgtgaattttaattgtttatatatgtattttctcaaaagcccagtcagagagggtggcattacttgaataaagtggtatctttaatggggaattgtgaaatttgtcaatggtttttggtaaattgataaattttttacgtgctatcaaatatgtacacatacacataaaagtaagtattacatggttggtggaaattcaagcttatctgtggtttctaaatttctacttcttgtttgggggtgtttgaatacagctttctaaatcagcacgggaggtttccaagtttgc

SEQ ID NO: 99167 - DNA, 1063 bp, Vitis vinifera
  Intron number 1 from transcript GSVIVT01027513001 (locus G SVIVG01027513001) derived from phytozome v7.0 (chr-ID chr1 5; pos 16064889 to 16065951)
ggtccatcagaaccgccattgacaccggctgtggggtacgtaaaatcttctattcttctctttcctttccgaattgccacctgccggaaatcggataggtcgagcaggtccttttaggtatacctatttcattcattgtctgggtggttgaaccggccggttcgaatttcattttgccggcataaaaggcaattcgattggatgatatcccgcttttatgagtttccttttgttatactacaagaatatgtttttatagcaagaaaaaaaaataaaaaaatctggggataccataaaatattttaaattctttgactttcctttttttaaattattgtagaaaataaagtaaaagagagaataaagggattttccaatccactagccttttgtgttctattgagaggttttttggttttttggttttttaattttaattttattttttaattttacttttatttatttttattgaattgaaagttgacttcgggtaaggaaagatctttctaaatttttgaatatcaatctacatgggctcccttttttgaaccttgaagtcttttgtctaataattattactgatcatatataagcttttagaactgccatcagctgttgaatccctttgagtattaaacacttcaagtaaagtttggctaaatctctcaatttttgtttctatcttctttaattacacctaacttcagatcttacattttcatctagagtagtagccttcaataatacaacaaatttgcagtataattacatctttatacactttgtacaatcaacagctgatgatgatgaatattagaacttttttcattttccattcaatcaaacaaggcctaaatattaaaactttcttcagagtatcaaacatgctgctaactgatttcatcaggcgacagaccagctcacatgacagtgatggatgttgggcttttttcatttttgattcatcagatgaaaccaaaatacaatgaatggttatatgcaactggccttgaatttttctgcaggttgcaagctggggagcttaccttctgtcaaggaa

SEQ ID NO: 99168 - DNA, 876 bp, Vitis vinifera
  Intron number 1 from transcript GSVIVT01020509001 (locus G SVIVG01020509001) derived from phytozome v7.0 (chr-ID chr1 9; pos 18195174 to 18196049)
tctaccatttcacgatcattccatccagaaatgtatgaaaataagctactctttatcattgcactaaaatatatttaattgtggaattttccccaaaagattgttggttttctggtcttttttttattagttatttttcctgtccttttttttcttcgctaagaagttatagtccaatggaatttcaatggtacttcaaatttcccttttctatattggagtgtaatttttaagatttgtttgattaacaagaataaaataatccaaatttgtaaaattatcccaatgataaaaaaaaaaagactcatttttttattaaaaaaaaaaaattattcattgcttttcttgtcagcctaaaaaatgacttttttttttatataaaaatatccttactgtttttcttataaaaatatcttttttttaaaaaaaaatttaaataaaaatatcaaaatattaagagatgcttatataaaaaatgaactaatttttaagttgaaattcgagaggtgttagatttacaaatttaatatcatttcatccttttcaattgttaatccaattgttttataagctatatgtaggtatatatagatgtcaactttgataaagagctttatttactttgtaaattgctcaatctttgggaatttgtgaatagtatttaaattttcgtgttaattgtttcttatcttttcaaattttgcatgaacttgtgactcttcattattaatcacatcagtataattttctttagatatttgagcttcttcaattagagagccttgcattggcctccttgactacacaggtcctttagatcctttctaacacttatccaacaatgggcattaaaaatgcaggtaaaaataattttat

SEQ ID NO: 99169 - DNA, 367 bp, Vitis vinifera
  Intron number 1 from transcript GSVIVT01021090001 (locus G SVIVG01021090001) derived from phytozome v7.0 (chr-ID chr1 0; pos 1365350 to 1365716 reverse strand)
gtcagggtccagggccccgtaagtccatgtcgttcttttttaattttctttctgcgccgtttgttttccagaaaaatataggcgaataagcggaattggaatttgaatgctaaatttcattattcgggtctctgaaatcgaattactactcagctgatcctgatacatattttggttgagcaacgattgagcttttcattttttttttttttttgatttttctgaaacaagaacaacagaaaacattacaactcactagccaaatgggtattcggtgtttctatgaatttgttatcatcactcttgctgttttcttctactgagctatgagctttctgctaaatttcaggacccgaagggcctaaag

SEQ ID NO: 99170 - DNA, 641 bp, Vitis vinifera
  Intron number 1 from transcript GSVIVT01019305001 (locus G SVIVG01019305001) derived from phytozome v7.0 (chr-ID chr1 5; pos 1547782 to 1548422)
tttctcaggtatactctcagaaaccccaaccctaaccctatcattcttcttattgttagagtctctgtaattgaacgcataatctttgtagttattgtcaaggcctctttggttaatatgaatatatcgggggcaataatgttgatagaaatgatcgaatgggttgtcatcattgttattgtgggtcgtgtttggttggcggcaaagaatgcgtaagagggaagaaagatgctgaaattcttttggcaacgggagggttttatttctggaagtaaaattccttttgagctttccttttgccgcttatgtttcaaatgatttgctgggatgatggaaattaccagggaaaggggaaaaaaaagggtagttggttttcgtagactatgagaaggaaaacagaaagtaatgaaaattatttaaatatttataaattgttaaattctttattgtctgtataaggtagaatggaatttggagaaaggatgagggaaaaatttaaactaatttttttttacttttcttaaatcttttcttgcttttcatttcagctcctctccctgtacttttctgtattcaaatggaatgtaaaagtttggttgattgattactggttaaaattgtaatgttacaggaggtaggtc

SEQ ID NO: 99171 - DNA, 833 bp, Vitis vinifera
  Intron number 1 from transcript GSVIVT01024972001 (locus G SVIVG01024972001) derived from phytozome v7.0 (chr-ID chr6 ; pos 5599487 to 5600319)
taaggctctgctgagttcgattctctgctcaaaaggtattgaatttattctgttgttctcttctctttctggttctctctctctcttaagtttttgtcactgtcgaggtaacccaggaaaagaaaaccagctcgtgaattttaatacggcttttggagttttctttttctttttctaggaaaaaatagcaccctgaaggccagagatttgagagttgaagttttcaatttttgtgggtttacttccctttctctgcagccaaacacagcatgggttttttttttaattgagtttttataaaagttctatatcttttgatggattagaggtgttaattcttcgatctatagttgatgcatcactttgatttgcgtcttttgaaaaggcggcaattccttttatggctctctgtattcttcttttgaaacttcatttgtttctggtcaatgttctctgtgaaattcttaagatgtcattatgtatttgtcgcaaataagaaacatgcctcaatactggaaaaagggcataaaaaacagaagttaaagtaatgaaaggaaaattgatgagctttttagatatgggtattattggatattgatcctgcaatcctggtcaattgttatgattcaattttgtttcaaattccgggttttttcccatgatatttgtttcaattattgggatcatgtatgggatttgagaagcttttaagacaggttgtaggtgattttgaatattgttgtttcggctattggattttctgtcttttctcatttcttttgtcgggtttttgagtagatagtggctgcaattcaatccattatcactccgag

SEQ ID NO: 99172 - DNA, 330 bp, Vitis vinifera
  Intron number 1 from transcript GSVIVT01019806001 (locus G SVIVG01019806001) derived from phytozome v7.0 (chr-ID chr2 ; pos 3495342 to 3495671 reverse strand)
tgctcggtgaagaccccaagctaaccctagccaaggtcctttatctattaccttctgtttgtttggtcagaaaactgtcgaaaagaaaataaaagaaaaactaagttttagtatcttgtcttatgtttttttaattctaagacacgataaactgtctttgtatgatctaagttgttgcgataggattaactgagtaaagttccaaccattttgatttccccccgcttttcctacgttttcctcagcaaccaacggaggcataaatgcagttcatttataggggtttatgatgttccatttgacgattatgttcttctattgtttcagata

SEQ ID NO: 99173 - DNA, 1043 bp, Vitis vinifera
  Intron number 2 from transcript GSVIVT01028145001 (locus G SVIVG01028145001) derived from phytozome v7.0 (chr-ID chr7 ; pos 4178507 to 4179549 reverse strand)
gttgtctgtttcagattcgcttactagaattggtaactatattctctaccctaactcatctctttttcttttctttttttgtttgaaattttcctttttccttttcccgtaaatttattttgcagcgcatgaatctgtctggttctaacatatactattttgatgaaaaaaaaaacacaaaatctagtattagttcagtaaattttgaacaaattttcttttgttagaatgattcggacggattatggtgaattgtagtggttttagattcgaaatcttagagtggattctctgaagtgttccagtattatcaattggagacaatggcatgcaccattttttttctttcaatgcatctatttaggctatgtttggttcctgcaaattactttggaaataaaaaacatactaggaaaataattttttcatggttttactattgaaaatatgaaagaaaatcaaatataattaaaattagttagggctttatgtattttaaaattatttaatttttatatgatagaggaaaataagtgaaataagtcatataaaactaatttatcgactttaaatctatttttaattttccttcattttttcttcccttctacttttcctttcccttggttttttctctcaaattttctggaaatgaaacatagtctttgagaaattgcaagattagaggtatttatgccatgtgcctgatcatagaaataaactggattacctttcatggtatataacatcattctttgataattaagattttcatgtcttgtgtaatacattaagagatgatgacattactactttcccaagggtagtttctgggcagagctggagagctgacttgtgacttccataattaaattctctttgtattttttgtctaagtaactgattctgttctttgtttattaatttgctgtcattgccactttgacctgctgtgactgttaagtttggtactcatagtgagtataactgtaggacctggattctcaggactgcagcttaagtttctcgagactcactttatt

SEQ ID NO: 99174 - DNA, 863 bp, Vitis vinifera
  Intron number 1 from transcript GSVIVT01028981001 (locus G SVIVG01028981001) derived from phytozome v7.0 (chr-ID chr1 6; pos 16918969 to 16919831)
gcggtctctccccaagcacgcaggtttttctttctttctttctttctttctttcttttttctttcacgttgtttactagctctgtttggttggtgagaaaagggaggcaaaatgtaaaatttatgaagctcagccaaatgaaggttttcaacctctttctcgtgttttaagcaaggttttcgattttcccagtattgtgtagtagccgagaaaatagaggaaagaaaaaagaaaacaaaacgaattttttcgtgaagctcagctgttaagtgaaggtttttgctttgtctttttacattcaaacactttgtttaattctttgtacttcagtagtcggtgaccaaatcttcaacttgcttttattgctttccgaaagcgaagtttttgcttcaaaaagcaagaaaagcaagttgatactcttaagaacaaaaaggtttgtgaggagtgaggacagagatcgtgttttaagggttctgatacggtgaaagcagccaaaaaaatggcgtcgtttcatccttgcatggttaccttgctgcaaggaaaacgacgtcttgttgctggtcttaaattgagttggtttcaagtgtcatgcgactctcaagattttcaatattctcacaaccaaccacttgtgttcagtgaggatagacgaacctttttacggattccgaccatcgttttgagtgagtcatcccaggtttaagagtggtgttgtttcactccaaccgccaccaaacctaagctagattaatggttaggtctctaaagattgatccttggcaacttgtaaatgttcgacgcctgggattttatgattgaaaactttaacgattgaaccaccatttgaacttaggtctgcttcg

SEQ ID NO: 99175 - DNA, 865 bp, Vitis vinifera
  Intron number 1 from transcript GSVIVT01027058001 (locus G SVIVG01027058001) derived from phytozome v7.0 (chr-ID chr1 5; pos 18272348 to 18273212 reverse strand)
ttatctctgtggcagttgcggtgctgttcttcaaggcacgatttcttcaattttcttttacgctttctgtttttctttggttctatgtttagtggctgagaaaaagtgatgggaaatgagaagatatagaaatttcggattatttgggcgctgttgtgcttctgcaaggatttgagtgggtggggttttacagcttcttattattttattattgttttttttgttctttttccttctgtttggtttctgagacaaagtaatgggaaatgaaaagaaatagagatctcggattatttgggtgctgtttgcccaagcagttattggggtgggtcgaaatttacagcttcttcaattctattgctgatttttctctttaacctctgtttggttgccgagaaaataatgggaaagagcaatagtcaaattattggatcatttacttgccatttcctgatgcaattattttgctcggttgagacaagagggttcgatttctttaatttcatatgttttctcttcaaacaaacagagttttagaggtgttttgcgcaatttctgttgctctctgtttttcctttaccgttatttggttgctgagagaatttactggagaagaaaaggaatgaaaaatctcgaattctttttgtgccatttgctaattcaactatgtggtattgtttttcattcttttgaaatcagaacaatgtaaaccgtgaggtcctagattctagtttcttttgctttcggccattttatggagaaacaaacggagtgttgagaggttttttcaataatttgggggtttgactgttttttcttttaatttacagggaaaaagaatagaaaatctggcgtggacacttca

SEQ ID NO: 99176 - DNA, 617 bp, Vitis vinifera
  Intron number 2 from transcript GSVIVT01019889001 (locus G SVIVG01019889001) derived from phytozome v7.0 (chr-ID chr2 ; pos 4249611 to 4250227 reverse strand)
taccgcaggtaccccttccttctcacaacttattccttgccaaagagtttatgttttttctgaaatccagaaaaaacatgatgcatgttattcttggtcatgactcataatgcccccacatgatgcctttacgtataatcctaagattttttgatttctcagagcagttggttttgtatttcaaaatggcagattaaacaatccacatcacctaaaggaaaagcagcatagtgcccttggaagcaactttaaggaacaaaaacattcctaatgcccagtatggtgcccttggaagcaactttaaggaacaaagacattcctaatgccactatactggtttctaaaacatcattcaattacatctcactttcaagtttcaacctccatacatgacccctttctctaacttttcctaaaagcgcagatggggactgtttcttccaggaattagtctgaaaggttgaatttctggaagataaaattaatctgaatattaacagaaaccttattggaaagctaacagcaacatgaaaagttagataatcaatttttttttccccagaaaagatttaacaaacataaattctaatcgttctgcatgattcttgtagagtacc

SEQ ID NO: 99177 - DNA, 1027 bp, Vitis vinifera
  Intron number 1 from transcript GSVIVT01019527001 (locus G SVIVG01019527001) derived from phytozome v7.0 (chr-ID chr2 ; pos 1357879 to 1358905 reverse strand)
gagagctgctgggacgttttccggtaaatttttctggcgaaaaggatgtagttgttgtggtttttgaataagaattttaactgatgagtttttacgagttttccgattttccggtgctgctttggaattcggtggatttgtctctgtgttattttggttttcggaattttgatttggaagtggaatgattcttaagatgtcgtgtttgtgctgtttttttggttgatgtcacaaaaggtttctctttatgccaaaagatactaaaggcgcggtttaaggtcgtctaactgttttatgtcacactgtggatcttaacctttttttttttttttaaattccgtctattactttaagtaaggtttctttggtttcgacgaaatagttttcgcatcaattttccggcgatttgttttttaaaaaagcgagcaaagtttaccatgcatatttacaggcgaagtttgtttattttttcgctgaaattttttcctgccaacaagcagagcgggaagaaaatgaagtaaacgctctcatgaagtatgtggatttgcaatagtgaaacagtttatcatgagaatatcttgtcataattgtttatgaaagcttctcgaagtctccttgaagaaaggaaaatatgatgattcagctctcctgttctatggatgcctcttttgaccttgaaaaagtccaaaatgatgtttttgtatgccaaatgaactgtttcttggcatctgacttgcattacatacagttgttgctgtattcgtttgttcatttagaattctgtgtctgctttttaaaaaatttgccttctggtttgtatatgctagttagttccacttaacaaacacacgacacaccgctggtggttttttttttttttttttcattttttttttgttttatttatttatttattttttatggtgttttgttttttgtgtgtggatggtattttatgttgagcttcctgagttatgcctcatgtttctgtcacagcctggctgttgaaaaatatcctggaaatcgc

SEQ ID NO: 99178 - DNA, 797 bp, Vitis vinifera
  Intron number 1 from transcript GSVIVT01023891001 (locus G SVIVG01023891001) derived from phytozome v7.0 (chr-ID chr3 ; pos 2641827 to 2642623)
gatcttgaaagacgaccaaaccctagagagctgtacgccgtcgttgtactctcccgtatacgtggtttgatttttggaaattttttttcttttttaattttaggggagtttgatttcgtagggtgaaattgacctgggaagtgaatatgatgagtttgatttaattggatgatttgtttcttctttcataaaaaaagtgtgtatatcctctctagtctgcttcggagatttatacatgttgcaggattttattatacatgtttatagttttttttttaatttcatggatagtaattttgtctttattatgtgtttgtatttctgcttacaagtggtggttttatccagtttttgaagctttagtgatctgttttcagttttcttttggttgttgggtggtatttgaggattccatgtcagaaaatttaggaaactaaaagggaaagaaaataaaagttctaggggaaataaaagatgggttttactacgaatgaaaaattttaaaatttgtaatattttagtgtatttgattttctttcctaattttcaagatataccaaataagaaaaatttggatacattattacaccaaattccacatgtattactaggcatgccagtttgatgtaagccatgcttgatattttttcaaaccttttccatggtttcaattcgaaaggacgtcgttataatggttatcaatactctttctggtctttttgctgtggtagaccattgatcgttttatttttctcttttctgtggttgaaggtttgcaggcagatcacactgttcac

SEQ ID NO: 99179 - DNA, 801 bp, Vitis vinifera
  Intron number 1 from transcript GSVIVT01030331001 (locus G SVIVG01030331001) derived from phytozome v7.0 (chr-ID chr8 ; pos 8768047 to 8768847)
tccccattcaatccacttttggtactcctttaaccctttcctttgggtattgcttctcaggaaagaatgccagaaaaagggaaggaaaaatgattcgatttggaattgttttttttcccctttctttcccgagaaccaaacgcgatctctttgaggttttcatgtgtggatatatataattatgcatatgtatgtttgtgtgttaaattgttacgtgtactagatattggggtttattctttgtctggatttctgcccttttggccttttatggtggtattcatcgttttccctactggttttcccctcttttcacacaatcaccgaatgacagttattttaaaatttattttttctgtgatgggttgcggtttttgtgatcttgttcaagcgaggggttttttggatgttttaaatttggattttttgaatcggcctttgagtggatttggtttatgtatgcttttaattgactattgattaaatggatttggagttgattttgcccatttgtggatgtgctggcctgtgagagctttttaggttgttctgaaacttaattattgaggtttatttttcaaatttatctgttattgggagggttgagattttcatgtcactttttgggtttatggtgatggaacaataatgtaatgctctcttgttcttcaaaataattttccaatgaactgtgcttgtatatacaggctatgctttatattcattgaaattgatgcatatttgcttatggttcttataatggaaggggatctgaagaagcgtcttgtccaagaaactggt

SEQ ID NO: 99180 - DNA, 538 bp, Vitis vinifera
  Intron number 1 from transcript GSVIVT01028266001 (locus G SVIVG01028266001) derived from phytozome v7.0 (chr-ID chr7 ; pos 5033526 to 5034063)
ggtttcctcctacttctcgcgtaactttatctcaggtactcaccatccaatcactctccctataatgatcgattattcaatcgctgtattagattgattcccttggtcatcaactcgttggtttcttcttcactttctttgaatgattggtgtatggcgtgtgtttagttgccgagacctggatttgatttggaattatgatttcatggaatttaaaagtttttgttttctcacggaggatttctttgtttgtgcggtgctgggatctgtgaatttaaattttcagttccaaatccattcgtatgcgaagcaaccaaactctgcagccacaattgggttttaaattccatttccaccaaccaaacacctcattagtgccttgacttatagtttcatttccgcatatgcaaggagacaggcctgagtttaacagaatctctggtctcatggttatcatcttgacttatagtttttgtatgtaatataagtcctatggtgatgattgagtgtagattaaagcagcttacaaaagcaaggc

SEQ ID NO: 99181 - DNA, 934 bp, Vitis vinifera
  Intron number 1 from transcript GSVIVT01029990001 (locus G SVIVG01029990001) derived from phytozome v7.0 (chr-ID chr1 2; pos 8743186 to 8744119 reverse strand)
tctagtgtaacaggtgagaatttcttgaatcgattgcgatttgtcgattttgtgatgtgtttgattgctgaggaaacggaggaagagaaggaaatttaaactattaatccaaatacgtttgttagtttagctgagtgtaggtttctggtttattggcgccaaataacgcaaaagaaattaaaggtctcgaaattgcagttcagtttattttcctgtatttatggggaaacagtcggaaactattcgattttgctactcgttttttctatttttgcaacctttagagtagtcgtagcttgaattagagcgttggttggccagaacttactcttagattatgcatctttgagaaattaatgtggtaaatcaaaatctctgaaacagagctaaatgtactttaatttaccgtatcgaagtaacttcgcccttgattaggtactgttgtacttgcaatgcttctagttgaatacattttcattccatgattcctcccttttcattacttgttccttttgctcagcagttgatgattacctttttttttttcggattttttttttcttttttcttttgttttgtttttgcatttggttttttagattgaaagtttttctaaatgttgccatgttctgtgttaatcttagaaatttctcttaaaaataccaaggcaactaatagtgcctatgaaataccaagctgagtacactctcaaatcccactggtgtgtgttttgtcacccaatcaaatgtccttcaggcataaggaggttcggggataaagctgacaagatttttactgcttttgattcattcattctttttatcttgttttcattcttacctgaataagaagtatacatattgaagaacagatgaacagatagattgcttagctatttatttggtcagcatttgtttatttaatttgttttcag

SEQ ID NO: 99182 - DNA, 834 bp, Vitis vinifera
  Intron number 3 from transcript GSVIVT01029114001 (locus G SVIVG01029114001) derived from phytozome v7.0 (chr-ID chr1 1; pos 19498917 to 19499750)
tggtctcgtttgcagtggtaaagaatccctttttctatttttttagttgtttttctttttgatttgatgcaatcatttttttattataataaaaacaaccgtaatcgatctgtattctgtttttaatttggcaatgcctacttcagagattttaaaaacgagaatagaaaatagagcatccagacgtgttctttttagtggccaatgctcgtcttttagccaaaatttccttattctgaattctaaagtctgtttggtttgtgagaaaatagggaggcagataaacaaaactaaaatctaggaacagaatcttcctttcattgttgagtaattactcctcacattttctcaacatctaccttaaagtgcaacaaaaaaaattgaagcttttcatatgattaaccccatcaagtgccttatatttaatattaatgaaaatcatgcttaagatccgtacaccgttttttattctgaatatgtcaatagattttgatccttcaatcaagatgatttcctgcagtgtaattgttttcttgttgtgtttactataaagataatatcataataaaacatgcaatttctaaagcatgaaattagaaattaaatttgtaatgaacaaatgggttggggtccttgattgcgtgaattgcattgattcacttcatgttagcagtcgattacttctttggaataggggaaaagggagtgaattgttggaacccaaaaattttaatggagagggaactgaggtgagccaaatcctttcttctatgttggtctttgatttcattaatcttgtgcagattgcttccagtccacaaacttgccctgctg

SEQ ID NO: 99183 - DNA, 387 bp, Vitis vinifera
  Intron number 2 from transcript GSVIVT01029263001 (locus G SVIVG01029263001) derived from phytozome v7.0 (chr-ID chr1 1; pos 17867780 to 17868166 reverse strand)
cacctcagcaacaaaatcaggcaaagcttatacatgtatgtttctttgcatgtccagagatctctcaaatcaaagattcattttctaatgatttgtgcacatttttttcttttagtgtgaagagtgcgatctgaatattttggttgctttatctgcttttgatctctgttgaaacatgttctataccttggtgtttgaaagtttgaactgaataatttaattgataaaactgttttctttgtttcattagcatcattgattgcatgttatgtttgatcgtatttgagtgggattggttcagtagttgtttggtttttttgtcttaatttacatgtatatgtatattcatttaccatttttgattgataattaatggaactttgcagt

SEQ ID NO: 99184 - DNA, 998 bp, Vitis vinifera
  Intron number 1 from transcript GSVIVT01029263001 (locus G SVIVG01029263001) derived from phytozome v7.0 (chr-ID chr1 1; pos 17868216 to 17869213 reverse strand)
atcagggagatatccacaggtaaatttttcgattttttccttttctgttttgtagagtgtagataaacacacctaggcttctctaagaattttttagtttttatttatttattttctttttttcctcgatccgtgaggatttatgtgcccatactgttgatgggtttggaaagacaaggatgatttgggttttcggaaattgattttgtatcttgttcttattggaagtttcgacttctcttctgaaatgaaaatgtgtgtgatgaaactttttccagtagttaaatttgattttacgctttctcttgtagcagcttttcagattttcttatttcatgagatgggtttttctcgagtttttcctaattttcactgaattgcagtttcatgaggtttataattatttgttttcctaaaattcctcttttttactatgaatttgcatggtgcagagaaatttttttagacatgtaatctagcgtagcattaattatgtaacatctcaatccaactataatttcaatatactcagattgagcatttgagtcggctttggataatgttcaatgatctgtttgttgttattttgggtaaaatatacattgtggttgcatgatttttaagtcctcctgtagcttcatgaacccaattgtttcagttgtatttgtgggtttgaacatctggatgcctgctttaatctctgtccttttgttcccttgtgaaacatctaatgaaaaatccctttcttctgtttaacgattcttcagactgttcctcttagatgttaatggagcatgtttgtcaattgcagtcaatacaagatctttatatacttaggtccaaatgactaatgggttctgccctggtttgcttccgaattttggccttgcccgaagaagaactagcatagtgcatgtaatgcagtaggaggttattttggtttgttgatattgttgggttgcatctgatttgtctgttcaatgctgcagggtcttgta

SEQ ID NO: 99185 - DNA, 991 bp, Vitis vinifera
  Intron number 1 from transcript GSVIVT01020834001 (locus G SVIVG01020834001) derived from phytozome v7.0 (chr-ID chr1 2; pos 1389125 to 1390115 reverse strand)
ggatcttccaagtaagttataatttcatccctttttctcctttcccattaaaattcacttaggtggcttaagaatcaaaacaggtacctctctttttctctattgatccgatgaaatcatgatttggaagccatcaatttgagatgaatcgagttgctacaatttgaaaagattcacagccaactttgctgcaaagaaatacgtatttagatatacgaaaggaagaacatataaagatagcggggtgagaacctagtgacatgtatgggcaagtggttgtggtgagagtagccttgcatgcacgcaaacaaacttttaacaacttattgtaacctgcagtccgtacaacactgcacatgcagagaaagagagatgatgatgatggtgatgctaacatctgtggctgcaggcggtatatgggaattttaaggagtgtatattgatgatcatggaggctaggtgtttcaataagcttgaagcaactgaaattacaggaacatgattctacttagttgacaatatttagatataaacatttctttcaagtttttagagtatgttttattataatttcacaattacaagaaaactgaaggttgaagaggcagcaattagttccaacgagaagttatttgggctggaatggggtgaaattccatgtcttcttttgatcttctctccatcttctcaaccaaatagtcccttacctcatggcaatgaggatgcatgctagctagagtcagcataagtttacatacccttttccctattttgaatttgaagcttgtttcacagtaagctcccttcaaaagaataataaaccttaaagcttgtttcaataatgaacctttgtatgatcatcaactgtaatttgaaagcctagagtaaccaggcttaaaatatactaatatttttgcatgcctcctattagctttagccctaatttcttacctcgaagtctttttatgaaaatgaaggagtcagcactaac

SEQ ID NO: 99186 - DNA, 512 bp, Vitis vinifera
  Intron number 2 from transcript GSVIVT01028840001 (locus G SVIVG01028840001) derived from phytozome v7.0 (chr-ID chr1 6; pos 18215702 to 18216213)
cactcgacttgcaagatcagttgctcctttttgaggtgcattttcactgttccatttgtaaaatttgcagcacactctttcataaaccataaccataatgttaccaaattctgaacccactggtttagaaactcaaagggtctgtttggtaacatttttttaaaaccataatgttaccaaagcctgaccccattggtttagaaactcaaagggcctgtttggtaacattttttttaaacagtacgattgttgagaaattttagttagagaactgttaagaatagtttccaaacagaccgaacccataaataccattcatacaacagggaaatgttgttagggtccatgatccagtgacttgagatgtacccatgttttgatttattatgatcaatgatttagactactataccaaaaaatatcgaagacgtttgaatttgactgtaggtattaacactgctcttaatgtttgtgcagaaagtgaagaaattagttaaatccgatttcttcag

SEQ ID NO: 99187 - DNA, 409 bp, Vitis vinifera
  Intron number 1 from transcript GSVIVT01024440001 (locus G SVIVG01024440001) derived from phytozome v7.0 (chr-ID chr1 6; pos 2596368 to 2596776)
ttggacgaggagaagttcaaggaaactgttcataagtaagtttgctgtgatgttggttggatgatttatctaattgtccgattggttactgcgataattgaggaaaagaaataacaaagaaaggcatatatatgtgtgtgtgtgtataatcttctgcattttggtgggcttgatttggaaaattctgcaaatcaaatatttgcattatgttcagttgagtggaagtcccctaaataattgaaggctaaggtttgaaatttcaattatgtttcctttcctctcttgtctcagagaccaaacggagaattaagagattgagcttggattagtaataactgcttttgataagtttgtattttatgatttctgaatttttaggttagagcaggagtctgggtttttcttcaat

SEQ ID NO: 99188 - DNA, 485 bp, Vitis vinifera
  Intron number 1 from transcript GSVIVT01021787001 (locus G SVIVG01021787001) derived from phytozome v7.0 (chr-ID chr1 4; pos 7430963 to 7431447)
tggaatcactgtgagtttctttctcagcgagtggacttgtttgccctcctgtcgttttcttggcatctgcttttcctttgtcatttttgtgctcctttgggggtagaattgtcatgtgggaatctcggaacatgggttttccggtggagctggtccttgttttggaaaagctttctttcgccctgtttggttggtgagaaaatgttaaaaggcataaaaaaagaacagagaaaaatcagaatttcgaatattcggtactttattgtttgggacctgggcatggccttcaataattacagcctcttgtaaatcaaagatttgaaattgttatgattaattttcctcctgtcagttgacttgagtgacagggtaaaacattttccatgaaaacaaacagagttttccttgttttggaggtgttttgtttatttgtttgtattgtgttgacaggagagagaatcggtgcatctgacaaacttgtttcc

SEQ ID NO: 99189 - DNA, 797 bp, Vitis vinifera
  Intron number 1 from transcript GSVIVT01026968001 (locus G SVIVG01026968001) derived from phytozome v7.0 (chr-ID chr1 5; pos 18946331 to 18947127 reverse strand)
taagatctctattttcgctcgggaggtcgtttctggtatggtaatcgattccttaatcatacttagttagcctagttatctgttaattgctgttgatttaatactacttttgccggttagtgcttggatttcttgtgttagggtggtcattcgttcatgatttattcattttcgagaagtattatagtctcagattgtaatttcagtcgaggtttgtttggttgccgagcaagttaggaaaagaaaagaaaaaaaaattagagctgagattcattttagtcatatgagaggaaacagagaccagtcaaagactcaaaagtttacaactatgtgaaaattgcatggaaaatgacttcgccgcattgctaaatggcacgtgatttaatttttcttgaagatcaggagcattggttgcatatagaattttatttagggtctgtttggttgctgagaaattttgggaaagaacatattgagtcgagattttctacaagtttgatatgagaaaatagagaatagagaacaatcaaaggctcaaaaccccacaactgtgtaaaaaattgctaggagagcgattcatcctctggatttctcagtgtgtgcggtatagtcttttagaacgatcaggcatttttgtagcagcgagtattctgggagattggagaatgtagcatcaccaattgaatctgggtgtgacattttcttgtaaattggcagttcttggtctctgtttgattaatacagttggtttgtgtttcacagttgggaaagaagagcaaccattgccatttctacta

SEQ ID NO: 99190 - DNA, 695 bp, Vitis vinifera
  Intron number 2 from transcript GSVIVT01020828001 (locus G SVIVG01020828001) derived from phytozome v7.0 (chr-ID chr1 2; pos 1468368 to 1469062)
ggcaatttgtaagcaaagttatgagtccaatgttctagactcaattagagttagccatgtttgtggctttcacataatttgaaataggaactattgtattcatttggacatcccttggagatatgttgtacacattgtgtgtttcataatttcatttgcatctgggcgagtttactgtttccctttttctttcttcttttccaaacaaatttgtgttaagatgaggggattcaattatttccattcggaagatcgataatttctacttctgtttgattaagtttatgtgctgatattgaaccaatttgagtgtcacaaatccatttgaaaacacaatgaactgattcaattttcatatagcatatgaagagggaaagagaggttttagtatgtgaagatgtttccattatcactataaatttgatttgatttcaaattctcccttaattttatatagcaagatactctaggaaataagagctgcagcctttactggaatagtctccaaaatcaaaagccccttgtgattttggctattgatatagaatattccaggtagttgaggtttagctatgtttctcatcttctgtcttccacatattacagagccttgagattgccagacaaattttcttggcagttgaatcatgcattttcttctgcagtgtggtgcagaaggaccgacgagcttgtgg

SEQ ID NO: 99191 - DNA, 490 bp, Vitis vinifera
  Intron number 1 from transcript GSVIVT01025342001 (locus G SVIVG01025342001) derived from phytozome v7.0 (chr-ID chr6 ; pos 1774691 to 1775180)
ccttttagagcttgttagtgcagagcttgatcctcgtaagtattttatcatttaactgatcatttttttgtatatgaaatcgagtaaaactggactgctgcagttttctgcagggaccatgcaattgcaggccttgtttggctgcggtgttgttattatttttttattttttttaattatcaaacacatcttcagtcaagaaaataaaattttaagcagaatggacaaaagaaaaaaaaagaaaaaaaaaggtgcattatagaggctaatgcaagggaagatttgagtcttcctgaccatgtgtttaattaccctaactttttgtttgtttcctgagaaaataaagtagaacacccaaaaaaaatctgaatttttctccttttctacacttgctcgtctgaattttaaaatttgatccatggagtactgatattttcgttaatgattttgcaaagagacgggatcacagaagaagccgattaacgcgaat

SEQ ID NO: 99192 - DNA, 1036 bp, Vitis vinifera
  Intron number 3 from transcript GSVIVT01030007001 (locus G SVIVG01030007001) derived from phytozome v7.0 (chr-ID chr1 2; pos 8895429 to 8896464 reverse strand)
gcattgtggagcctattcggaacattgtcaggaaggtagagtgccatcaaaccaatttgcattcattgacatattacctcatagaagctttaggttaagtttggttttcggaaagaaagtaccatccaaagaaaaaaaaatattaacaaaaatgattttctaatatatatatatatatgcttgtttggtttagagaatgactagaaaaggaaaaagaatattaagaaaaataattatatcatgttataattagcaaataaagaaaataagtgaaaaaataaataaaaatcaaatcaaattaaaattaattagaaatttatatatatttaaattatttaatcattttataagtgaaaaaatataaaatgaatttgaaaaaaaatataaaaataattattttattttattttatttttcctttactttttcttttctattatttcttctattttctatctttctcatttttttttaaggctatatttggttccctaaaacattagagtaaaaaaaaaaaatggtaaaaaaaatgattttctcatgtttggttttaccatggaaaatatggaagaaaattaaatataattaaaattaataaacattttgtatatttttaaattatttaatttatatataaaagagttatatccgtaaaaaagaattaaaataatatataaaaataatttattatttttaaatttattttttattttttttctttctttttttcctctttattttctttctctcacattttctttcaaactatctgggaatcaaagatagcctaaatcttccaagaaccaaccatagggcatggaagcttttatgacaaaaggcaaagccccacttgcaaaaggcatgatgatccatacttgaagccatgttcatcatataatcagcactgaacattgatatttcttggttttaaattgactgttcatcaaaggatgattttcaagtgattattttgatgtctttcatctcttgtccaataattgcagaaaggtataaatattgaattcaaggaagctga

SEQ ID NO: 99193 - DNA, 713 bp, Vitis vinifera
  Intron number 1 from transcript GSVIVT01019304001 (locus G SVIVG01019304001) derived from phytozome v7.0 (chr-ID chr1 5; pos 1564592 to 1565304)
caaacccatttcacccttttcccaattttggtggggtaaggccctctctcttctcttttctacgttcttttttcttgattttttgtttaattttatttatttattgctgtttctgggtttgattactatgttttttggcacctgttgttgtgtgtaaccaacttgattaatgtttttgtttccgtttatgcactttcatgactaatgatgataattcttttgagtttatccatgggttgatctctttctgcaaatatggaaatttgaataggttgtaatttgttactagtcaagaaatcaacaaaaccatcacaaacccacttcaccaatttcctaaatttggtgggtgacaactcttctcttttctcctttctgttctctttctcaagaatatgtttttcttgatttttttttggggtttttgggttagttgaatttctacttattttcttgtcacctttcatggtgtgagacgttgattaatttttactaaaatttttctttgttttgattttttattttgttttttgggatgagtttagatgtgtggatcatatgttggttagacatacttatattcctttttggtggatttttcttttgtgcgttgagattttattacctatttttaggaaccaagcaccaaaagggtttgatgctgattttgatttattttcctgaagctttctctgcaaccaaacaaagaaagttgc

SEQ ID NO: 99194 - DNA, 371 bp, Vitis vinifera
  Intron number 1 from transcript GSVIVT01029753001 (locus G SVIVG01029753001) derived from phytozome v7.0 (chr-ID chr1 2; pos 14189964 to 14190334 reverse strand)
tgaaaccgcagctgattctgcaacccaagcacctggtagattgttcatcattgcctttattctcaatctttttttctttttttttccttttttgatcttgtttataatgtccgtttcgttcccgagaaagtaccggaaaagaaatggaaaatttgaaattaatacaaacaactgagcttaacagaactgagaaacccatatgccaaactgatcttggaacaactattttgctcagtgaagttgagtttgtcattttaattttttcagaaatagaagtcaactgaatgaaaattcatcttctttcattttttttttcctccttggtcttattggcagccgtgcaaatcagcggtgaagtttggctagcttcc

SEQ ID NO: 99195 - DNA, 741 bp, Vitis vinifera
  Intron number 1 from transcript GSVIVT01018946001 (locus G SVIVG01018946001) derived from phytozome v7.0 (chr-ID chr4 ; pos 18458132 to 18458872 reverse strand)
tcctgggcggattgggcttacgaaaagttcaccgagtaatcatcttcatttcccctcaatctttcttcatctcaggatagagtcagaacccacagacattatgaaaaaatgttggcatacttttcttcaggtcgttttttactttcgtgacagtgaaatagggtgaatagtcatctctctctttcaacaaatttgaagatattttccttcaaacagcatttgcatttaaaaatcaaatgataggatttgttgtacatatgtttgaggatgaatgaaatattgatgtgatctaggtaggaaaaaataagggaaaataataaaggccgtaatacacaaaggcaaagggagtgtgccatgccatcctattgccccgcgttacctataggcccatttgtagaaagcagacaatggaatacaccaaaaaaaaaaaaaagtggacctggagaacccacaatccctttaatgttgtgttatctttcccttggtggagagccacaattgaaagggtttgcttgaaaaaaaaaaaggaaaaagaaaaattatttgccaattaaacgacaagagatgtgatagatgatgaattaaagccatcctttgtggatcttgatggttgagaacatcattcgaaaacgtacaagtctgtgcatgcttgattctagttatttctaaatggatgacgaagaccttttgacggcggtggtttcaggggatttggagctaaacaggagaacgtaaaagaag

SEQ ID NO: 99196 - DNA, 471 bp, Vitis vinifera
  Intron number 1 from transcript GSVIVT01028027001 (locus G SVIVG01028027001) derived from phytozome v7.0 (chr-ID chr7 ; pos 3277346 to 3277816 reverse strand)
gctcctgatctctccttcatccaccctagcgaaaggttcttaaacctaatcaatagaaattcatcttcattgttagggcatacttttccctttttgtctactatgtttggttgccgagaaaaaaataaagtgaaatgttttgccttagttactacagttgcaatgcaaaacgtaagattcagtattttttttattttaattattttgttttcttttcgtcggatttctcagctaccaaacttagctcagcgagagaaaaagaggctaaattttgagaagatgtcctgatgtagaatgttaggagttttagaaatgaagtaaaatatctacatgcttcatgtttgctgtggattcatgttttacttggtttctgcttttaggtattggcaatggacctttgattttcactattggagttgaatatgttgtgatgcagggatcttattgagaaggtcattaccttaggatttt

SEQ ID NO: 99197 - DNA, 554 bp, Vitis vinifera
  Intron number 1 from transcript GSVIVT01026892001 (locus G SVIVG01026892001) derived from phytozome v7.0 (chr-ID chr1 5; pos 19611176 to 19611729 reverse strand)
tcagttggcccaggagtggagaatcgttccaaaaggtaactctttccattgaaatgcagtagaatcatgattacatcccccaaaagtagtagaattttgatttcttatttctgatttaatcaaaatatattaactaagatttgagtctgataataacataacttgctattttgttaattaatagaaaaatgggagttttgatgtcatgagtgaattttgctaatatgatgattccattcaaatgttatttacttgaaaacaaattttccattagttggaagatggagtcctgatcgagtttctgagttaattagggttttaattaacagaactgttcaatttagttctaggcattatggtgagtaaattgaatggaaattaaatttaatttctaactagctgtgagcttttctaaccagtttagaagattgtaatgcaatttgaaatcaaaactgaatgtctgtgaagcacagaaggatgaatctgtaaccgatgatggagttgttttgctatgtgcagccttgaggagattttttcatttaggttctgatctc

SEQ ID NO: 99198 - DNA, 333 bp, Vitis vinifera
  Intron number 4 from transcript GSVIVT01027236001 (locus G SVIVG01027236001) derived from phytozome v7.0 (chr-ID chr1 3; pos 17807530 to 17807862)
tctaagtgcagagcaagttttgaacctcataagtactcttcagcaaaatgtgttctaagttttgtttcttgtttctctacttgaatataagtacatgttctgtttcttcttgcgctgactaacagtactccttgtttggacgggtttaaactgcataaccaatgtgattagtttaatcacttgacaatatccaagaaaatgaatgacaaaacatcaaaatatccacaagcacattgcagactttatatcaagatactgaattcttcaaatgcaagcatttggaatttgtttgttgcaggagctcaaacatttccgaatatatcatcctggtgg

SEQ ID NO: 99199 - DNA, 603 bp, Vitis vinifera
  Intron number 1 from transcript GSVIVT01030390001 (locus G SVIVG01030390001) derived from phytozome v7.0 (chr-ID chr1 2; pos 5162643 to 5163245)
caggtaatttgagtttattcagaattatcagattggggtttgtttaattattgaacaggaaaagggagaataaccagattggagtttgtttagtaattcataatttcttagatgttgttcaaaatgtattgcttgaaccatgttgcttggtattttaatggacaatgttttatatttaacatgcttgtagagagacaaaaaaattattttaccattcagttaagatagtactgaactcttagttaagtattcagttgcaacagatgcaattttttttgtcattgtatttatgatccatgacttacccttgacaggggtcattcctctgatcagtggaagcagacattatgtcatactctgacatgaataatggtggtcaagattgaaactagctaaaatcttgacattgggacatgacattgtgttgaatggaaaataagtgtttatccatgtatttgagtttgtgtctctgttttgcatggagaaagacatcctgaatctttacttgatctttatttttctagttctgcactggtgaggaatttttctcaaggaagataatctgataaaacttcttcttattaaaaaacaggaggcaatcaa

SEQ ID NO: 99200 - DNA, 372 bp, Vitis vinifera
  Intron number 3 from transcript GSVIVT01022278001 (locus G SVIVG01022278001) derived from phytozome v7.0 (chr-ID chr7 ; pos 18118443 to 18118814 reverse strand)
aaggtattccaacttgtcatttgataaatttctttatcaaaattcaactaaaatgggaattctagttttgtactcttctacatagttagagaaaacgttgtttgtgagaaaatgattatgttatattgtttattatactgtccttgccaaaacatgttagcagttggaaaattttaggattttggtggtcatgttacatgagttttggtttatgacttctttggtgaagtttgttactcatgttttatgtttgacaaggcctggcatttgtctggtggtgtgcatgtctggatcttgacttggaaatatagaattgctggtccttgacacaaatctcaacaattctatttgtttatttcttctttcttcaga

SEQ ID NO: 99201 - DNA, 458 bp, Vitis vinifera
  Intron number 1 from transcript GSVIVT01022278001 (locus G SVIVG01022278001) derived from phytozome v7.0 (chr-ID chr7 ; pos 18119017 to 18119474 reverse strand)
cctcggttggtttttctccttttatttctttctttttctccattttgtcttaaatacataggttaattgattatgggtggtcatttttgaaacttggttctgttttcctcattttcttgggcttttggtcacgggtttagtctgattttgtgtcaaaagtttttggttcttgttatgattggcaattacaaattttggccctttggcttttattttttatttttatttttagtgtttgattcccggtttagttgattttgagattagtttttagaaatctctggatcttggtttggtttattttgtatctatgtttcaaagaatacttgaccgtcctttgtatggttttcatgggattcacaattgaagatacaagggtttgtttctattttaatgatttatgtgaccatttgatatgtacagttggctgcaaggatcgttgtttcaaatctgcataa

SEQ ID NO: 99202 - DNA, 514 bp, Vitis vinifera
  Intron number 2 from transcript GSVIVT01029556001 (locus G SVIVG01029556001) derived from phytozome v7.0 (chr-ID chr9 ; pos 21636179 to 21636692 reverse strand)
gctctgtggttcagtctcatttcaacaagggcctcgtgagtataagacattatttctttttggatgatgaaatctccatattttcttcagtttttttttttttgttggtacgaatatacaacatggtacgaccaatgccaatttagtgccttttgttgggctgactgtagttgttctataaaccatgtttgcacaataacttgagaggaattttggatgaaaacaaatttgagctgtttctatgcacatgcacatgttctcttaatagaaagtaatggagttatttattgtaagaggaaatgtttatttcccggagaggttgaccttgtaacaatcataatatgcatgggtgttaacctgtggtttatttggtctattgtgaagtttgctattattatcactgaatgatcttagccattgaggtttcacagatgaaaaatacttgaagttgttattctggggagtaactattgcttattgtaaagtgtactaacatttcttcttttaggtgcat

SEQ ID NO: 99203 - DNA, 743 bp, Vitis vinifera
  Intron number 2 from transcript GSVIVT01021163001 (locus G SVIVG01021163001) derived from phytozome v7.0 (chr-ID chr1 0; pos 2052286 to 2053028)
agactggtagtggaaaaaccacccagattccgcaggttctttttctgtttcatttcttgaattttttttttaaaacccttctatcgttctttcccctcctggtaacttgttaccgagaaaagttaaggcaagtatttcgatacaagatgaaaaaaattcactcaaccaggtgtaatgcagctatttagcttagctggggtgaggttttcatttttgtggagataacttaaaatttgagaattgaaactttctttgccatttttgacctgacttggttttatcatatacccaaatggagggaaactgtacagtcataccctcaattggatctcatgttcccctttgtaattgagacaatgtttaaagttattctttttgcagcatcttcatactttatttgaaatgtttctattttgtgtttcactttgcattgaaacaagtcgataatctttattttgattacatttgaaatgagttttgtttattgcagatttaatggccattctttagtttttgggaactgaaaaccgttaatttgtgctgtccaatattatagaaagcagatagcatgacttaatttctaacggaatggccttgctagccttaatcccacttggttttggagttaatctttccatacagaattcaattttgaaaatcactgaatggattaaatttggacaatattaaatctttttatcttctgatgatactacagtacctcaaagaagcaggttgggcag

SEQ ID NO: 99204 - DNA, 1006 bp, Vitis vinifera
  Intron number 1 from transcript GSVIVT01020634001 (locus G SVIVG01020634001) derived from phytozome v7.0 (chr-ID chr1 2; pos 3636939 to 3637944)
caattttactcaaggtatattaacttgtttgaccatttttctgaactttgtttgagaaagagggaaaagtaagaacaaaaatattaagacaaaatttataagtgaattttgcatcagccatattgagttatcaccttaattcttcttcccattgtttgattaaaaagagatcaaataaccccaatttgtaaatctaattccccatatttcttcatgaaaaatagtcacttttgacaaaaattccatcaatttttttcttgtaaaaataaggttatatttggaaggtgtgttttccaaaataatttttaaaaattattttctaatatttcgtaaaataaaagttcgtttgaaaatttaaaatatttttaacttatgttttatatttttaaatatattttaaaagtaacttgtatatatagtgtatttttaatcattttaatgtttatattttttttaaaaagaaaataagtaaaaatgactaaaaaattattttctaaaaagaccatattttctgtttttaacaacataaaaatattttctattttctagttattaaatagtttcttaggaataaaaatgttttaaaaaataattagcatgacctaaattctatgttaaagcttataagcaaataactgaaatattgaaggaaatttatatatatatatatatatatatatatatatatatatatatatatatacacataaaaaaataaaaataaaaacacaggagaggttagagtaacaaatttggtatcatttcgtattaaccctgagaaagaaatataaaagcaattatagttgtaaacctatgtttggaacgagcatgtggaagtcgtacatttgataatttattgctgaaagacgtcatggatgaagtcatggttttgatccttaagaatcttcatgccaaatgtataggcaatattgtcatacagttttaaggaaattaaagcttctaaccctttcttatcatgacccaaataacaagcagtggatattac

SEQ ID NO: 99205 - DNA, 605 bp, Vitis vinifera
  Intron number 2 from transcript GSVIVT01020133001 (locus G SVIVG01020133001) derived from phytozome v7.0 (chr-ID chr1 ; pos 10002817 to 10003421 reverse strand)
ccagcaggtgcgcctcttcttcccttcttctaaatttatctggtttgttttgtctatcaaaaaaaaaaaaaattatctggtttgttttcaccattttggattgggtctcgaagctctctttcaatcgttttcggaattgtttgagtctggcttagttgaatttggattaaattgagaccaatattccacttctaacggactgaggtaattaattttccttgcgtttcggatgctctacttggaattttggaggtatgaggttatggaagctaaaatgattgctctgttgtgcaagaaattaattaattgaactagttcatgacttcataaaaagaaagaggggaaaaaaacctctggaatggtgtaaaaatattgcatttcttgatgcgtggaatgagttctcagactagatacaaaacataaatgcacctcagtttacaaactattaatggatatgctagtgtgtattggagatgtcattcaaagaatgaaccattttttttcctttcttaattgacttgcttttgccatttcatgcctatattcatgcttaaaagttctatttggcagttcacagtcaagagcagatctattaacacttggtt

SEQ ID NO: 99206 - DNA, 631 bp, Vitis vinifera
  Intron number 1 from transcript GSVIVT01026984001 (locus G SVIVG01026984001) derived from phytozome v7.0 (chr-ID chr1 5; pos 18825925 to 18826555 reverse strand)
gtatcgtgtggtaagaactgttatgggtttaagcttttttttctttctttcaaatatttattgcttggattttcatggttttgatttttggagatttgtttctttgagcttttttggtggctgggttgagaatttaagtgggttcttatgagttctcatgatctcgttcaatcgctgtgggaattttcgtggttttggctctttttgtgaatattctattggtggagggtttttttttgcttatcgtttaaaaattgaagtgggcttttgtgaattttgaagatcgtgctgaatttctgtagaaattttgatttttcttgtggtccatatcctggtttcttgattctgtgagatgttgatgttttggtttaggtgagaattttaggatatttctctgtatctatagaactagaaactactgagactattgaagttaacaaactcgtagaaaaggaattgagaataatgggattttagtgttaagaggggtactggtgagcatttattacatggatgatctgcttaagggcacaatagaagctacacaatttcatctaattgacttcatttctctgttttatcaacaatgtgaaggaaacatgtgttttttttcctttccttcagcgctgcg

SEQ ID NO: 99207 - DNA, 1031 bp, Vitis vinifera
  Intron number 1 from transcript GSVIVT01024451001 (locus G SVIVG01024451001) derived from phytozome v7.0 (chr-ID chr1 6; pos 2742640 to 2743670)
agcagtttcatcggagaaggaagaccagggagaatgtaagaaaattgtactttctttggttgttgttgttgttgttgttttttcttttaaagcaattgttctgaattctggaatttgggtttttttttctgtcttttaaatttgatttctgagactagggtttcttttttgtttgtttctttttctttttttctttgtctctcttaaatttgatttttgattcaatatatgaaataattgttttgatttctggatttttttttcccaaaatttgttttctcagtctagggtttttgattgatttgtaatagggttctttaaattggttcttcttttgatttctgaaatggggggtttacctaaatttgatctatgacatttctgtaatgggggcattttgtttttatgatttatttgttcctggtttgatttccaaaacaattattttgatttctgaaaacagatgttcccttgaaattgattcctggatttggttttttgcttgatatctgaattagagatttttctttataactcttttggtgatgggagcattttgatatctctaattctttataactgaattagagatttgttttctcagtctagggtttttgattgatttgtaatagggttctttaaattggttcttcttttgatttctgtaatgggggcattttgtttttatgatttatttgttcctggtttgatttccaaaacaattattttgatttctgaaaacagatgtttcccttgaaattgattcctggatttggttttttgcttgatatctgaattagagaattttctttataactgttttggtgatgggacctttttgatttttttttaaatccttttataaaaaaatttgtttcttaataatttttttgatttcagaactggggtgtttctttctttcaaagttgttttctgtgtcctttgtttcttttaattgatttctgtaacatgggccttatgttttgaaatccgttttacagttggacagattcattcccaaccgatcagcc

SEQ ID NO: 99208 - DNA, 625 bp, Vitis vinifera
  Intron number 2 from transcript GSVIVT01025605001 (locus G SVIVG01025605001) derived from phytozome v7.0 (chr-ID chr8 ; pos 13662116 to 13662740)
tatttttgccattggagaaaatttaactccgagatgtaatctctaactactactttagtttgaattttttgttttgaattttgggttttgcaatgaagcctgtacttttagtttcatctgccgattacattgggtttggttgaatatgggtggtaggttacaagtttcttggtgcatagaaattggcttagttgatgaaccctctttgttccaccaaaatcgttggtaaacaaaagagagtgtttgagattttgtttgcttttgatctgttgatccatgagtgaagccattgagcgcctcataattcagcggaaaattgtttatctttatagagtagctttttttggtgggaggatggggggaggaccctaacaaggattgttaaaaggagtttggattggcaaccattgaaccatttgtgttcacactgttctatttgatcttacatctataagcaagcaagatttgagtgatgataatttatataaatcatttatttgcagatggcttcattctttcaacgacctgctatcttctgttcttgtttgatctaatattcattcataacttggtgtgactgataccaatgtttacctttatgattgcagacaggattatcagcaag

SEQ ID NO: 99209 - DNA, 924 bp, Vitis vinifera
  Intron number 4 from transcript GSVIVT01024039001 (locus G SVIVG01024039001) derived from phytozome v7.0 (chr-ID chr3 ; pos 1561093 to 1562016)
aaaaggtttgatctttaatttcttagctaattgtggtgttttctatttgcaattgcatattactaaaaaaaatgagtacttggtatcctttattgtgataactattttgctatatttgttgcattttgttggtttatttgaaaagtagttgaatgggtctatttatgcatctgccatctttgatcttattataatgcggtattcttaatagagaatctgcatatctttcactcctcagtcttctgtttgtctccattgtttatatccatggggtatttggggaacctgttaaatggggcaatttggtttctctttttgctgattgtataatgaaaattatttgaaaaaactaactgattgctactttggcaccagagtcttgtcatattgtattcagtttgtgatcagctgccttgtttcgctatcagtcaagcaccctattaacctgttctcatttttgcttatagtcttgtttattagaactttcagcttgcatagttagttggtttgctcttcaactaaatgtcttgtctctgtccatccccaagtttgcacccatgcatcttgagtaatttgcatttcagttgcatcgttccgtctttgaataccatagaagttggaagcaaaaacaagttaattatgcttgctattgttgactaagtgttgttgtgataaccaattgagaagtctggttcatgtttatttatgtaaatggtcttgcttcaaccttaacaagtcagcaattctagtaggtctgtcagagatttactttatttatttattaatttactttgattgagttaaaatgatttggtcttaaattttgaacttggagaagttacaccctatgtgttccatatgctgtagtaatggtgtacaatcttatggcttgatttttttttcagggttaagaagctgacaaag

SEQ ID NO: 99210 - DNA, 715 bp, Vitis vinifera
  Intron number 2 from transcript GSVIVT01024619001 (locus G SVIVG01024619001) derived from phytozome v7.0 (chr-ID chr6 ; pos 8321137 to 8321851)
gcaaaggtgtggtttcgtttttaatttaactctgacctaattttgaatttaggttccgtttggttagtgagaaaataaagaaaagaaaataagatgttgttttgaatcttgcatttcgtgcgctttatttaatgagaaggtgaaaacctcttaactcagaccaaatagttattcgtatagcattttcttaatcttttgtttaggactctgaatgttactgagaaaattaagagaaggaaaatgaggtgttattggaatactacatttgctgctgttttatcagaaagtgaaatctcttatcttaaccaaatggttacaatgattatagcgttctcataaattttcatttagctttcatttggttttgaagatgatcatagaaaagaaaatgaaattctatgttgcagtttggttcatgataaactgaaaatatcttaacttggatggttgtgactttaagcttatcttcatgtaacattttctcatttttcatttatcatccatcacaaattgacacagacaattaaaaatttttcatgttcatttccttttattctcataaactcctaaaataagcacaaaaaatgcataaggagagatatgtgcttatgtgattggcatgagcttgcgagaattgcaataggtgacactcagaaggtgcagtttatgatggtaatctttgcaggtccaaaagttctaaagcagataattttgg

SEQ ID NO: 99211 - DNA, 636 bp, Vitis vinifera
  Intron number 1 from transcript GSVIVT01027717001 (locus G SVIVG01027717001) derived from phytozome v7.0 (chr-ID chr5 ; pos 7052443 to 7053078)
aatcaagatcaacaccacttccttggtatagtaacttttgattctcgtcattgagtcctgaagaatttgaagaaaaatatgaagaatttgaagacaaattatggaggaacacctcaattcattctgtgattttttttttaaagcataaataaatagcctacagatatgagacaattccggaatggaatttcccttacatggaaagtgaataaactcttacatgggaagtgaataaactactcttacatggaaagtgaataaactactcttacatggaaagtgaataaactaccttgctagaattactcctaaatcaattataataaaggctgtacattacactaattagggaagtaaacagaggatgctggcttgatttccaacactccccctcaagccgcgttgtagatgttgatcattccaagtttttctgtcagatcttcgaagttaactcgagcaagagcttttgtgagaatgtcagccgtttgacagtttgtcggagtgtagctgactttgaaaactccttcaatcttttccttgataaagtgtcgatctatctccacgtgcttagttcgatcatgatgaaccggattcttagcgatactgatggcagcttgattgtcgcagtataacacc

SEQ ID NO: 99212 - DNA, 792 bp, Vitis vinifera
  Intron number 1 from transcript GSVIVT01029561001 (locus G SVIVG01029561001) derived from phytozome v7.0 (chr-ID chr9 ; pos 21550375 to 21551166)
gctttggccctcagcctcctcaacgggacaacaaggtaccggtttgttattattatactttaattaatgtttgcccacaaaggaaaagtgaagcaataattgccagagtttcaatctttttgttcatttcctttgtcttcttcctgcattttcttgtcaaccaaacagagcctgcccaactctattaatcgttcaaagtatgttgggtggtctagttagttgtgggtttgagtttgtttcttgatttttttggaaaatccagataagcgatacttgaaaggaggagaagtttttctttccttttaattttggttatttctcaccgaccaaacaaagcccaactttattcatggtctgaattctattggatgaggtagctagttgtgattgtggtatttttttgaattcatttcttgatttattgaattcccggataagcaaagtcactgcttcaaaggagaagttctcgatttccttttatcttttcttgcattctctcatcaaccaaatagagcccaactctcctaatcgtccaaattctgtttgaatgatgtcattagtagtggatttggagttgttttaaatctatttttttattttttgaattcccatatgggcaaagtcaccaattttaagcaggagaagttttccatttgattttatctttcttgcattttctcaccaaccaaacagagctcaattataccaattgtccaaattctgttgagtaatgtaattatttttggctgtggtgtgttttgaattcatttcttgatttttttgaacgcccag

SEQ ID NO: 99213 - DNA, 772 bp, Vitis vinifera
  Intron number 2 from transcript GSVIVT01029561001 (locus G SVIVG01029561001) derived from phytozome v7.0 (chr-ID chr9 ; pos 21551185 to 21551956)
tcaaaggagggcaagggtggggtgttgcaacaaaggtatccaaaatgggaactaaagtttattctcttgctgatttttttttttttttttggcccttttgcatttatatatatatatatatatatgtttgaaattttctgcatattttcatgatctcttgtttgaataattgacctgaagattgattctttttttggttcaccatctagtatttaccaagatgtggtttttcggaaaattttgcatcaacatgtgcgacacttgttgagcaatgtatctagagaacaaaataaagaaagaaaattaatgtccaaaactaaagcaagacaactgatgttcaagcttaatgaaaatttgatgaaaatagcccgtgaaaatatatttgatatatgacatcgggagtgctaatgagacaccatattaacaagatgtcctttgtcgatttttacttgctgtaaattattttgtggtttatttccttctttggaggccaaaaaatggacaaaaagagctgtcctttgggcattgaaatcctaaataactagcaaggctttattgtatcttgttgttaagttctactcatgttgcagaaggattttccttttccttttcctttttccttttctttcttgataaatttgcttagttgggtgttctaaaaggtcacttgcacttttatgatgtaattcttttattgtgattgtagtactttcaatcattgatgtcaatcaatgcaggaaatctacatctaaacaatctggctctgtaccga

SEQ ID NO: 99214 - DNA, 1023 bp, Vitis vinifera
  Intron number 2 from transcript GSVIVT01029510001 (locus G SVIVG01029510001) derived from phytozome v7.0 (chr-ID chr9 ; pos 22112920 to 22113942)
caggtgatttgatcccatctatctcaagtcttgatatcacaacagatatttatctgtcatctgcgtcctagattgcagtttttcactgaatatacatgtcttccatgcacacatacttctcgtttacatagtctagctacatagcttttcttattttgtttcttttttttttattattggtgatgatttctatgaaaaattgaacccaaaaaagagcaagagaatcttgttttcacctccaaacaaatcaattgatcattgttcttgcacaaccaatattcttaaaagtttaaatttgtagggtttggacacacaaatatataaactttattcatttttgcatatagtctcatattttgcaccccttcaattcattttctagctccgccattgctcatgcatgtgtagcctttgtttttgggcttacacgtaggcttaataaattggaaaaagaaacatatgctggtaaacacttgacctgccatcgaacgaggtgaccatatgaggctcacctcccaccaaatgaggctatgatatcataaggaacaaaagaacaagatacattggggaaactactagtgggcgattttgggtcatctcactccaaaagttagctcaaagggtgagacatccatcttctacaaaagatgtggggaaacccaccaatactcccctcacacatccggccctaggttaagagaccatcaaccagatagtttgataatgagagtgtgacctattgtacaactgagttttgatatcatgttgaaaaaccaatttcctaaaagattaagtttataggatttggacccataatatatattatgcactaataattgttatacctattttgattctaagagcccctcttagcttggaacaattgtataaatagaagtttggtgttgaggttaatttaccttttcttttcttttaaacttgttcttcactaactcccatttcgtttggctgaaaaaaaaacctgcagtttttgagagagaagaatttcaaacaaacaatacc

SEQ ID NO: 99215 - DNA, 415 bp, Vitis vinifera
  Intron number 1 from transcript GSVIVT01029388001 (locus G SVIVG01029388001) derived from phytozome v7.0 (chr-ID chr1 7; pos 15994933 to 15995347)
ctttgccaggtagttttccatatggtttattcccttgtttccattgtaactaaagctaacttgaaaacaattttctattttaaagaaccaaaaacagttttctaacttttcaaaaactctttggtgaattttggattgcggtggttttttgaggaaacaatcggaaacatcaagattaagacggaaaattttgtatttttcataccccttaagcgaagaatagacccaacccagaaaactgtttttatatttgagtttggagtaaaattttgttcttcaaaacaacataaacaccgtctttaagaagtgttctcaaaaatagatttttgaaaacgttgccgaaacacccaaagtttctgtatgtcaaacttgacttgtttttgcatttagattcgttgggagcgggagaaggttg

SEQ ID NO: 99216 - DNA, 761 bp, Vitis vinifera
  Intron number 2 from transcript GSVIVT01030146001 (locus G SVIVG01030146001) derived from phytozome v7.0 (chr-ID chr1 2; pos 10289986 to 10290746 reverse strand)
agctcttaaaacagagaactcgggatctgtatcaagtgaacatgattctagataacttgcctgcaatgaggtttgccaagcaaaatggggttaacatccaatggactggatttccagttgggtatacgcccccacaaagtaatgatgattacatcatcaatcacctcaagttcagagttttggttcatgagtacgaggggagtggtgtggagataattggcactggggaagaaggtttgaacgtaatttctgattctgataagaaaaaggcatctggatttgaaatagttggttttgaagtttatccttgcagtgtgaaatttaaccctgaggtgatgtccaaacacaaaatgtatgacaatctcacatctgttagctgcccaacagaaatcgaaaagtctcaaataattagggagcaagagagggtatcattcacttatgaggtcgaatttgtgaaaagcaatattaaatggccatctagatgggatgcttatctgaagatggaaggtgcccgtgtccactggttctcaatcctaaactctctaatggtgattttttttctagctggtattgtgtttgttatatttttaaggacagtgcgaagggatttaacgaggtatgaagaactggacaaagaagcacaagcacagatgaatgaggagctttctggatggaagcttgttgtgggagatgtgtttagagaaccagattgctcaaagctactctgtgtaatgattggtgatggggttcagattacaggc

SEQ ID NO: 99217 - DNA, 706 bp, Vitis vinifera
  Intron number 2 from transcript GSVIVT01028167001 (locus G SVIVG01028167001) derived from phytozome v7.0 (chr-ID chr7 ; pos 4360562 to 4361267 reverse strand)
ctcagctgaaacggcggcctcaatcggacgaaaaggtcagtttttttccattggtaaaggttttggccatggttcatctattagctgagttggtttggagaatcacttggatttcaggtgaattcagggtttagatgtagtggaagtcgtccagaatcgttgatttgttaactttggtgctgttgaagttcatgtctatcatggctctctagtggaaacgaaaatagtttttgactttttcagaagcgaaattaatgaaagtgcttccctttttattcattttttatttctcattatttttaagatgaaagtgctttccacctgtttttagtgtcattttggctgattctgtatttaaaattcactcctgtgtgctagtcagctaaaaggcattgcttataatcttttggagatgttagattagatcagtggcaggttagaaactaaattctgcaaaaaatgatatgaaggaatgtgtgagttcagtaaagtgaataaatagttaaaaaacagtgggcataatcagttattgctagttgaccttacctgaatgtgtgagttgatcatcttagatttttcaattagctatgctatgttaatgtttttcatcatttctatcttcttcagattaccattagggtatggtttctaataatttgaacattcttcaggttacttggcagtggcttccttttacaagttctgc

SEQ ID NO: 99218 - DNA, 879 bp, Vitis vinifera
  Intron number 1 from transcript GSVIVT01019637001 (locus G SVIVG01019637001) derived from phytozome v7.0 (chr-ID chr2 ; pos 2127259 to 2128137 reverse strand)
ggtaagcttagacctcaagttttttcttcatttttcatctggggtttggttattcatggtggaatcacactgaccctacgctcgtgttgtttgtttgatacgggttagatctaggttatccatattttttgctaatgttagtggatctgatcaatgccgtttgtctcctcggatctagggcttgaattgggtcgcaaacgctccttttcttccttcctttcgttctttctttctttcttttctgatgaaatgcaagaataggataattctctgcgatcctctcatccccttgttgagaatttgagggtgagttctgagttttctgactctactcaactaagccaagtaggtgtattaagttggctttagtctgggttttcttggtttttcggggtgcggaaaagtttggcagccttttaaattcaaattttatattatttttctgacaatttcgcagaggaatcggtgttcttgggtgtcttttgatgtttactatcaaatgaatgtgcggtttgttcaaatgtatgcttgatctggttggtttctttttcctttttcataataatattattttagtaacccatttctttccagataaatcctttcaagaaaggcttcattgtgttttttgcttgttgatccctctttggcctttacgttatgctacacatggatttttatctagttgctcagaacttaatttaatgggtgctataaattgcaacatgctgaaagtagtatctatcatcatgataatcattaagaactggttgagttgaatataattgtggggttagcttctttcttgattccatttttttaaggttgtactgatttatttgattgtggcaatagctggggactggttgcagggtcctt

SEQ ID NO: 99219 - DNA, 915 bp, Vitis vinifera
  Intron number 1 from transcript GSVIVT01021587001 (locus G SVIVG01021587001) derived from phytozome v7.0 (chr-ID chr1 0; pos 7492956 to 7493870)
ttcactggccctcaggagctcaacctcatcattgcgtatgtattgcatttttctttctattctttctctttgtgtgtgaatgtgttaggtttctctttgttggccattctcatgccaagaaaaatgctagggttttctcattcttcctctgcctatttcactccatatggtttgtttcaagtcttgattgtagtgtttttttctttggcttgcataatattgttggatcgtttgcttcgtttctgcaaaaggattataaatttttggttctttatgtggtttttaattagggtttactaattttcgtttaaactattattttttcagttcttgatcgatttaggaacaattcgtatccatcttttggccttcccatgttttgttgttaaatattttcggggaaatttttccaagaaaacaaataaagttcaagggcaaaaatttcttcactttggaagaatatttatcaagattaatcgaggtgtaaaggcgtagggttctttcattttgggggaaatttttttgatgaaaacttgatgctcgacaaccctttagttaaactgcttaattgttcctgaactttttgggcctcttgcgaattgcattgacagcaattttcatggacaatttggtttttagtttatgtcctttgcaatgtcaaatggttgtccaagccaggaatccgaaaaggagatttgctgacctctttcacactacgttgaaagtgcaattcacttgtcactaccagaagggaaaaatttatggcattccatatattttcactatgtatctattttcttatttctttaatatttggttaccttggcagtagttatcatgtttctagcaatttatgtatggagtgcatttttaatctatcaacattttatttacaatacgatctgctgtcaggaa

SEQ ID NO: 99220 - DNA, 651 bp, Vitis vinifera
  Intron number 1 from transcript GSVIVT01030177001 (locus G SVIVG01030177001) derived from phytozome v7.0 (chr-ID chr8 ; pos 10824532 to 10825182 reverse strand)
agggttacccacctttcttcttgccgatcgtggaggtgaccttttcattacttttccctttctcgattagaattagttttttcttttaagcttgtaaggcaacttgtctgaaaaaggttcatatattgctgtcggcgggtgtgagtttatcttattttaatgaccgctactgcaaattcttttggttatgttgttccagacgaatttgttgtctttgtatgttgtgtgaattccctaactttgcagaactgagatttgtttgcttgaatagagaatctcaacttttgatctttgatgtttttaattggtgaacatgtttctatggagattaagttaaaatcttgagtggtattcgatctttgcaaatggatttcatttgtgaaaatttgtctatactaatttgtttatgtgcttttcttctgatatttcattttcgtgattttgggattattttttgcttggtgtaaaagaaaatgcaaatactggtcactccttaaaccaaatattcctaaggcagctgaaagagttttgaagggagacttgcatgcaatggttttccaatgtgtctttatattgttctggtctactggtgaagtgcattcttatttttgagattgctggttttgcagattgtttcttcaccttgaaggc

SEQ ID NO: 99221 - DNA, 956 bp, Vitis vinifera
  Intron number 1 from transcript GSVIVT01022846001 (locus G SVIVG01022846001) derived from phytozome v7.0 (chr-ID chr1 2; pos 18792026 to 18792981)
cgtcaattaaggctgattacattacgcgccaacaggtgatgcttctttgtccaatttaatagtcaaaatttctatttcaatttgggttagtttcaatcacatatgtaggtgagtatgtgtgtgtgtgtgtgtgtgtgtgtgcgcacctatccacacacacatgcaaaattttgaagttatgcaggtgttgcgttaagattatactgattgaacaagagaaatttttggttttgggtgactggaatgagcaatcatcttggaaatctctagatacatggaaattgaagtgtgagatcaggttgaatgagttgctagcttgttttatttatgaaagttgagttcatgtgctaggaatcagatctctcaggttttgctttcttggggctacttcactctgtttctgaagtgaaagattttaagatgctccccaacaaggaggagtccaattaggcttgtaagaggatttaaaactagtatggaattcaactattcttagcatctgaccaatagagttctccatcaattgacatgtagaatctttattgacaattgattgagaaagaaaagccttagagctaaatttatgaaggggctcaatttatcaattctcaaatatattcctagcatgtgtggagatccaattccctatgcaatgagttagggcatttaaaatattggtggggaactaaaaaatacccaagtcctatgttctctaggtcacttggtatagccaaaatagtgtgttgactgatcctgatggtcttcaatgatgcattcaaggattgagttcagagcatgctggatcacattggacatctgagggaactctgactaacctaactagatcttttaatggatcataaaaatgctaaattcctaatatttcttatattaaatttatgtaaaaccttcaagttgccttctgaatgttgctatatttttttaatgtcaggcaa

SEQ ID NO: 99222 - DNA, 916 bp, Vitis vinifera
  Intron number 3 from transcript GSVIVT01025064001 (locus G SVIVG01025064001) derived from phytozome v7.0 (chr-ID chr6 ; pos 4824600 to 4825515 reverse strand)
ccaaggtgagaattgaagaatttctttgccacttgtcaaattttgggctttgtaatttgatttttataattcatattgatgggttgatctctaacatatataaattatttttcttcttccataatattccttcatgcagacaacactatatgctcttcaaataatttttatctttaattttctattgttttcttcatgattttatatttttagttattttcaacagcaatcttgcaatggtattcaaaattttaactccaaccttttttctttcggaattagttttgaatgaactggcaatgcatactcaagattaggttacttttgtgttggtcttagcttacaatgattttgccttatttgcaaaaactataatactggagggatgtctttgaggattagagtgaatattacagattatcgatgccgggtagtaaaaataattgttggatatctcatttttgcaatatttgctatctgatttctacttctaatacaatagaatccccattcttgtacacacggatttaaacctatagccctgacaataatttggcacgattagactatgctgttagccaattgatatacagcatggggggcttgatttagtgtttgtattttatgtgaccagtctataggggtaggttttgaactatccagtatgtgtaggacctctccatagacatgtcaagaagctgaaattgtttatttatttatttattttttcatgttgtatgcacagcctgtatatgttaattgcttcttggacacattagagtaagcatattcctatacctgaaggtcaagttgttctgtcttgtgagatgctgatgaatcatgtattaactagccatctaacacactacctaagcttccagttgttggtggattggactcgaggaaacaatctcat

SEQ ID NO: 99223 - DNA, 413 bp, Vitis vinifera
  Intron number 2 from transcript GSVIVT01022246001 (locus G SVIVG01022246001) derived from phytozome v7.0 (chr-ID chr7 ; pos 17811002 to 17811414)
aatcagtatccattgaggaacttgttttctgaaatttgatttatgtttctgaatattggttgatttttctcatttccccgtttcaattttcacaagaatcatagctacagtgcccgttatcatatcaaaacaaaagaaaaggtagaaatggtagctgtgatgatatgattataggggcagaagtggtggagccactggagaaaggtgggggctatggtggttgtatgattaagaccacttattatctcttcaaactaagtgatttcatcagtattctttttcgggttaactactggcatcctgattttgagttatggcagtgatccattcttgattcaggaaaatgggtctggttcttttacaagttctgcataagggtctatcatgttttgccattaacggctaacccagat

SEQ ID NO: 99224 - DNA, 486 bp, Vitis vinifera
  Intron number 2 from transcript GSVIVT01023539001 (locus G SVIVG01023539001) derived from phytozome v7.0 (chr-ID chr1 4; pos 10040343 to 10040828 reverse strand)
tgtttcaaggcgattgtcggcggaacaggcactgagtaagtttcagttggttattcttttcgtttttgagattttggagtttttgttttgattttggtttgaagatgccggagagttcaaaccatttctctggtaaagcgttttccaagaaatgtttttgttgttaaaagtctaaatatttcctagaacctgttttctgttctttcttacttaaacctctctgtttggttgctgagaaaaaggggaacaaaaaacccaacgaaatgattatgaaaccaagctaccttcattttttttttggtttcaagcacaagaagcgccaatgattctcacgatttaatctttcaaaaattttcattgatttccgggtgatggatacattttctcagcaaccaaacaaaggtcaagaatgcccgtttgtggtgcattggtaaagagttgttcaattagtgacaagtggttgtttggtgaacatgcaggacaccc

SEQ ID NO: 99225 - DNA, 665 bp, Vitis vinifera
  Intron number 1 from transcript GSVIVT01027463001 (locus G SVIVG01027463001) derived from phytozome v7.0 (chr-ID chr1 5; pos 16541469 to 16542133 reverse strand)
ggtccttacgtataaaacttctctctttctctctttttattaagaaaagaaaagaaaaagaaaaggaaaaaatggaaggaaaatacattgctcaaaattgtacatgataaagaaacttcaagggagctgctaactgataaccagtcaggaaaacccacatctttctttctcttgctctctctatgcggccactgctaggtcaacaacatcagcttattcaatccatggcctctcatgttttagggttcgggagttgttggtcaaagatgaaggcaccgaccctcattgtatcgagtgctcccttttgattctctgggggcctcagagaaagagaaagagagagagatctggatgcgaaatcggaaactagctaaggggaggactgctactttattacaggccaggtatttgatatttcacccacaattctttagacccacttttaattttcatataacaaggtaaaaattggaggtgggtcatcatggagtttgggcaagaaatgaaaggtttttgtgataaagaagaagaacaggaggaggaggaagaagaggaagaagaagaagaggaaataatgggagaaacgtgtaaggtacccttttcttcttcatcttcatcttgtgcttctcctatgtacaaaggcgttgctccggagccatataggt

SEQ ID NO: 99226 - DNA, 1035 bp, Vitis vinifera
  Intron number 1 from transcript GSVIVT01028412001 (locus G SVIVG01028412001) derived from phytozome v7.0 (chr-ID chr7 ; pos 7318373 to 7319407 reverse strand)
ccgaggaggctataatacccggatttcttcgaaatgttggtaaccctggtttcacaatctcccagattctctgctttttgccttgtttttggttttttgaagcatttcttggatgaaaatgtcgttttattgcaacacttccttgactgagggtttttgcagcgtattgaaagtgtttccaaactctgaaaccttttcatttttattttttccattttttttgtttatgcgaaacaatatttcaactctgtttcgaaaaagaacctataaaaaaaaaaatttttttaaattctgtttcgagtgttttttatgcgtttggaagtgtttgagtttcatttacatgtacattagtgttgtttggcgactggagttcctcttggaaaactgcttttgacttaggctatgtttggctcccggaaagtttgatgaaaacgcacggggaagaaaatacaaaagaaaagtagaaggaagataaatagtgtattaaaaattttaaaattatttttatttgctatttcaaattcgatttatttataaaataatttaaaaatgcagtttttaaccagttttaattatatttgattctatttggtatttttcatggtacacccaatgagaaaatcatcttccttatgttcaccaaacataaccttagtggttgtttgattgtggaaaagctgaggaaaaggaaacgaaaccctttttttttctttttaattttttttttattgttgtgatttttgtgatggttatttgtttatttataattcagcgggaaggtcgattggaggcttttagtctctggaaaactaagaaaaagtagatgagaaaaccttgatatatttttttaatgtagtttggttgaagaaaatggtgaactcaaaggttagcaatgattgtatgacatgtttaaagaggtccatatttgaaaacgtggttactttgattttctaccttccagattttcattcttagtctcgtccatctgaactgtttttcttatttttattatttgggggcaattttcaggttttc

SEQ ID NO: 99227 - DNA, 708 bp, Vitis vinifera
  Intron number 1 from transcript GSVIVT01030398001 (locus G SVIVG01030398001) derived from phytozome v7.0 (chr-ID chr1 2; pos 5227540 to 5228247)
caatacccggtattgtgtttttgcacttgggttgtgaagactgcaatgactaccttgttttgcttcactattctaaagcagttcaccttctgagcttgtggcagtgttaagaaaaattagaactattctcatgtgcagttcaccttctaagcttgtggcatctagttgaactaatcaatgaaccctttgatcagttaggccctgactttcaggcattaataaacctggtgcaaactacacaacctaatgcaactcaaattatacaatttcttagaatggtgggtcatctgccttgcctttttcttttttgataggcaagaaatttattaacaggcacccaacaagaaaagggatcacaccgtgtacaatggaagcatacaaatgggccataaggctgaaaagaaagggaaaaatctacatatgccccctcctgcctatacattatccaaacaataaatgaaccctacatgagtaaaatatacaaattcatttgatgccattgagtttgccctgattcaggtttgtttaacttgctttatgtaatctagtggctgctgagcatttggtttcaagaacatttctttgcatggatacatagattcacctctcttttcatctccctaacatcttactcttaatttcaaatttcatcctcagaatttaattttattagattttgcagatttgggcacgtttacaacaatcagc

SEQ ID NO: 99228 - DNA, 135 bp, Vitis vinifera
  Intron number 2 from transcript GSVIVT01027486001 (locus G SVIVG01027486001) derived from phytozome v7.0 (chr-ID chr1 5; pos 16407588 to 16407722)
caggtacttttattatgattttgttttttctataaatttagtatctccaaaccaccattattcatcgaatccaactccagtatcattcaaatgttctcttcataggtatctccggagcaggcacaactacttgcc

SEQ ID NO: 99229 - DNA, 989 bp, Vitis vinifera
  Intron number 1 from transcript GSVIVT01024323001 (locus G SVIVG01024323001) derived from phytozome v7.0 (chr-ID chr1 6; pos 892698 to 893686 reverse strand)
tggtcattgtggtgagtctgtgttattgttatttccttctctggttcgaattgggaggcatatgtcgttttctcggcggcgaaacgcggcattgttgcaggcttggttgtcggttgtcggtcgttgattgttgattgtttctgactcggtggttttcaggttcttagtggtctttctgttgcctatttcattgaaaattatgattttttttttgcttaaattttttctaggcaacaagaaatggcattaagaatcagtaaatgtgcctctttttgcgctattgctttaccaatgtgaatgaaaaaaaatggattttttaataattttgtcgataatcaaacagggcgttaagattcaatttaagattggttgtcgtttggctgtttaaatctggttctttctatgtttgctctgttgccgatttgaatgagaattgtctctgtgtgtgtttttatttttcattttcttggcaaacaaacacagtattaggatttaaagtttatttttgtttgctctataatttttattctatttggctacgagttcttgccattttaagtgaaatatgtgaatgtcctccattttcttggcagccaaaagtagcattccattgattaattctgtttgttctgctgccaatttccaggctaaatttcacatttttggtcagcctgctgagaggaaaaaatgaatttaaattggttttcgtttataatattttcttggtaaccaaattaattttggttcttttgctttataatgttttctctgtggccaatttaaatgaaaaatgtgtgttttttttttttcattttcttggcaaacaaacagaatgggatttacgattgatcgttatcattctgcttctattgttttaccggttgattgttgtttcatcgattaattctgtttgttctgctgccaatttccaggcctaaatttcactctttggagtctcaaggcctgaagttttctttctgaaagaagag

SEQ ID NO: 99230 - DNA, 429 bp, Vitis vinifera
  Intron number 3 from transcript GSVIVT01020647001 (locus G SVIVG01020647001) derived from phytozome v7.0 (chr-ID chr1 2; pos 3483704 to 3484132)
caagtttactcaaggtatgcctaagtttctcttatcagttactaactttctcaggatctcaaagaatgagaaagatcttttttaaatatgtaaagaatcattttagaaaagagagccaatttgaaaagaatttccagtattttttcttcctattattctatgtgagatttaaaaaacaaaatcagtttgtattccttgtccgtaaattatggttcaaatatactaaacattatggctcaaaaggcgtaccctatgaaaaggagtcacaatttatggtgaataagagaaaatattggggaaaatgagatcaaacacctaaactccactggccttaccttctcttcattcatcatgtgccttatagttggttttatccatccctacctaattaaaatgtattttaaacaaatgacaagcagtggatattgc

SEQ ID NO: 99231 - DNA, 848 bp, Vitis vinifera
  Intron number 2 from transcript GSVIVT01028260001 (locus G SVIVG01028260001) derived from phytozome v7.0 (chr-ID chr7 ; pos 5008901 to 5009748)
ctcaaaattgtaagtagaaactcgctacagtctagtatttcttggtaaataattcaaaaccccatttagattttttttttttctactcctcttcaatggccaagacttaaaaaaaaaaaacaaaaaaaaggagaaaaaagaaaaaggatagaaccaattctcttttcctagaagtttttgtgatgattagatagatcttctcttcctaacttcttctgaaaaattgatcctttgataaaatacagatagaagtccccacacggacagctaactggtttcctctaatctcaaccaaagctgatttcatttcaattataaatttgaagacagggcaatgcattattaattagtaaattttcattgtcttttttgcatgaattgaataatgacatggtctttctgaaccgaaatctatatacttatcccatcaaacatatgtgccctttttttttctcccctttattgtagtttagaattttcaactgggttggtttcaactggtacatagtctacatgaaacagatagacagatccagtgaaggtcctaatgttatatggtttttaaataatggagtagacaagccctacatttgaggtttggtgacacatttctttgtattattttacattatcatgtatcaagtaggatcggaaaagggcaaaaaagaagaaagaaatggacatttcccaatttggagtccatctagttttcaatctattgtttctcaactacttttaggtaattgaagaatgttagagcctgtccattgtctactccatattccgttacttacaagttgagttgattttcagcttccagagtcacctaatttcaaggtcagagtgtc

SEQ ID NO: 99232 - DNA, 598 bp, Vitis vinifera
  Intron number 2 from transcript GSVIVT01027125001 (locus G SVIVG01027125001) derived from phytozome v7.0 (chr-ID chr1 5; pos 17631076 to 17631673)
cctacattgctccaagttgttttggtcaacccaatgtaagtcttcttaaactttatttgacaatgttttaaaaaatgctttagcctataaaatgttttacaaaaaaaaattaaaatttagaaatcactttcaaaaagttaaaaagtcacttatagatattttcgaagaaatatttgatagataattctcttaatactttttttaaaaattaattaatgtttcatgtaaaacactctcaagaaaaacacttcaaagtacatttttagattgtgtttgataatatttttactcagaatgtttttaatgaaaacatattctctaaaagtattttaagataattatctatcaaatatttctccaaaagatactataagtgattttttaatactataaataatttttcatatttttaaaagtgtttcccaaatttaatcaaatacttaaagacaaaaatgcttcttaaaatcattgtctaactcttattcatgaaacataaacttttctatttcttataaattattagccatttttagtacagtaaaaatggtggttgattcaatctgaatttgagtctcttgaatatctattgcaggcattg

SEQ ID NO: 99233 - DNA, 1047 bp, Vitis vinifera
  Intron number 2 from transcript GSVIVT01028877001 (locus G SVIVG01028877001) derived from phytozome v7.0 (chr-ID chr1 6; pos 17882616 to 17883662)
tatttcccgcaggtgcagttcttaaccctgtgcgtggttacttagaaatgtaggggaagcaaagatattacagctgtgaatcttgatatcttcctgcttttgtatatagttaatgcttgttcttatttattgtctattgaaatgaatggtagattaggttgaccaatactttattaaaatgtttcttaaaagaacagctagttatagttttggctcttaaaaatttcaatatgggcattgggattagccagttttgttttattttttaattaatatggaatgaccatagaggcttttgggtgcattttgagcgttctcgatattattagttggaagcttgagctagcagtctcaagttcaatcttctttggaataaccagtgagttgttgtcttgtttggtttttataggaataattgagagaatagaggatattagataaatgagggtctgtttggtaactctttttgtaaacaattctgaaaaccagtttttgagaatcattttcaaaaaccgttctttgatattttatagaataaaagtttgttgggaaacctaaaatgtttttaaccaatttttaatatttttaaaaataatttttatatctagtattttatttttaataattgtatatgtttgtataattattttttaaaacaaccctaaaaaaacaagtcaaaataactaaaagatgttatctgaaaatgctctattcctgttttctgtttttgaaagaataaaaaacagaaagtagtttttgattgccaaatgtgtttttatggttttttgttctgaagaacaaaaaactattatcgaaaacaatcatcaaacagatccctattttctgctgtttgatagtagctttgtgcaattcctgtaaggctacagtaccttttagtaatgctcttcctgattggcagttaaattaccagtgataagcatgctacagaaaggaagaaggtgtgataggcatttccagttgtttgatgtctttatcctgttttccattgcagtttataccatactcatttattgaaaaagaagcaag

SEQ ID NO: 99234 - DNA, 1026 bp, Vitis vinifera
  Intron number 1 from transcript GSVIVT01021831001 (locus G SVIVG01021831001) derived from phytozome v7.0 (chr-ID chr1 4; pos 6773465 to 6774490)
ctctccctctcctctttctccttctgcattcaggtactttctttttctcttctattttcttgcattttccttctcaattccgcatttcccccctcttcattcactccagtttcgcactacttttcaagccattttacttcatataaaacggaattacgtgtttttttggagaaggcgctttaactggagccaaacagttctccctctgaggctcccgtgagtgacgctttcgttttctcatgtcctgaacagtgaattttttttgagattgaagatttcctttcgttttctcggcatccaaacggagcattgcttttttttatggagtttgagggtgcatttgccgttttcagtgtctattcagtgatttacttctctattatcttttttccttttcctttttctaatttttctcttgttagaagtgatgaatctgcgtctcggttaggttgtttgtgatacatgttgtggattttctctgtgatttcattttacacaaacgctcgattttaatatgagaaatctgtggtctgaaacggcttcattagtttgacatcttttgcttatgctgttttctatttgctgagagaatgtgggataagaaagaaaaatgatgacttggaagattggattttttcttttctactttgctctgtttcccgggcatgaaacttatccatttctttcattcttttgttaaaatttgtgtttatgtatacaatgtggcatcatagacttgtacttttgtttgatatttggggaacttttatatccttatgccatatagattccattttcagttgttttgtttgcatttaatagtttttaatgaaatatattccaatttattctactgtgaatatgcatttcttgggtagcttcatttatgattcgcttgctttctttttcgttgttcctctcaaaattttctcatgtttacacacatttgagtatttttggtataacagatgattttgtgaatgtgtgataggactagatccttttggtctatatctgagaaagggg

SEQ ID NO: 99235 - DNA, 1046 bp, Vitis vinifera
  Intron number 1 from transcript GSVIVT01026938001 (locus G SVIVG01026938001) derived from phytozome v7.0 (chr-ID chr1 5; pos 19240403 to 19241448 reverse strand)
cgaagaagcctggctgcgagaacaacttcgttctggtaagacgtcctacttcgatccacttcattctcgtctttctttttcagctttcttgtgctttcttaggtctcggtttggttgctgagaaaacagagagggaaagtggaggaaagtgaattttgtaatttttatttttatttttgttgttctgatttttaaaaggttgagagaatttgacacgatgagctaattttgctttctggtgcttttcgagtggccaaaacagtgtttatgagtgacgaaaaaaattcagattcctaggcttgattcctcttcttatacttgcattaaccaaacgaggccttgttcttctgtttgattatttgttgtttaagctggtgtgagtggaacgtaattttgcgcaaatattttttggcttttgattttggactttaattgaagcgtgtgttcttcatcttttccctttttgggttgaagtatgatttgcggtttgttgattatcatcaatattcctcactacttggactcaactttttggtttgtttaaatactcagttgttttctatttttggtgcagcgtactgaattctgtttttgttttccctggaaaattaatttagaaagcatggctttgtttatatatatatatatatttgtggtttagttgttaatccttcaggtcttgtgatggatgatgatttttcaaatgttttaatttcagaaacagacttcctaggtaatatttttttggtggttattttccctttttgatggttattttccctttttgatgctatctgagttgctgcaagatttgaaatgtaagagcctttcaaagccaattgtatgtgccagacttttttttaaaagaagaaaatgggtttagataaagctctagccatactaagatgattcttgtggaggaggcatgaatatgttgagccatttcttgttttattaaccctttgttttattccacaaggagaatctgtaattgtactcataatccgctttgatttcataggtaaaagtaccaacttgggttgatc

SEQ ID NO: 99236 - DNA, 979 bp, Vitis vinifera
  Intron number 1 from transcript GSVIVT01023894001 (locus G SVIVG01023894001) derived from phytozome v7.0 (chr-ID chr3 ; pos 2618141 to 2619119)
attgccaactcgaaaatatcaccttcactgctaaggttttttttttttttttttttatatgaaattttctttaataatttttttttagctcagaaaaataaaatatgggatcctatttttttgttgttttagttacttacaagcttagtggtaatgaattttctcgggaaacaaacgggctgtcggttaatttctttctttgtctgaacctccgtgatgatgcccggagattaggtattttgaatatttgaaacccgcgctaaagaggaaccacgcagaattcccgaaaccctttgaaaaccccgttgggaaatcttgatgctttaaaaagcttcaaaaccttaccaaataaggccagggatggttgatttttttgtgcattttgtttttttcttgttttttggttactttgtgggatgagttctctgctgattcaatttcatttgattgaatgccctaattcttatgaaatagttcataagaattttgaggaaaaatcgtattgaaagagaacctcctcagggttataccgatattagggccatcttaattgatatttagggcatagttatgcttattcaattctcattttcttttcctaaatcttctaggtaataatcaggacagaacaggaattaaaaaatgctggtttttttttttttttcgtaccagaacgaccatgtgaaacaatcaaaatggtgtttcactctctccacagatctttctatggaagatattcattttctctttattttttataattacagaataatggatgactgacaatgagctatgcatttgggctcatttacagagtcgaactttggcatacatatctgtgtgatatgtgtcattaaatctggcatgaaatataacattgtactagttttaagtattatggaactaacaaagctctggggcaaaatttctctttattaagccttttttctgctgctcacatccttctctcatctatagg

SEQ ID NO: 99237 - DNA, 877 bp, Vitis vinifera
  Intron number 1 from transcript GSVIVT01019631001 (locus G SVIVG01019631001) derived from phytozome v7.0 (chr-ID chr2 ; pos 2101107 to 2101983 reverse strand)
ttatttctaaagcatttcaggtgaagaacttcatgaaattttcttgtagctatgctctgttgtgtggtcatttgttctctctgatagctggttagaggcctaaagattaaataatcaaaggaggggatcttgaaaatgaaaatgagtaatatttaccctcctgcggttggcttctgagaaaaaggcaaactcaaacctcttcttgatcttccaacagaagaattataaatgggagaaaccttaattcaatgcagctaagtaatatagttgtattgttcgtagggatggaaattttagttttctcatctgaaaaacttttgaacttaatgaaattttcttgtagctgtgctttgttgtgtgatcatttgttctctctgatagctggttagagacctaaagattaaataatcaaagtaggggatcttgaaaatgaaaaccatttatttttgccttgtgtttggcttctgaaaaaaaaggaggaaatgaaaagtaagctcaaatctcttcttttgatcttccaacagaagaattaaaaatgcgtgagagaaccttaattcaatgcagctaagtcaaatagttgtattgcttgatggcatggaaattttagttttctcatctgaaaaactcatgatctattattgttttttaatttcattggggaaatgattgatactgagcttgtccagtttgcagaagtgaaaaggaatgaaaaatggattacctgtgaatctgtccttttttctttctaaatgaatgggctatttggtctgttcttttgatgcattggctatcatcttattttgtttgtaaccctgctagaagctttggccatatacatatcctgactattttctaaaaaaatgaacttagggaagac

SEQ ID NO: 99238 - DNA, 434 bp, Vitis vinifera
  Intron number 2 from transcript GSVIVT01028390001 (locus G SVIVG01028390001) derived from phytozome v7.0 (chr-ID chr7 ; pos 6994950 to 6995383 reverse strand)
aggtataccgacaaaggaaggaagctcccagaagggtaatttccctctccaacaaagcatgcagaagtggaaaaaaaaattgaaataaaaactaaatttatgagccagtttgaatatgcatatatgcaaagcctagtggccccatgctagcgtattgcccacagaagggactcttcaaagttcaaacctagcctgcgcatgtattacatttttgtaaaacaaaccatttgaagcaatcccattcccacatcggcaatgaacaaaaacaatcttcaaagaaaatgacacccacacaatgacccatgtggctttcaagaggcctttagttatggaacggccgggtctgatttttaaaacattgttttacataaccatttaatcaccttaaatcaccttgttattttttaatgatctcgaattttcagcagaaagag

SEQ ID NO: 99239 - DNA, 605 bp, Vitis vinifera
  Intron number 2 from transcript GSVIVT01027878001 (locus G SVIVG01027878001) derived from phytozome v7.0 (chr-ID chr5 ; pos 8932948 to 8933552 reverse strand)
agaagcctcgttggccaagtacgtatcagttatcatatgcatgaagaaaaaaggattaggaaaacgttctcttcaagttaacccaaaggttgtttcagaaaattaattcacatagaactagcatgaatgcatgatacatctttcatttatttctttttctaccctttagatggtggtggcattttgaatttggcaatttggttcacgcatgggtaagggttttaggcaatgagcgtgtttctgtggtgtttgttttctgggaaagttttataattttaggtctctctatccctttcgatggtggaccttttactgttttccttttaggaagcttctttggcctctacgtcaagcacaacattttcataggcaatttcaggaatgactttcacagctgattaagcatgaattgatgatccccgccttgtttttctgcttcgactctaataattgtctgtttttaaaatgatttctgcattttgaggctactcagaaaacagaaaaatcccatggctgtataaaatagaactcagaatcatgcatgcccccgattcaatgtttcaattgacaatattttattttgatatgttgattgaattgaacag

SEQ ID NO: 99240 - DNA, 1034 bp, Vitis vinifera
  Intron number 4 from transcript GSVIVT01023718001 (locus G SVIVG01023718001) derived from phytozome v7.0 (chr-ID chr1 1; pos 9953343 to 9954376 reverse strand)
cttggagtgatcaagcatactgcagaaagttaaaggtttaggcttctcttcctgcactttttcggactgagttgtgacccaaataattttcttttcttttaaaataattgttaatctaattctttttccacacctcactggttacgtggataaaattttattattaatttttttcctttttttctaacataaatgacaagacccaacccatattcggatattttgaattatatgcattttacagaggaagtgttttttatattttatgtattaaaaatattaaaaatatttgatagtgattttaggaagtatttttaatttttctaatactaaaaatataaaaattttcaaatattagaaattgtggaaatcatttttagaattattgtcaaatacacttttaaaatacgttttaaagtaattctaaaaaatatttttaacatttttaacacttgaaaattttatcattcaagtattaaaaaaattaaaaactatttttaaaatcattgccaaaaggacttttaaaatatatttaataatatttttattcaaaatatttttaataaaaatattttctctaaaattatttttaagagaaccatctattaaatatttatatatcccaaaaatattataaatgattttttttaaaaaaaatcttccaaattttatcgaaaatttttatttattcaaaatcagtctattttaagacgggccaaaactgttttgagacaacaaacttttgttttttccttgttcttttcttattgggtagtgcccggaaaattttaaatttggtgtaattgtgagaaggttggaatcactgcttcccgcttgaaaattttcagaggtctttccttgaccatatactcgtaaatctggcattctctcactttccaatagcctctccctcttggtttgaatacaattttacagaaatcttcttggtccatttagttaatgtgtggagtatgcttactttttacctgtgggtttcagttgtggtacgccctcgcaaagacgctaaccgagca

SEQ ID NO: 99241 - DNA, 1055 bp, Vitis vinifera
  Intron number 1 from transcript GSVIVT01023108001 (locus G SVIVG01023108001) derived from phytozome v7.0 (chr-ID chr1 2; pos 22479404 to 22480458)
acgtgtatctcccagagtacagctcggacagactggtaatcagctctctttgatgcccttgttgtatagaagatattccacattttctaggtctcggttctctgtttgcccttttctttgttgggctcttgaaaggttaatgcatggtttgtagctttgaatgtttaaaaacatggtggctttacccttgtgaggttgactgattgtaggatttgtaaattttccaatttgtttgcttatttgactggcattttggactttgatgatggcatgtgtttttgagttttgataggtttaattagggtaattttaatttcataagccattttgtatagggaaatgtagtattatgtaaaaaagaaaaaagaataaaaaggcagatcatgcattattcataggatgagattgtctagtggagttatgaataccatgttgttgtggggctttcaggagatgactgcgtagtcttcatagatgtcggattgaataatggaacaaacaagaaagaaagaaataaagaaagaaaagtcaagagaaaagaatggataatcagggttggatatgcctctggtgacgatttgtcaacaccaagtaatttaccacttcatgtacgttggagttcgacattttgccttgaggatacatggtccttagtgtctagttctttgtcctgactatggagacttctctcctaagaatacccaaccaatcggtttgaggttttgagctcctcaatgaaagctacttttatgtcaaggtgatttggttgagtgttcaagtgacatttgacaattttcggaatgcaagaggtgacacatgtggtaaccaaaatacccacttgaaaaatcaataagtgaaatcatttaatgtacaacagcagtgtacatctttgaacccacaagaaatgatgaaaataaagagaatagaaataaagggatcccatataatattggtaaacataatctattattaattgttattatgattgactattttccgctgacttgcctactttattgatcagctcatcccaacagcttttttagggcacttta

SEQ ID NO: 99242 - DNA, 984 bp, Vitis vinifera
  Intron number 1 from transcript GSVIVT01021973001 (locus G SVIVG01021973001) derived from phytozome v7.0 (chr-ID chr1 4; pos 4861738 to 4862721 reverse strand)
attggctaccaggtcggccaccagctctccgaacggtatgctgtctctctctctttctctctctaaaccctataccttcaccttctgtttcattcttttcttatcatttctgattttctacttgtgggttttcaagcactggatctggatattttgtgccaggccacctcaatttttgcaatttgtgttgaatctgatcttaggtgccacccgagcagtgttgcttttactggtagttggaaatttggggtgtttctgtggaaataagaagaaacagaaaaaaacaaaaaaataatcaagaaaagatccagaaaagaggaggaactttaacaatgaaagtgatttaaaaaaaatgagaagtttctaatatgttgcttgtttccatttttgaaaattagaattattggaaaatcatattcgttttagccactgaatagctttcaattttctcttgcttaattgagaaaccagtaaagtaggttttgggaaaatgccaccttcttaattggcagtaggtccagaaattcaacgctgaaatttcattgtctgatgaccacttatgaagaaaatatctgctgaggctcaaagttccctaaatttttttggtttgaaacgaaacaacgagatatgaaactcgttcttgtaaggtgagaagcggctagtatgagaccaatcttgctatgcctgcctggggcagaactcaaagtgagccaaaaccagtgtatgaagctaacattaaaccagggtattaatcagcatccacaatccagttttggttttaaactatggttgtggattcccagctctttctttttggttgtcaaatattttttttgacattaaaagaggggtgcaatgcaagaactttgtttgatccagggagtgatcatatatatagccccataatccttagacttccttttttctttttttttttgtgtagtcataataataaaaaggtatttttttttttttagatatact

SEQ ID NO: 99243 - DNA, 925 bp, Vitis vinifera
  Intron number 2 from transcript GSVIVT01024169001 (locus G SVIVG01024169001) derived from phytozome v7.0 (chr-ID chr3 ; pos 624944 to 625868)
ccagtgcttctgggcaatctcagaaggtaatgcttttcagactatggcctttttgggggtctcttttactttctgtttggttgccgagaaaatggagggaaattgggatttaatttgggtattcttaggtttatttttatttgtaaacgggaatcacaattggctaagtcaaattgaatttacctctgtaaagtagatttttttttttcttttttttttttttttttggtttcatgggctagaaatttttgttttgttgtctacttccctacattttctcaccgaacaaacagaatgttaatgattgacttttcagacattgtagtttctgtcttaacttggatgaattaactgttgggttggttcgaactaacagcctttttgcatgatatagattactgagaccgtttttgtgctgccaatctcaaaagtggtagtgtcctttatatgtctatcttggttaatttttcaatttgtgattgaaaactcttcatatgtttacttcaatgcctaatgacattgttctcaaattactccaaattactcggtgagaaacctctttgacaggtgtttgcccaaagttggacaagatgggtgaggctactagcattttgtttattggctccctctgattgttagacttgctccatctaacaaatttgttttcttcacaatttaaatgaatgatactcatttggcataactttgggttgtggccaatcattggtctaacccagctattgggtgagtcttgcttcactgttgcaatctagggctgcacatttggtgtagcatgaagggtagtttttgacatggaaaaaatgttcaaaattttcccagcttcttttttggcattcttgggtaggatggtgttggttccttagggacttcattgaccttttatggtttgttgcaggaaaatcag

SEQ ID NO: 99244 - DNA, 646 bp, Vitis vinifera
  Intron number 4 from transcript GSVIVT01019390001 (locus G SVIVG01019390001) derived from phytozome v7.0 (chr-ID chr2 ; pos 251752 to 252397 reverse strand)
gtgatcttgagaagtattttaacagtgaagggaaggtatatgccttctcaatgttgtttttagatgtgtgtagcaaatgaatttgccattactttatattgatcaaggtttgatgagtcattgatattatttgggaattactaggatcaggcttggtatagtggctaagaagtgagtaccaggcttctgttgattgatatatttatgcttcattgctaaatatttggatggtgactcatcattgttacactcaaaatgtattggattgttcttttgctcttatcatacactatgatttcagaaaattataggacatttaggctctcagaaagaaaaagtggatgggaaggaaaaggctaaaaaacaattgaaaattgaagactcaggttactttcagcatattcattcctatctttttctctcatctgttccttatctgatccaaacaggatcttaagctaccagagaaataccttggattagattagtgggctacttctagtgttgattctgtccatgcttaaaaataagtgatttttttattatttgatcatttttgagtatttgtaagaaattgattataaaaatctcatggcaatttgttggtttaggttgttgagtgccatctggtaacagatcctcgcac

SEQ ID NO: 99245 - DNA, 867 bp, Vitis vinifera
  Intron number 1 from transcript GSVIVT01019700001 (locus G SVIVG01019700001) derived from phytozome v7.0 (chr-ID chr2 ; pos 2560365 to 2561231 reverse strand)
cccaagggtcgacctctttcattgcaggttcgctttcatcctaagtattttgtttttgatccattgaggtatctcttgcttggcttcagctttcaactgggttttccattttcaacatgctaattaagaaacctatggcaccgtgctctctctgtatttcgttttttaggcaccatgcatgaagttctattttgtcttcttatagaattggagtacggaagtattcttcttaataattagcatgtgttaatattcatccaactatctgagggttaaccagatatattactttgttaatcctttctagctataagatgaatttgtgaatgaaaaccaaatttgtcatgtcctaatataaacttataagccaacacgccccggcttgtgttggagaacagggtcatgcatctgtgatcaattgaatatgagctgatgagctgagccgagctgattaaaagccaacatacatgataaactcttttcagaggacataaatgagaagtgttggtttgcttcatccatatatgcgtggcaattaagcttcaaaaatcatgttaatctccatggctcgagtttctttacaagcctggagtagggcgtaggtaaaagaacaaaaagaaaggcctagcttcttgaacaaaaagaagaatccatggtcaataatgtcatgagtccaaactaaaaaattggcttttcttaatccctttagtttcttataaccgccagggtagaaaggtttccaaaaggaacagaagggaacaaaggaatatatataagaaaagagggaaaccgtgtatatttttgtggagacagcatctatgactgtgcaccgtgtttgctttacagactgtggagctcaaagtaagg

SEQ ID NO: 99246 - DNA, 659 bp, Vitis vinifera
  Intron number 1 from transcript GSVIVT01030106001 (locus G SVIVG01030106001) derived from phytozome v7.0 (chr-ID chr1 2; pos 9898143 to 9898801)
ccttcaacctctgcgattcagttctactattggaggtccgctactgaatctttcttcgttccactcagtggtttttctgtttggtttccgagaatattgaggaagttttggttttttttttaaaaaaaaggaacttggaagccttgcattttattgttttctttctggtgtttggttcctcggaaagtctacaagtcaacgtagttaagctggcgtttgaaccaaaacaggggaaaatgtgagcactgaatagttttttttcctctttccttctcctcgagtttcatgatcgggaagcgcagcttaaagcttcgattggaaattggtttcttaagtaaatatttgctagtttgatttaagcggattgaaattttgtttcttaggatttaaaccgagaactcttccagcgattgattattatttgtatattgcattcggttgaagattcagaactattgaagaactatggttccatagccattgagtgttggttgatttgacacttgatatttgtttttgaacttgaatcgtatgtgttcttttaatgatttagttttgcttttgataattcttttttgatgaattttaatttgtcatttctgcttatagcttatgttagtgttcaatcatggccaggtctacaggtgttcttttattag

SEQ ID NO: 99247 - DNA, 471 bp, Vitis vinifera
  Intron number 4 from transcript GSVIVT01030106001 (locus G SVIVG01030106001) derived from phytozome v7.0 (chr-ID chr1 2; pos 9899933 to 9900403)
aagaccagccaattgctgcagctagtcttggtcaggtgtttgctctgtgtttgtttatattccattctgttttggtccaaccttggagaattatgaaatgtttgttcattctatcttgaccttatgaagcttaaaggatattattttgccatgtggtatgatatcaagaacaacctcagagagaaactttttcatacaacaaaaggaaaaaattattcaagttgtaaatgaaaaagaaaaaactaatactaatagagggtagaaagttgtaaactccatggctagagcaatgaaggagaacatctacaagctgatggttgcatataagtgctgaatgatgaagttagactcttgataatttgaactgaccgataatcttggatattactatttccttcttgcaattttttgtcccttctgccgatttgaattttgaagagtccttttaggtgcatcgggctgtcctacata

SEQ ID NO: 99248 - DNA, 762 bp, Vitis vinifera
  Intron number 1 from transcript GSVIVT01034132001 (locus G SVIVG01034132001) derived from phytozome v7.0 (chr-ID chr8 ; pos 14953902 to 14954663)
gaactcgtcctcctcgtaacctaaggcaaactcttttctctctttctctctttatgcatcaattatgatgtttttttaccaaagtagtgtcgccaagcaaaagcttgactgaattgaaacagaactaactgttaaatcaagcaccgaatgatcagttcagtgctagtcggcaatacaggaggccatgaaattatttcattttaattttcttgtttgctaatggtagattgataaattaatgcagttttttcccatcatctgtggttggaaattaggatatttctagcttagtaatgcggaggtgctttggttgagcgtctttgtatctgacattttagttgcatatcatttggagaacttggattcatctggtctggcagggaaagtctagtaagctatttggattttggaatcataagccaaaggaagaaagaacccaattttgtttaattttcagcatttttttgccctccagcttcttatctttgaaatccaattagtctcgaagattttagatgttggtgatggcagagttgcaatatcacaatgctatgcggtgcaattacttttgtgaagcaaccctagctatggctgagtttgatatgctagacctaggttgccatgcaaaggcattttaatattcatcatgaaggaatggtacctatcacatgttcatatttgattgcatcactagactaaattatatgaatatgcaatttatttggtttatttatctgcgtttcttagtgaggaggagcgaaa

SEQ ID NO: 99249 - DNA, 659 bp, Vitis vinifera
  Intron number 1 from transcript GSVIVT01036374001 (locus G SVIVG01036374001) derived from phytozome v7.0 (chr-ID chr1 8_random; pos 4334085 to 4334743 reverse strand)
tgaatcttctacaactctataattttcaacatcacgtgcaaaaaataaagtaagaatcaacactcaatctgctatatatagctctatactttccatttcgtttatgtaattatcatgtaattaggagattgctagtgtatattttatacccttccacaacaggacaaaatacaatgcttccttaccctttttctcaaaatctctcatgtatcatgtcttcatcatcctcctttatttcaaatcaaaagagagagcctgaacttagtatccaattatttcactagtgctctagtttgatttcagtcgagccaagcaccaccaattatctcctatggcattcccacattattcctctggtctgtaacctaggtgtatttcatggtttccaaagtgatgaaaaaccagctccaataattgatgatggcaaaggaaataagagtgataatacattctatgcatcatgagttgttaacgatggtctacttctttcatggctccttggttccatgaaataagacacattaggcttgaatctcaatgctgaaatgacgtatccgctctggacttctcttgagtaacatcttctcccagtcatagtggaggaagtagttcatttgaagaatctattaatgatccttaaaaggggtttcggtccttgg

SEQ ID NO: 99250 - DNA, 574 bp, Vitis vinifera
  Intron number 2 from transcript GSVIVT01035323001 (locus G SVIVG01035323001) derived from phytozome v7.0 (chr-ID chr4 ; pos 468563 to 469136 reverse strand)
tctatttggcgagggaaaagagagtgagtaatctctattcaattgcatgttctagggtttgttgggtttgttcctttttgggtgcttgttggttttggctgcttttctatttccacttttaggtgttttttttcctgtttccctttgttcttttcaaagagaagaaaagagtagaaaaatataattttgaatttttgtgtgtctattttcaaaaactggaaagcctgattcaaatagtgaaaagcagaagactcaaacagttgttgaaacatattttctcgaagaccaaacagagaggttgcagttttctatcttctatcagtgggatttttctgtttcactctatcatgtggcctataagtacttgttttcattctgctctattctctatttattttccatggtgagaagaaaagaaaatttcaaccacatctcacagctatttggagtgggaattgtgcagactccaaatttttgttactaatttgaagtgggatatcaatcaatgtactcaatctaatgcattgtttctgaaacagagcaatcatattgtggccctaaaagtgctcttcaa

SEQ ID NO: 99251 - DNA, 851 bp, Vitis vinifera
  Intron number 1 from transcript GSVIVT01035323001 (locus G SVIVG01035323001) derived from phytozome v7.0 (chr-ID chr4 ; pos 469221 to 470071 reverse strand)
tggcgatcgccgcagagactcaacctcaggagaaggtaactgaagaaaaccacgctcacctttctctctctaggttcttgaatttggttaggatttttaattttttaaatttatttttggtttgttttgtgagattttgaaatctagggtttgaaattcatagtgttgtgcttatgttgttttgggttttcaatagttaatctcggattcagaaatttctttgattttcttgccttttctggtctgggaaaccaaacggcgggtttcattttggaatgtaaaaattgtggtttcacggctcgtttgtagtgcagatcagtgcatcatggaaacgcatcgatgagttttcgagtgtgggtttgtttgattggaaattttaggcttttagtgtggcgttttgatttgaaagtttggatttttagaatataggtttagggatcttctgtggataatgtcttatcctagggctggttgctgagagaaaaatgggtaaagagagaaagaaagttttgaatcttttggttcatattgttttggtttccagaatgaaagttttaccgaagcaaagggttcgggttggtgattccaggctttttgtcttcttggctgctcaaatgggaaaattttgaacatatcgatttcctcagcaaccaaacagagcttcagggaagcaaatttaagagttggttttccaaattttggtttttcggggtctgaaattgcttctatacaggcaaagctgggctgctacaatatctggaatactttttggattctttgtgtggctggtaataatgttctaaatgtagttaggcttctaattgtgatttcatttgtataggcttcttcag

SEQ ID NO: 99252 - DNA, 669 bp, Vitis vinifera
  Intron number 1 from transcript GSVIVT01035868001 (locus G SVIVG01035868001) derived from phytozome v7.0 (chr-ID chr4 ; pos 5061112 to 5061780)
gctcttgtttccgtaatttcgctgtgtgcttttgatttttttttttaatcttttttttttttcatggagtgtttggttgctgaggaaatgtgggaaagtaaatagattggaaaattccattcttaagtttctcattactaggacctaactctctttgtatccatttttttttttttactaaatggctgtttggttgctgagaaaacttgggaagaaaatggtgctgaaaacgtgttggtgttggtaaggtttgtgtatgcgtgcgcgcgcgtgtaaatatgctttttgaaattctctttggaataaccagtttctggaaactgtgaactattttgcattttcattttggtcttatgtttaatgttgtttgtgtttggttaaaaaggaataacgaaaacctcgctgaactaagcgaaatagttttattaggataaattgaatggatttggttttctcgatcttaaaccatgaaacttcaagattcaaaattttagtttattttcttttcctatctcagcaaccatatcgagcctaatgcttatacctgaaagcctttaggtcctctctcaatccccagacatgcatatccacacaatggatcaaattgattgaatttaggtgtttggttttacagaaattgaagtaacaaagacatcaactgttgcagag

SEQ ID NO: 99253 - DNA, 358 bp, Vitis vinifera
  Intron number 1 from transcript GSVIVT01038202001 (locus G SVIVG01038202001) derived from phytozome v7.0 (chr-ID chr5 ; pos 24309770 to 24310127)
gacagcccacagcaagtgagaagaaaataagaagaaaataaaaaaaaacagaaaacaaaacaaacaaaagcaaacaaagaatattctaaaaagtaataaccagaaaacaaaacaaaacattccaagaatcattatacaaattatcatgaggctatgcaaataaattctaatttttcaggattatttcttccttggcaaaacaaaagctcaaagctgcacaggacttgactgcagaattatttggcactgttgaggaattgaagagggaatgtgaaaaatcagaagttctaagagaaaattcagagaagtagattcttgaactatctgaagaaaacacaagtcagaacagggaaattga

SEQ ID NO: 99254 - DNA, 897 bp, Vitis vinifera
  Intron number 4 from transcript GSVIVT01032588001 (locus G SVIVG01032588001) derived from phytozome v7.0 (chr-ID chr1 4; pos 28605632 to 28606528 reverse strand)
gagccaattggagttgttgcgctgatcactccttggtattcgttaatttccttttctttggtcatctattcagtctcctttttctggatttatgctaaatttaagctttatgttaggcagaaaaaaaaaatcatgttatcatgtgaatcccattcgttttttattcctttaaaaccatacagtattgaatgaactcactaaggtttgtttcactttcaaaggtcttgtattggactctttaagtttgctatatccttgtatgtttcacttatctgctaattgttataaagttgcgacatgaatgcattcctgataaaatttctgctgcctgttcttgtcagtactctggatcattatatgcatcttgtaattgtaaagggaaatctgattactctatacagatgattaatatggaaattactatgatacttcggtttgattcagttgctaaacatgcattcgtgtctatgcatatccttgcataaatgctctttttattcaaatttcacactaatagctatttgaaaaaatttcccaatttgtgtgcgtgtgtgcacatgcacctgcttatatgtatttagttacataatcatcctggacgatttctgtaagacgcagttagtttctgtatttctatttaggttctattaaacagcaaggttgttataaaaggacttcctttttggttgtttaaccggttctagcttataagattgtgtttaaatcttggtgtttgtacttctaattctggttaggctctgagtcgcatatgtgtagccagttccaagtagtgttgattatagttgtgttggtgctggatacttgtaaataacaatcttaattcctcattaactatgatccgcattttgtgtgtactgaaggaactaccctcttttg

SEQ ID NO: 99255 - DNA, 363 bp, Vitis vinifera
  Intron number 1 from transcript GSVIVT01033798001 (locus G SVIVG01033798001) derived from phytozome v7.0 (chr-ID chr8 ; pos 17735200 to 17735562)
aagaagaaaccagacgcttggccacgattcgagaggtacatccaagcttcttactgtgtaatttactccgattggaaaaaaaataaaaataaaaaaaaggaatttgattgttcttttccgaagaaccgacaaccaaaaaataaaaaaataaaaaccacctttcttgtagatgctgtttattaattatggcgttttttcagttctagctacgcccaaaaaacccaaatattaattatcaatttttgtagtttggagtaactatggctagatttatatacaatttttaccacaaaagatttttttaaaaataaaaataaaaataatatctggatctattaggagcttgaagcgctggccgatccc

SEQ ID NO: 99256 - DNA, 926 bp, Vitis vinifera
  Intron number 1 from transcript GSVIVT01038108001 (locus G SVIVG01038108001) derived from phytozome v7.0 (chr-ID chr5 ; pos 23529908 to 23530833 reverse strand)
aagccaatcaacatcgctcaaggggaattgctcaggtatgaccatctcactgatatttggattttgttttgatggttgaatgtgttaatactgtctcccattctcttcgtttggtctctgtttcacctgtgtgtattgcatatagttataccattgttcatgttttaagatcactcaaacattcccaccagtttttaaagctcattgacaacccatggaatagagctattacttaatgggtattttgctttgtttgttcttgctctgttttttatttcactccgtttggattcctctgcttctgacatcgtcatcaccggccggcaacctccccctctctccctttcccttccctctttctttctctttccttccttttccacatcaccaccgcctccactgccagcgacccacggctgctgccgcctctcaccggtggcgactggtgccgcccattttcattgttttcaaaaaatataactaaaatttctttgttttcaaaaaccattttcatctcattttaaaaggtttttgaaagcaccctatcaatgtttttctttttccattttttgaactcgaattttccaaggaaaaaaaaaagaaaaaaaatcacttctaatgaatttttttttttttttcactttgttagacgcaaaattttccaataaaaatactttcaaacacttctaaccctcttaaaacagtctataaatcatattttacaatcaccatttccaaacagggcatagtatggattgagtttaattaatttcctcaccctatcacatattcaaaagtcgtcagtttccttaaattttgtcgtgacgtactcatgagtcatataaccctataaaaatcccaccaaggtttcaatcttatcatcccatttctcacatccttctcttcattcttttactcctccaggc

SEQ ID NO: 99257 - DNA, 905 bp, Vitis vinifera
  Intron number 1 from transcript GSVIVT01035748001 (locus G SVIVG01035748001) derived from phytozome v7.0 (chr-ID chr4 ; pos 3884685 to 3885589 reverse strand)
atcgtaggtatcggtaagtatccttctcttctccacatcattatggtacacagttgagaacatacaaaatgtaaacattgacctgatctacacatattttctttctagtttatgaagcgctataattttttctgcactagtgcttatgttcttgtatgaaatttgtctcaactaagtgtttttgtatgttaaatctatgtttaagtctctatccatagtccaagagttgtgttgtcttagaaaaatgacaatggtacttgcactttactttatcacctgatattccacatgtagcagagagaagaaatcaaagcaatctttttgcagtttttcctaacacaaatccacccgcaaactaagtattttcttaaaagaagaataaactttgtactttaattccatgattcaagttcaattgaaaattcttattcttttctatcttctcctgcacatggtcaaagaatgcctaaagcattttgcttttgatcaggtaatctaccaagtggctccttgctaaagaaaaagcaatgggatatagcatcactctattcaagaaaagacttctattttcagaattcctttttctgcatcaagaaattagagaaaaaataaaataaggaggacaacaagaaatttacctgtccataaatgtttgactttgacctccatgatagacggatccatcaataatccattatagtgtgacagagtcgtgcacacctattgtgacaatgaaaatcaacaaccaagatgaatacctaccttacctgatttggaccagaagtgacccaacacaattatttccattccactggtccatccatctggcttctcttgacttagtgtaaccacaacttagtttcattgcaggtggtggcagacgttcctagtgatactagtcatat

SEQ ID NO: 99258 - DNA, 942 bp, Vitis vinifera
  Intron number 1 from transcript GSVIVT01035655001 (locus G SVIVG01035655001) derived from phytozome v7.0 (chr-ID chr4 ; pos 3049489 to 3050430 reverse strand)
ccatcgttttcttcggttttctctgctgccaatcggtaattaatgatttgtattttccttcatttcttatagagaagagcacgcgttttgtgattatttagacaagttgattgttggttttaaatgttaatgtatttctctagctggttctaatttgatagggataagggtcttgattttatttcatttaaattcgtaattttgttctgaggatcaactcttccgttcatgtttggattttatttggattgaatttgaataaaaccatctttgttatttggtaccaagaatcattattatgatttgtttcattaatttgtttccttttcctttactgctgtttggtttctgggaaagggaatgaaaaaagaaaaaacaaatatggagatttatgcttagttcagtgatttttttaggtttttttccctcttcttgtttactgaacaatgaaaatttaagattcaagttcgggtctcttggtggctaaatgagaaaattttgatatttttgaaaatttagaaattgaaaacgactcaacaaaaatcatgcctcacgtgttcaaaaactgcttcagtcatatttagaaggcattaaaacattttttgtgtctgtaaaactgtaagcacaacaccaattgaaaatggtccaaaatgttttctttctcattttttttttttatattttttaaaaggaagcaatttaggagaaacattattatttcttttgtcaaacaggtccattttcttttttaattagattgcactttcttggcaaccaaacactagtatattgcaattactagtagaaattggactaacattatgtagaagtgaatgggtttatcaattatactaatggcacactgatggactcctatgcatatgaatttgatgcatattattttctgattttgcagttgtcaagggacattcacatctttga

SEQ ID NO: 99259 - DNA, 423 bp, Vitis vinifera
  Intron number 1 from transcript GSVIVT01035815001 (locus G SVIVG01035815001) derived from phytozome v7.0 (chr-ID chr4 ; pos 4581290 to 4581712)
ttttccttcccacagtcctatctcctccccttccggtaattttcttttctttctcttacttttctcggcgatcatatatatagatggttttgaatatgtatcggaaaagaaaagaaaatttgcgatcggtccaacaaagtgttacgaaaccgaaattttgagtgtgtgatagaaaacgaatccctggattcaagtgaatctgtggtaatagtttggatgcgatgaatttgatttgatttttttcttttgagtttctaaacagtaggattcctatcccacctatttttatttggctcctctatgaggtttagatttggctgatttaagatattttgatgttctcttttggttggaaatgtaattattgtttttattttattttgaatagattttctctcaaaggggggaaagaaggttgaaaat

SEQ ID NO: 99260 - DNA, 872 bp, Vitis vinifera
  Intron number 1 from transcript GSVIVT01034926001 (locus G SVIVG01034926001) derived from phytozome v7.0 (chr-ID chr5 ; pos 168491 to 169362)
tccattttcaaactagagaacagatccagttggtatgcttaaaacttcaatccttaaccttctgtttggtttctgagaaagtaaacggaaatgaaaaatacaaaaattataaatctttttttttggtgaaaattttgagattcgacttaatgaagcgaaattcgctgttagagtggatttttctttttcttcttttttatttttttgtttcatacggtcccaaattccacattatcatcggagaccaaacggaacctagagcaattactaactaggtttgttgtgaagcttggcataagattttctttttttttgatagaatttgatttgcatgttctccacgtttgtttgaaagttatttatttatttttttcattatttctattttcctttgcactctaaaatcgttcatgaacagttcaatgatccatttaattgtgaaatcaatgattttgcacgaaatttgtttgagcttttaaaaatttggagcaataaggatcgcaaattgacagcattaggtaccattttcgggcacctagtgaggttttgttcttcaggcatttgattaatgggcattatatatctattgtccatccagtctacctacatctaacagagcattgtatttcattcatcaaaaaatgtcgtatttctagttttaggtgacttcaactccctaaaaatagttttttcagataatgtggtgccttgaacttgaatcagcactaaaaggctggagttttggatttgaaactcatcccaacaaagccttccactaattagtgtatgaaactttgaatattgaaaaattgatatcccatctgtttggccatttagttccggagccacggttggacacctttatcttctgc

SEQ ID NO: 99261 - DNA, 839 bp, Vitis vinifera
  Intron number 9 from transcript GSVIVT01037170001 (locus G SVIVG01037170001) derived from phytozome v7.0 (chr-ID chr1 8; pos 28353247 to 28354085 reverse strand)
ggtttacaggtaattttcactgaatgttcataatttaagccgctggttacaaataatgaatatattgttaaatgaacttcctatgtgctgctcagcttctttttttgatgattcaaatatgtaaatgtaaatcgatcacacctgcatcattgttcaagtagcattttctgaatacctacaaaaagttggttagctacgaggtcagcttgcctgggatgtgttcgtttatacctttggaacaaacaagtagaatccaatttgcattccagttatggggattaacaccattggaaaataatgcctatttctttggcaaagttgagggccatagcatatgggctgggggtttgaatttttctgacataatatgcaactagttttcatataatgttaggggcaatcatagattttcatgattttggcagttaagtgccaatgtccatgaatgtctggagtgtggtgggactccaggagaaggtgttgcgaggtgaagaggccatgcaactcctctctgcagttgacaaggagggagttatctttggcatctcaggaatgtatgcttaggcgagaagacaaaaatagagttaaaggaaattgaaccctcaatgaattatgaggagaaatagggagggagggagtggaagatgtgggctgaaaagggagtggtccagatgttccaatccctacagttaaaatcattaaatcctattaaaatttggaacctgtttccagctgttctacatcactgtgaggtttttcaaagcagtgattttactgttgttgaaattaaaaaataacatagcttttctatttatgtctttcagttggttaagaagagg

SEQ ID NO: 99262 - DNA, 322 bp, Vitis vinifera
  Intron number 7 from transcript GSVIVT01037170001 (locus G SVIVG01037170001) derived from phytozome v7.0 (chr-ID chr1 8; pos 28354336 to 28354657 reverse strand)
gtttcttcttgagagttgctgctagagtgaattttgttgctccataactactcttcaatgtttattagcattacttatagttagttccacaataatatgactaatatatatgtttgtgtttgtgagagttttttcatatatacaaatggatctagaaggaatttttttttttttttgaatttctatcatattctgatttggatttatttatttctttttcttggctggttgcaccttctgatttgcaagaaaagaggatgaaaaagaataactcgagatattcttattaatttaaccatctgattctcttccagggcggaat

SEQ ID NO: 99263 - DNA, 572 bp, Vitis vinifera
  Intron number 1 from transcript GSVIVT01037170001 (locus G SVIVG01037170001) derived from phytozome v7.0 (chr-ID chr1 8; pos 28355833 to 28356404 reverse strand)
attgttaggggtatattcatggcagctaatcttggtcctgcataagctaaaagaattttttcaatacaattgaatacttccttgacatgcaattctctctcaaacctctgattttcttcttttctgtattgaaaaccatgtgggagattaaggtaatctctggaaatgtggggagacattaatcacactactaaaaaagtgagatatagtcgcgtaattttaggaagggtcgacaacatccgcaactaaaaagtatatatataatctcacagctacacaagtcgcagttgcagagtggttcccaacagacatatagtttgcaggattaattggatgctgctataaacatcctatagctgtgggataaaattggccgctaccatatatggcccaggacgccaccagaccactaccataaaacccatatataaattgcaacatttctctcctgcttaccctcgttgccaaacccacttctctcccgttcacctttgattgccaaacccatttcctctttcatcattgtcggtaccgaactcattggttttttttttttctcttgtaatagctgg

SEQ ID NO: 99264 - DNA, 703 bp, Vitis vinifera
  Intron number 1 from transcript GSVIVT01033027001 (locus G SVIVG01033027001) derived from phytozome v7.0 (chr-ID chr1 4; pos 25187621 to 25188323 reverse strand)
aaggattacattagagtcaaggtcagattcattgattggtgcgttaacaattgtgtatcatttcacattttgatgatctgggtgggttttgatttcgttgcttttgaggggattttgtgggttgcaaatgcttttggttgattgtttcttcttttgggtggaaaatatgaagttgcttggagtagatgatgacggaaagttaggggtctgtagtgaatgtgtgccgtacaagtaaccccttctccttgagtcttcatttctgtttctttgatcataaatttgccgccttcttttgttggattgctgtcaaaaccattagattatgcagatcgatgatttgttggagtgtgttttgattctgaggtagtgtttatcgcagtttgcttagcgtttattatcaaagaactcatggctatgggcttctagccttcttcatagagtaaaacttgttttatcttgtaattgtttgtaccagtcaactggtcctgtaaatgttccttgatggacagtgattgagttcaaagggtttatagttgtgggtttcatcaatcaagagaaaatttggaaagcaacaacgtatttatttaattttacttgtttttagtgttttcatatattcttttcaagtcacttggaaaactaattttggtttggaacttttttgtcaggcgtttgcattgctagctgctgtgaattctgtgtt

SEQ ID NO: 99265 - DNA, 623 bp, Vitis vinifera
  Intron number 1 from transcript GSVIVT01035838001 (locus G SVIVG01035838001) derived from phytozome v7.0 (chr-ID chr4 ; pos 4778564 to 4779186 reverse strand)
tctcacatatttcgatccccagaagaattttggtttagtcaattgaaatttatataaggtttctcttacattgacaattgtacaaaagttaagttttcactggtcaaacaaatatgtttttgtacatatgatcatttgctggtggaaacactgaaattgtgtaatgtaaaataacctcatgtgtttatgtgtgtgtgtgtgagagagagagagagaaagagagcttatatgttatccaggtccttagtgaccctggatagcagtttgtacctacaactatctcatggaaaacaaacgttattaacaagagtaacaggaagaattggatttgaagtgcaatctccattaaggtaaaaagtcatgactgaaaagaatactaaaaccaatatttcataacctctggtgttgaattgatagaatactcaagacaatacctgattaaaatgagtcatctcgggaattcttttgcatacttgatatgaaatggagcatagattactatcaaaataagtgttacgattcatgaaaatggagcatagattatgaagcaacaaaagagtcaaaattgtgtacctaaaataagggcagcagatacccaaccactagtttaggatttgtcagca

SEQ ID NO: 99266 - DNA, 695 bp, Vitis vinifera
  Intron number 2 from transcript GSVIVT01033255001 (locus G SVIVG01033255001) derived from phytozome v7.0 (chr-ID chr8 ; pos 22154765 to 22155459 reverse strand)
catgtatgtgccttcttcttcttttaccgatttcctcgtaatgcatccttctgttttgtggcttagagaactgagaaagaatatggtaatttggacagggaaaatagaaatacttctggattggttgcaaaaatagatatggtttcttaagatatttctcattttttgaaaattaaagtgtgatcgtgatctgcatatttggatggttgaatttcttcttttttgatcgtgatctgtaacggtattgaaggctaacaagtaacagcttcccctggtagttctctgagcagaaatagtagataaatggccttgattttatataagattacacagcactgaatgtgttggaggagctggacggttgttgacgtgatttaacatttttctttcaaaaatgcagttgtgaaacaagaactgtttatattttgttttgttttggttctcggaaaatcagcaactcacttcaaatcaaatagatatatcaggctgtgtggattaaagctttcattgaataatggaagatctgatatggaaaattgtagttttctttctacatttgctgatcaacaaaacagagctttaacttgaaatttcaacacttctgatatgttagcctatgaatagcgttacactgtctaattagtgctgatttttcaaataatttattgtttgtttgtttgtttaatcttgtagaa

SEQ ID NO: 99267 - DNA, 752 bp, Vitis vinifera
  Intron number 1 from transcript GSVIVT01035569001 (locus G SVIVG01035569001) derived from phytozome v7.0 (chr-ID chr4 ; pos 2385174 to 2385925)
aagacacagaggtggatttagaggtaaactttccctcttcgatctcagtttcgctccatgtcttcaataatttcgtttctccttcatgaaattgattcatcaacagccgatttagtgggctttgtttgccctagaatttagattttaacattgcacaatttcccttttgaatttgttgtttttcgggtgtcttttcgaatgagtgcggattacgctcagtttggttgttgagaaattagttcaggaggttttttctgtgttatggtgcaatgtgattgtgaatattgggttgtgattcggttggttgtcgggtgatggattggatttcttctttaaattttctcatgcattgtgttgatgttgaaattttgaatcttatggtttatgttatttgggtttattaggaaaaaagaagctcattcaactaaaccaaattcattcattttctcttcatgtgtttttttttgctactaaatgagggaaaaaaaccctaattattgtgaactttttgcagttttattatagggagaattatggttttttttggtatgattttgctgtcattttatctgttgggttgctgataaagtggagtaaaaaggaacaaatgttgaatcttatgaagctcaattgagtggaggtgttagttttcttgggtctcaaaattttcagaatctaaaattaatttattggattttaattttgtcctctgttcagacttttagcagcatttaggagtccaagaaaaaaat

SEQ ID NO: 99268 - DNA, 847 bp, Vitis vinifera
  Intron number 2 from transcript GSVIVT01035569001 (locus G SVIVG01035569001) derived from phytozome v7.0 (chr-ID chr4 ; pos 2386483 to 2387329)
ataggcttgaggtgattgcagaatgtatgtattcactcaccaagtctgagtacaaatagtcttctattgtgcttctgatctgagtacagcttaaattgcacaaattgtcctttaaagtagtctacattttaatccaaaccctgtggcaaactgatttctctaaaatgtgctttaaagtatttatctggccatggattgcaactgttatttcatgctaattgaaattgtgataccaatgcacttgaaacaggttcttgaatgttctgtgatgataagttttgtggatttcctgagcccttgaggcttggctcaagtggtaaaagctttgggaagatttgtgggaggtttcaggttcaagtcccaatagggacacaaaattgcccatcaatatatatatatataggattttccgactgctcttgggatgctgcatgattcccatagaagattatgattcttctggggttgttagaatatttgaatcgatctattcagagctccaaagggctatgacagaaagtagattttcaggggaaaattattttccgttctttagatgtgtgtttatgtgcaatggatccagtagtgagtcttttcaactgtggtttaaaccaaatatgtaaaaatataatgttcagctttgatcaactggctggagctggaagtggtatggtagaaagttcaaaatagttgaattgtagatgtcaagaagctagaaatgacccgattcttaatcattactttcttggtattaaaatgcttggtctaagcattcaagtcaattttaagtaatgcaagtttttataactttgtattgccagggcccaagaagcaaaagcgccgagaa

SEQ ID NO: 99269 - DNA, 566 bp, Vitis vinifera
  Intron number 1 from transcript GSVIVT01032388001 (locus G SVIVG01032388001) derived from phytozome v7.0 (chr-ID chr1 4; pos 26885524 to 26886089 reverse strand)
gctaggtatacctagaaacatgttttgtattttgcttttgcttttgcttttttactcctgctttttggatttttgcttttgttttttctggatttggcaacgaattccgtctgggttctgagggagtcccacttctgattcttaggaatgcaggattaggacctatccatatgcagcagataaacccattttctcattcgatttggattggtgtgggatttttacttggtttattttgctctatggaatgctgggttaatgttgttgtgggcttcgtgtggaagtttgcattgtttgtgtgtgatgtttcagtgtgtaaaaggaggttttcttgatcggattcttcttttcgagtgttatcctgtttagggagaagaagaaatcggattcttcttctctggtgtatttgattgcattgtttgatttcttctgttgtttctatttgtaactattttttctttattcttctgtgttttggctaaagatgctttcagtgttgaaacttcagacttacagcatatcattatgcaggacttgggtcgttgacagcagaggaatagcaagga

SEQ ID NO: 99270 - DNA, 655 bp, Vitis vinifera
  Intron number 2 from transcript GSVIVT01031315001 (locus G SVIVG01031315001) derived from phytozome v7.0 (chr-ID chr1 4; pos 433087 to 433741)
agctttacttttgtaaatcctaccattattcaaaggtaagaaaatcaaaagcttctaaatttatgaaaattttctttgctttcatgttttcagtattttatttatttatttacttatcattacaatgtttcccatgaaaactttatgttgatgatgatgtaatggccataataaaatagaaaattggtactttttgtttctgggatcttctgtttccatcctgtttctgatctgtgcattggatgattggaatgcagtattctggggttcttattttgatatttatgcttcttgcaacctttggtgtgtgtagattttacatgtgtgtttatgctcattctcttggatcttgttagctttgtgtagaagtggggagttcttttattcacttatcaatgacataattgaaattccgggcttgtgtcatttgtatttgggacaattgaaattccgggcttgtgtcatttgtatttgggacaattgaaattccgggcttgtgtcttttgtatttgggaccttaggaggagttaaggatgagaagtttgttgcatggaacaatattaacattaattgtatatacttgattttgcataagcaaatttgtgattttgatgtttcttgtaccaactttgtaggtatatcaacactagaaagc

SEQ ID NO: 99271 - DNA, 877 bp, Vitis vinifera
  Intron number 2 from transcript GSVIVT01037666001 (locus G SVIVG01037666001) derived from phytozome v7.0 (chr-ID chr1 9; pos 6681864 to 6682740)
ggccagaagctccttcaaattggaacaccccctcggttctctctctttctctctctccactcaaatatatgtttttttgtattttatttgtgggttttattttttattttttttcttttgcgattatgatctgatgttgggtgatcatagtttgatgttgttggactgttgttttggtgggtggtaacgtgtgagatttaccgaatttctttatgatctttacgttttcatgggttgacggtggaaagggttgaaattagtttgtaactaatcgaactttatgtttattggtggagtttgtgatatggttatgggtgatttttaggttttgtgtagaaaatcagtgatcaattccagtcttaggtatcctgaatcttgaatcttgaatcttgtaaaactttttaaatgtttatgatgggtttatgatacaagttttggtaatttgaagttaatgtagagaaagcaagcgatcaattgcattctttaaattcttgtttatatagagaaatcttgaaaatttgatcttgtaaagtattatgggttgttgatgctttaaattcatgtttatgatatgggattttggcaattttgaggttttacagagaaaactggattagtcacactagtgttgacctcaaaccttggatcttttaatatgtggttcaagaattgggaaacttgagcatgtatttttttcattggatgcccattcatttagtctggaatagcatgttattcgtggaatttctgtcagctattgcatgagggtttcatgggtaaatgtttttcttccagcatgtatttagtaatttgttctaaatgtttttttccttatatgccagaaaggaggcaagcagaagctgctcgcatcagggag

SEQ ID NO: 99272 - DNA, 931 bp, Vitis vinifera
  Intron number 1 from transcript GSVIVT01037957001 (locus G SVIVG01037957001) derived from phytozome v7.0 (chr-ID chr1 0; pos 11547586 to 11548516 reverse strand)
ctcaaggccaagtttcagcataccccagcatttgtgtacgttcattaattcatgatctccttatatgcatgcatgtcaatattatcagtgcattggattgtttttttttacctttgtgatggatgtaatttactttcaaacttcaaataatttgttttaacctttttcttttctcttcttattttttaaattcttttatgaaatagaaaatgtcaaaatcttgggttttctttttgttgaatgttcaaaaaaactttttaaaaccatcaaaacataatctcaataataatttcactctattaatacttaatactactaaattgtgtttagaattaagttaaattaaatcgtatttagatttaaataaaaaaacaaacatctaattactacgattaggttatattaagactatgtttaacttttgaaaaacgccgagtgaaaagaaaaaaaaaagttaagaaatatgtttggttttaccataaaaaaaaaatacttttcatatttattaccctaaaaaatactcgtttttaacaagaaaacccttattttttttctgtaaaaatattctttttcaaaacctaaatgtaaataattgaaatattagaagaacatttacataaaaaatgagttattcctcaaattcaaacatggaagatgttagatttagaaatatgagatcatttcatcatttttaatcaattaattcaaaaaaaaaattaaatagcatacaaaaataatttattgattttaaatatatatatatatatatatatatatatatattctattttatctcccaatttttttttctttctattttctctcaaattttccaagccagccataaactaaatcttgtcattcaaactgatttattagtttggtttttgatgagtgtaaatggatggatgcaggttctttgtagtagcga

SEQ ID NO: 99273 - DNA, 961 bp, Vitis vinifera
  Intron number 1 from transcript GSVIVT01037782001 (locus G SVIVG01037782001) derived from phytozome v7.0 (chr-ID chr1 9; pos 7819400 to 7820360 reverse strand)
tatttggattagttttctcttcacagtgtgtggtggtatgttggattgcctggatctgagttttgttttgctgtttcttgtgttttttcctgcaaaaaaaactggtttttcttcctgcttggtgagtggatgggaatgattgttatgggcttcctctgaagatttcctctgaagatttgcttgtgtatggatatgggttcaggctcacatggctgaaaatgttttttctttttcatttactttttctttttgagtttctagtcaatttcccaggaaagccaatacttttgggatagtcttaaaaaatgggtttattgacaaaaattcaaacatggaagacaaaagggtttgttgagaaattattcaagcttcatgggttgtggttccgaataaaatttccaaaagtgcaattgttattctttataaatggccttttgtttgtgggttcaccttttaaatcagtgatattttctgttaatatgtttggatggaatgatttttccttgtatctcatttattttgtagttatcttattctagatttgggagaagttcatctttggcttaattttacagcttttcttcggctgtattgacttatcctgttagacatatttccttttaaaagaggagaatgtgaaagagataatagtatatacacatgatcttccttttctgaatgtaaatttagatttcatggaatatatggtatttttccattttgcaaaaacctaaatctttagatataggttcattgctttctgtttcctcagtctgcagccttttccttttgacccaaatctcatttctttcatagataaggtttgtcatgtgcgtgcgtggttttttttttcttttcttttctggtgatttagaaattcatttttatgagtactcaatcatttttctcatgttcttttttctgttgtgttatatttgcagtgacttgatatatattctag

SEQ ID NO: 99274 - DNA, 927 bp, Vitis vinifera
  Intron number 1 from transcript GSVIVT01033709001 (locus G SVIVG01033709001) derived from phytozome v7.0 (chr-ID chr8 ; pos 18442105 to 18443031 reverse strand)
gtggagggcagcctggatctaatattgttcaggaggtacttgtccagtcaagtatgaaacccactgccctggacctaaaatctctctttttcatacattgatttggcaaaatttcaattcattggaaccatatatgtgacaaaggactccagaggacatcaggagataatagcaacttttcagtggttgtacttgtacaagttcaagttcagtcagttggatccctgtgttattaacttcattgggttggttccctgcttttatgacttcatttggaaggtatttattacttgtgttccaagtttgatgtttggtgcgactggatcttgatactctccctctcataccattaacacattgtatctatccttttcctttcttttttttttcccaagcatgttgggaacatacattttggtaagaagaaatgaaaattattgatatttaagagcccaagttaccgagcaatctgagaagagactatagttaaataatcatattatatgatgcttttgccgaagggggccctggtgatgcgttgttgcatatttttctactttgggacttttctgaagctgtaaaactctcttagtgagtctagatgagtggcggacattgggaaagaaaaactcaaagacggtccacaactgatatacgaatctttctgtgtccggagttggcatcatgtaatgttacacaagaaaaaagctggttgaaatggacatgatgatggatgctttttggactgaattttgcgatatggtccacaaaaactgatgtgatgtatattttgagattctaaagaacactgaacatgtaatatatgctacagagtgagcaacgacactctccctgtctcaataatgccaatatcacaagtaaatgcgtttgtctcgtatttttttagcacagatactgtatttgaca

SEQ ID NO: 99275 - DNA, 936 bp, Vitis vinifera
  Intron number 2 from transcript GSVIVT01034912001 (locus G SVIVG01034912001) derived from phytozome v7.0 (chr-ID chr5 ; pos 65633 to 66568)
tccattttcaaactagagaacagatccagttggtatgcttaaaactttaatccttaaccttctgtttggcttctgagaaagtaaacggaaatgaaaaaaacaaaaattataaaagaaaaattttggtgaaaattttgagattcgacttaatgaagcgaaattcgctgtttgagtggatttttctttttcttctttttatttttttgtttcatacggtcccaaattccacattatcatcggagaccaaacggaacctagagcaattactaactaggtttgttgtgaagcttggcataagattttcttcttctttttttttgatagaatttgatttgcatgttctccacgtttgtttgaaagttatttatttattttttcattatttctattttcctttgcactctaaaatcgttcatgaacagttcaatgatccatttaattgtgaaatcaatgattttgcacgaaatttgtttgagcttttaaaaatttggagcaataaggatcgcaaattgacagcattaggtaccattttcgggcacctagtgaggttttgttcttcaggcatttgattaatgggcattatatatctattgtccatccagtctacctacatctaacaaagcattgtatttcattcatcaaaaaatgtcgtatttctagttttaggtgacttcaactccctaaaaatagttttttcagataatgtggtgccttgaacttgaatcagcagtaaaaggctggagttttggatttgaaactcatcccaacaaagccttctactaactagtttctgatttgggacaaaaatactgcattgcttcttctattgaagatttgaattttgatataaacttcctccactataattagtcagaatagcttctcaaatttccttcactgttataggtactatactcgaaattttctttctttctt

SEQ ID NO: 99276 - DNA, 754 bp, Vitis vinifera
  Intron number 2 from transcript GSVIVT01032673001 (locus G SVIVG01032673001) derived from phytozome v7.0 (chr-ID chr1 3; pos 1612861 to 1613614)
cgcgatcttgactcggtactgcgttctgaaggtaaatattttgagaattttaatttcttttgtttgtgttgggtgataaaatttagaaatcttgaataatttggttcgattttagtattcttgattccatgattagtctggtttaagaaattatatccatatgttgaggtagagatgaggatgtctgttgattatattagtattgaagaatcgagcttatcaagtgctagtgtctcaacaactgaggaagaatctaccccttgagaaggttacaatttaatgttgccacaaatttttgaagatattcataattatgcactttcgccctccctttttgggtttctcttgagattgtgatatgatgttgcagattcccatttgttctcaaattcgcctttatattattcagaaaatttgaaagttaagctttgagaaataaagagggtagtgatctgtttcaatgttttgagttactgataagcctatgaacatgtagtgtaaagtccaatataattaattagttagtattatgtctgcttgaaaatgatggtgtacctaaatgcattaaggttacgataatgtgaattgttggttttcttgatcctggaaaatttttttttatagttcatcctaccctttatttttattatctgccgggtttctttgggtgcctgtaatacgattttcaagacaaatttcttcttatgtttctgtgacagatattgataccaactatacaaaatcttcaaaaacc

SEQ ID NO: 99277 - DNA, 1068 bp, Vitis vinifera
  Intron number 2 from transcript GSVIVT01033769001 (locus G SVIVG01033769001) derived from phytozome v7.0 (chr-ID chr8 ; pos 17992542 to 17993609)
tggttaccagttgtttctcggttttgtgatttcaggtcttgaattcacgttgttggattgcttttgataataaatttttctgcatttcgggcaatgctaaaccatggttttgaaatctctctgtctttcttgatcaattaagcctcatatgctgactgggaatggggaaagtgtgggtaattttcagttccgtttgattaattcgtggggatgccgtaataatccctttaaattaggcgttgtcttgtgcaaatatattgatttcttggtgctgtcctttggacaagacaagaatttaagcatgtggaatgctggttgttggatgaattggggcatttggagaatattagctgtagttctatgttctttgttgggttgggtgaggtaggtaggcaacttaattactcacccagtggtagaatagggtttgattcacaaatttattttgtaaaatgatttaatcatcagagtgctttgcaatattgatttcattaatatattataagctttgtgaattgaaatgccttcctacaagaagatttttgcattttttttgtcagagaggttgctccaaaattatggcattgaagttttgtgacattttggatgtgggatatttgaattttgaattattaaagcaatggcaatctaccataggaatgctcgttgcaatttacatttcatgttagtagaaatctgcagcaagagagagaagaactaaaggagacagaaaaatgaggagggaaaaagatatggatagaaaaacagagaagagaaagaaaataaatatttatgggagtaattgctgttttctcatcctgctttagtatatgataatatgcatggagagggaatacttcatactctccgggttgaagcaatgcagtttgaaagagcataaatcatgcaagagtgattctctccttcaaatgctcctttgaattgttcaaatcagttgggacaatcctagcataaattgttggaggtgtgtttgaattttcagttattctgaatttctcctctcattttgtaggcttggaagatcataaaggaaactctaaatattgg

SEQ ID NO: 99278 - DNA, 928 bp, Vitis vinifera
  Intron number 3 from transcript GSVIVT01037640001 (locus G SVIVG01037640001) derived from phytozome v7.0 (chr-ID chr1 9; pos 6479432 to 6480359 reverse strand)
tgaaaagcagatttctcgggtgtcctttgactgaggttgctgaattctctggttttgattctaacattatctccttaagtccaactaccacctgtttacttgtttctaacaattgcttttcatcatcttatgcatttacaacttgcagttgtggaaaaaaaattcactttcgatgtgttggcatggttgatttttagatgttttggattcactacttcatgattcatgataaaattatgtgctcttgccgatgtagcaaacatcaggcagaccaagcataggaaaaatcacctcgattactgaactggttttccatgccaaaataaaattaggggtctctttttgggggaagatggagaccaacaatgggttcatgaatgagggtacaatacaattacattgtcacctaaacttcagtttctaaagcctttttttcagagtcctggaaatttgtttcatacatagagaaagcttatatatatggttagaagttaatgtgcagctaggtgcccaaggagaagtacactcttttctcagttaattgtttgattcttgacaagcccgaatatttatcgatgcgaaaacgaaactgtgaccacaactgggcattgtttggggaaggttatctccttcaggttttggcagacctatgaaatgctcattgtatcataagagggcataacaagacaaatgaaaagatggggttgaaaaactatgcctgttaatctgaataccattaagagataaattgggtttgcctcttatacccagtgcctaaagactcctctttccttcttgattattagtaaattgtaataacattcttatgtttgatgcatttctgattctgtgtgcatttcattttagtttttaaaactttgagacagctatgtttggatgattagaattttcaggatgttgatcgcag

SEQ ID NO: 99279 - DNA, 892 bp, Vitis vinifera
  Intron number 1 from transcript GSVIVT01035664001 (locus G SVIVG01035664001) derived from phytozome v7.0 (chr-ID chr4 ; pos 3138689 to 3139580 reverse strand)
gacggttgaagaggtaaatgcttactcatcaaaattaggtatctttccaatttagcggtgttactctcttgtcctagaaatatgtaccattatatttatatggagtgctgtcatgagttaacttcatgatatggtgtgttggagaagtttatcgcattaatttttcttttgattttcgacatgtctctaggatctattcctattttgtctactatttgatctagtttaaggaaagagcatggcaatcatggccacataaaattatctactttatgagattcatgtcaactccagttgcatagagaatcttggttttattctatcttcatatattacatgaggttgcccatggcacagtttggattttccagcgtctttttctttttcttttttggtggggtggggaggttgttaagaactatattccactcaaattactttctatatgagtatttcttgtagttatagaatgccctttaaggtatgattttatttgaacacagcatatatctctgtcaattgatactgagtttgccttctctatgtatgtcctaaattttttgtgggttgatataatcaattattacattcgttctcctgcttcgttttttaatttttcaagttttaagcccatctggacaaagcaggttttcttgctttcaggacttgctcctttgcttcagtaactggattcaaaatgactctgtgtttaaacatttttgctactggatttgttagtgatcttgtatcttaaaattgttggtccattgtgtttggtgatgtttactttgattagcatataaatgcatgcttggatcagtacctaaacgtatacttgtcgtatttctttggtttgtatttttgtggtttctttttcatttttgaattcagg

SEQ ID NO: 99280 - DNA, 869 bp, Vitis vinifera
  Intron number 3 from transcript GSVIVT01032367001 (locus G SVIVG01032367001) derived from phytozome v7.0 (chr-ID chr1 4; pos 26763097 to 26763965 reverse strand)
ggtttggttcctgatgtatgtagatgatgagtttattatccaagaagtgtaaaaactaatttggttttgtctaggcctctgtttggtggacgagaaaatgaaggaaaagaaaaggaaacaacaaatttcctttttttttcctttcctttcccttttttttctcttttgggcaatgaaaactttgactaagaccattccagatgagcttactaggttcagtccaatggcgtttttttgggcagtaacagtggatagagatttaaaactctcaataagcagatggcggctaatggaaagtccctgcgttctctctcatgtgtgggaagatgaattcatctatttgtggatgttaatgtgtgttatatgctcttccctgtttgggcgacatggtatttgcttgggttagggcaaactgcttagatcaaaaaagattggcagggataagaaagcaattgaatgtctattagcaattaatctttctccagttatatgaggcatttgtagtttcattaccttggactgcaagaaggacacatttttccaatccttaaaacagattgcttagaaaatttaagcattgtttggctaacatcttaatagtgcttttcttgttttaaagaatgctgaccaaacagtttcttaatgttgtgtgtgaataaaatccattagaccaagtgaataaactaaccaggtttagtcatttacattatttctgaccttctcagtaagattctaatccagttcattcagatatttgactctataagctagagtttattttttttacttaattgattcccttggtagttcatgatgtttaaatctatgttataggttgcgctatacaacttcttggtctcaacctgcgg

SEQ ID NO: 99281 - DNA, 482 bp, Vitis vinifera
  Intron number 2 from transcript GSVIVT01035914001 (locus G SVIVG01035914001) derived from phytozome v7.0 (chr-ID chr4 ; pos 5732657 to 5733138)
tctctgctgctctgccactacaagaaaatcacaaggttctgcttgattcggatttttttttatgtatttttgtgtgattttgtttttgtttggttgatgagaaaatgtacaataaggaaataaaatggaaatttgaattatttggattattttcccgaataggatagtgaagtgagcttaatagcgcaactatatttttgttggttggggagagtagactacaaattattatgatttatgcttttgaattttttttcctaacttttctatgcaaaataacgagaaattaggaaaaaaaaacttgaaattttgaagtagttaatcagaagagcgctagtacatctattggtgatacaactgatttctccattttttttttatagtgaacaaactagtaatagaagctatgttcttctcttttcttccatttttcttagtattgtggtatataaataacaaattgtatacttgaacaggggaag

SEQ ID NO: 99282 - DNA, 491 bp, Vitis vinifera
  Intron number 3 from transcript GSVIVT01033097001 (locus G SVIVG01033097001) derived from phytozome v7.0 (chr-ID chr1 4; pos 25687506 to 25687996)
atataggaacatcagttcttgtttccaaaaatcaggttatttgattctcagtaaaaatccattttttgggattgaatatatttgaatcttgaaagtatgtcattgtggttttccttctttcttccttcttgaatattggatggcctggtgtattagccatatattattttttttgaaggattccaatttgtagattgtctgatggaactaccatgtaaaactaaaaattgagtgttcgagggtattctgataccatggatattattctcactgtaacatcttcttgtcttagggctgtgttgcatgtgaaacagtttgttgtgtcataacagttaaatatgtaagacagtaatagcttttttagttatatttgttgttcaagttcctgtacacttctgtggtatggcaaattctgttctatctctctcaagcttacttaatttgtttaaattaccatccacttgcaccagctttctgatcttcatcaatta

SEQ ID NO: 99283 - DNA, 541 bp, Vitis vinifera
  Intron number 3 from transcript GSVIVT01033747001 (locus G SVIVG01033747001) derived from phytozome v7.0 (chr-ID chr8 ; pos 18158853 to 18159393)
aggcggctgtgaagagtactaagaagctgtgtgctgtatgtgattgggttttatcttctttttttttctttcattaaatgtgctttaataagagattttgttcattggcatgcaattttttgtgtggtctagatttttggaatgtgtttcacttttcgcaccttgtctatccaacataaatattttttatgattaatgattctaaccatggctttggctttcagtacagaaaaaaatggaggagggaaaagaaaaaggaaatttcaaaaccattttttgtggctcttttggtttctgaagaaacaaaagattttaactcaacttggttttctaaaagatatcagttgagtttgctgaaaatcaaacaatggaatatgatagggttaagatttactttcttttttcatcttggttttcttggtaaccagatagaggtctagtgaaacatggggttttggactattgtatgtttattttcactttaattttaaacaaggaatggataaccaaatttataattttattcttctgttttcaggtt

SEQ ID NO: 99284 - DNA, 657 bp, Vitis vinifera
  Intron number 2 from transcript GSVIVT01037665001 (locus G SVIVG01037665001) derived from phytozome v7.0 (chr-ID chr1 9; pos 6679531 to 6680187)
gctcttctttgtctcggaccaggtttgttctgaccttcaatccctttctggctattctcatttatgacaaaaactcttctagaactactgaatcttttgggttctttttctccattttaacttccagaagtgggtgtttttttttttttaaaagaattcttattgtccattgtaaacacaaatcatcaaattacaaaaggtttgagaaaccattttggatttgtaatcaaattaattattttaagtgaaacaatggtgtgggtgaagtttcaggaaagaagccaattttggaaaggactttgtggtctttccctagtcatcaaaagttcccaatacccttttgcttttgagaattcccctatcttggcttttggcttcttctgtatacgcctgtgagtttcttgttggggcccatcaatctgtcccaccatcacatggtctggccttctagagtggttcaaaacttcaaataacgatgcctttgggaatttccccattttgtttcttggattatatagatgtgttttatgattttctggttgaaactcactaatctgccctacatcacatgagagggaaagacagacacaatttgagttacagtttcagttgagaaagctgatcttcttttgtttttgggtttttttggagcagatt

SEQ ID NO: 99285 - DNA, 383 bp, Vitis vinifera
  Intron number 2 from transcript GSVIVT01035800001 (locus G SVIVG01035800001) derived from phytozome v7.0 (chr-ID chr4 ; pos 4471422 to 4471804)
cattgcctttggggagcaattgagtagggaaacaggtattttgttctctccccagagcatggtttttcatagagactacataggaggcagaaattgctttaggctttgatttgtgtgaaaaaatcaaaattctgaacctcctaattcaataactaatctctgttgagagtagcttttcatttaagaaaatgaaaacagcatgaaaaagaaaacatgaaactttcttctgctttcattggattcatgaagtgataactagggctgaagaaaagggatacttaatgcaagcgccaaatcataaatctatggatgagaacttttcaccatcttcttttcccatgggtatgattgtttttcatgattgaaacttttgtttttgttag

SEQ ID NO: 99286 - DNA, 532 bp, Vitis vinifera
  Intron number 1 from transcript GSVIVT01036084001 (locus G SVIVG01036084001) derived from phytozome v7.0 (chr-ID chr6 ; pos 20868662 to 20869193)
tgtagatctctctctcgctctgcagggtcgttcaggtgagtctatagactcggagtcgcgctgagtcgactcgagggttttatggttttctttcttttttcctttctttctgatttgcgctgattttggtctttttggtgtttggtggatgtctggttttgttttgttttgtttgtgtttctgtttgtgtttgtgttttttttttttttgttttctgtgggttatcgcggtttgttttggggatttcgatctttgcttcttggttttactctctgtttggttgccgagaaaatcgaggggaagaaaagggaatgatgtttgggattgggggggcgtttgctgttttcttgggatgggaatcgcggaaattcttggatttggaagtttgatttcttttcatttcttgtcctgtctttttttggtaaccaaacggaatttggcggagaaatatatatatattttttgattttcttgggaattaattattttgaatgcagctcggtgcttttggaggtgaattttcaggaatttt

SEQ ID NO: 99287 - DNA, 561 bp, Vitis vinifera
  Intron number 1 from transcript GSVIVT01036517001 (locus G SVIVG01036517001) derived from phytozome v7.0 (chr-ID chr1 4; pos 22961158 to 22961718)
tgtaagtctcccaaatagaacaattgcatttgaactttttccttttggtggtggttgtttcttctgttcatagtcttctaattagtgaaccatttagtagtgttttaaaattttctaagtgtgcggggatttagtaaaattgggactgagattgaatgcccaatcaaattgcaaacgaaccaaaaaaagaaaaaaaaagagttaggcaataagtttttgggcaaaactgcagatatctacaacactttcagtgtatatatcttggaggaaatctcaaatctcttatttgggttgcatggagaataccaaggaaattggacatgatacaaattatttaaaagtgaagtgtgattctgatgaaaagggatgaaggacatacaagaataatcttgaaaaaggcattgaacttggatttatagggaaacaatgctcataatacaatttggtgtataatatgtttgtatggaattgcatggaaatgatctcaccatttttgtctttattgtttgtatttcttatttatttacttatttgcttttcaactgcggtgattatccagat

SEQ ID NO: 99288 - DNA, 719 bp, Vitis vinifera
  Intron number 2 from transcript GSVIVT01038664001 (locus G SVIVG01038664001) derived from phytozome v7.0 (chr-ID chr1 6; pos 21125434 to 21126152)
aaggcttgaaacaactccagaagagagtcaaagaggtatgcaccaattctgaactttgtcacttttgcctttcatttctcctcaaaatattagaggtaaagactggtccttcatgtccacagtccaaacaatggtttgattgatttaacacaccttcctttggcttgtctgttgaatagacactcccttgagtaactccttttagtttatcggctttctggtggtgattttttttctcaaacttacgccagtttcccttgtgaacccctgaaaatcagctgaaaataaatcataaatttacaactcaattttgtatcttttttttttcattttttacttgccttcattgtatcccaaaacctgaaaccctaaaccctaaaccctattggcatggctatattttgtgtgatgaagccatatagttgtagaattaagcaatgaggcaaagcatccttccagttcccacaattctttgccgtagtttttcaagctgcatacttaggtgttggtaaattgttgcatttagagactgtttttgagtttcccagggattaatctctgccattatattctacttttctcatattggatggatttctattcattgaagaaatcaactagtagtttctctcaaaagaacaaacaatttagatgagtaagctgctagttcacatatggagcttgctgcaggttattgaagggcaggcagctgtacaccg

SEQ ID NO: 99289 - DNA, 362 bp, Vitis vinifera
  Intron number 1 from transcript GSVIVT01037975001 (locus G SVIVG01037975001) derived from phytozome v7.0 (chr-ID chr1 0; pos 11931238 to 11931599)
ccttaactgacaacaacatcaaagcagtcatactggttagtatcccatgttttaattcaattttgctaaaatttagttttcttgttttttttttttttcttttatccacaacaaatattttcaacatcaaagatcccttcatgttttacagtaaatggaaaatataggcctgattaatattttcaacaatcaacaatcatgagctacagtctcatattgtaaatgtttgtagttcccattaaaaccataattaaaaaaagattcttcctttgagtgatatattgtacctatagttttttctcatcactttgatctgtcctcttccaggacattttcgctggtggaggcgagacaacatctat

SEQ ID NO: 99290 - DNA, 656 bp, Vitis vinifera
  Intron number 2 from transcript GSVIVT01032681001 (locus G SVIVG01032681001) derived from phytozome v7.0 (chr-ID chr1 3; pos 1579208 to 1579863)
taccgagctggaatcgtacctgtgtctttcagaaggtgagtattttggagtgggaaaaaggttttaatactatatatgaactgatcttaaacttataaaattatttcaaagccatgaaacttctaggttaaaaaacagataatatctacatggttaaaaaaaaattatcataaatgatatcacaataaacccacaagtttcaacaccaagatttgtttggtccactaaaaatgcttgtctgttcggtttgaatcaaaaccaatactaaacctcgatgtgagagcttatcaaaatcaatccctgagcccgatataggagtttgcacaccaatgtttgtttggtctcacgagggtgtttttctatttaatttgtttgattaaggggtatttgtctatttgcacccataatggtgtttgtctgctgtcacccataatcctgtaaaccacaataaggtcgttgtttgacctttacgtgctccttacccagaccagacaatatctaccaattacattgtgtgaccgttacgtgctcctttaacccagaccgggcaatgtctaccaattacatctttggttctccaacaatctctcacttctcttctgtttttcttggtctggacagagtcccctgtgtgaagaaaggagggatccgcttta

SEQ ID NO: 99291 - DNA, 950 bp, Vitis vinifera
  Intron number 3 from transcript GSVIVT01031128001 (locus G SVIVG01031128001) derived from phytozome v7.0 (chr-ID chr1 4; pos 1895627 to 1896576 reverse strand)
ccaggctgcagaccttcttcgacatgtaaaattttctgcccttgtttaccataatgcccttctcttaaccaaaataatatgttataatcattatttaagcatgggtagaataggaaactacatttcatgacacgtaaacagtttagtagacccatgcaaacaattaaaccattttccggtacggcaatgcatgcatcctcttaaaatttaattttctctttcgaaaaaaaatcgtatctaacggtcttgatttatcaagacacaataagactaccctctcttgatttatgaactattcctggaaataagactatgattctcagtgccaagaaatcaataaaaaatagactttgtttgacaaattcattttacttatttttatttttttatataaaaattaaataatttaaaaatatataaatttttaattatatttgatttttttctttatcatattaaaatcatttttttttagtaatttttcattttcttcctactttttaggaatcaaacataacttaagctcgaatagacgtgatctttgattccaattatatttgtccacattttttaataactaaacacggtattaaccttcaatttttggtcgtcgcaactgttttttgatgaagaaatcatagattccctttaatgtcaatgatttacgggttttataatatattattgaagagataagaacaagattgagagagttaggtgagctgccctttaaattttgtcaaagggcttgatatttctttctagatagaaagcatgatagtggtagtagatatttgaatcttaaaaatgattgttttttttttcaaaagtgtcacgggctttgaattcatggctggctttattcaattatagacacccagaattattattttatttttatttttattttttaatttgggagtgaatatttatccacagggtggacaagg

SEQ ID NO: 99292 - DNA, 826 bp, Vitis vinifera
  Intron number 1 from transcript GSVIVT01030577001 (locus G SVIVG01030577001) derived from phytozome v7.0 (chr-ID chr1 2; pos 6861693 to 6862518 reverse strand)
cctaatccagcggcgcggtctcgctggcgccgcaggtgattttctcccatgtctatctgacattgaatgaaaatgatttcatacttgcaatatatcatcagatcgattttgattcagtgagttgattgaaaataattgtgttttctcggaggcccatttgccctaatcctctggttggctgctgaaaaagcatggggaaagttgagatactcagatggttgataccatgtttccttctgtttcggttcatgaaaacacaagaggagaaaaaaaaaattaaaatctcattagtatgaatcatgaatgggcatccaccgtgtaatcaaaatgctcatttttgctgattttttttagtactgattatggggtaaccttcttgaaaagaagcatgtgagttgaagaatttgggagaaaaaataagaataaagaaaagaagaatcaaataaatttgccatgctaattgcaatcgaatcacattcccaaaagggctgctgttaaagactttttttttttttaggaacttttttcctatcaattctttttaagagattatatcaacattttctagaagtgatcaaagtgtatatcgcactccctcgttcatgttgaattttgcttctccatggtggtgggtctttttcttgttttgtattttgtgcaatcattataaaattttatctctactaggttattttgttttgtatgtaaactatcaaagatgaatattctccatcaagttttacaatttatatctctgttttggcttgtgaatcattattaactcctgaaatataatatattcttttatgcttcataacagatcatc

SEQ ID NO: 99293 - DNA, 719 bp, Vitis vinifera
  Intron number 1 from transcript GSVIVT01037673001 (locus G SVIVG01037673001) derived from phytozome v7.0 (chr-ID chr1 9; pos 6729548 to 6730266)
gttctgtaacggcaagaacgctgctgattttcttggtaaattcatggatctttattggtcatgcaatatttgaactgtctaagattttttctatagattccatcaaaatccaaaaactttttttctttccctttcttcattgatctgttttggtctgtaacagttacttgattttacgtgtctccgtgacatcgatgaccaacgacccgtgtctctgtgacatcaatgaccaacgacccgtgtctctgtgacattgatgaccaacgaccaacgaccaccaccttggttgggtccttaacggctaatcgcctcctcaaaagcaaagggccaccaccttaaaagagcaaaccatattttgtaggccaccttggttgtttagatttttctaagtggaaaaatattttccttttttcatcttatagaaaggaaaatgaaaagctaaaaacattgaaatatgaatttacatgtagaataactgcatggtatttatagtaaagacatgcaccttcattcattaagggcatgtagaggccaaaaattgcccttcatagcagcatgaagtgaagggaaactttagtgggagccttcccttattttgtagggtgtcttgtttaataaaggtagaccacattaataattttggttttttcttatttgatttgatttcatggaccacttcggcagctgagaaattgggcttaccatccgcaccgccttat

SEQ ID NO: 99294 - DNA, 739 bp, Vitis vinifera
  Intron number 2 from transcript GSVIVT01035937001 (locus G SVIVG01035937001) derived from phytozome v7.0 (chr-ID chr4 ; pos 6146137 to 6146875)
tctaggtaccaacatattggaaggatcaattcaaggtacaatggatttctttcttcctcttttattttatttgattttcccttcttcctttttgaatatccttctctggatgatatattttttggtccatagttactgtaaagtttcttcctaggtggacttcttaagcttagttcccttcaatttaaggaaacctgtttcaattcttgcattttaaagcatataagccatgtttggtatttggaaaatttcacggaaagaaaagataaaataaaattataaaatttttctgttgtttgattgtccatgaaagagttggaggaaagaaaacttaattattgagtaatgcattttcccaaactttctccaactttttctcaccgtttccatattatccaaacagaagaaaaatattatgttgaacatttcttttttcctttccttgatactttctaggaaccagatatagccttagaaagtaccatagattcctcaaatgtacctataactctgctgaattgtatttcccaatgttttcatttcttctggtgctgtctaccatttcaattttgattgtcaataggtttgtattcaagtttttccaatcatttttcatattccatgtggcatcctattgatctgtattgcaaacactggtgagcatgttgccttttctgtatgatttcttgtattgtcttttgcagagttggctgctttgcacaacttggaggagttggat

SEQ ID NO: 99295 - DNA, 879 bp, Vitis vinifera
  Intron number 1 from transcript GSVIVT01033731001 (locus G SVIVG01033731001) derived from phytozome v7.0 (chr-ID chr8 ; pos 18279134 to 18280012 reverse strand)
ctcaaatctggctcaagagagaggatttacaacccgtaatgtttttcttaatttattttcattaatctatccaaaattataagatttttgttctttgtttgtttgaatttgagttgtgactacttgtctgattttctgcaaatttaaaagttccatttttttttttttgcaaacagaacttcttgttggttttattgtggaaatgggtggagtttttatttttattttcagctaagttgggtatgtaaatttctgggtttatttgtttcatttaaattcgctgaacgcgtgagttctaatttgtatggcaagtttgaaggttttcaattacttatgattccttttcttaaatgtggtaacttaattaggtttcttgttaagtttattaatggttgaaatttaaggattttgtggtttatgcaaaaatgcgacagttttttttatgtttacatagggaatagtagtgttagaatctcttggccactgttctaattcaatttatacaaattttcttaggtaattattcatttttctgaactcatgcatattaattttcctatatggctattcatttttctgaatgtgagttgtatttgtggatggtttacccaaaaaaaacacatgcaagtttcattttggagcactgttttgaatttcattcacccttttttttttcttctgcctcattaaattctgattcagtgtttaaaatatggctacttgttggttttgaattcaatataggacacacgtttcttttttggttggtttagaagagtttgaattggaaattggtgtcttaggtcaacttagtcttgatcattatgatggatttggtttgtaggtattttccttcaagctccgtggtgcttataatat

SEQ ID NO: 99296 - DNA, 896 bp, Vitis vinifera
  Intron number 2 from transcript GSVIVT01031809001 (locus G SVIVG01031809001) derived from phytozome v7.0 (chr-ID chr3 ; pos 4615836 to 4616731 reverse strand)
tacaggttagctcaatatggaatttcatttttgtgcttagtaaaatttcttcctttcaaatttatgtgaattaggtgttgtttggtttttttcccttgtctgggtcagagccttataattgaataatgcctaatggaatttatatgtgtatgtgtgtccacatggtgtgttcttgagaactgaaagaacagaatgtgtaggtatttcagatttcattttttcttgttctttttctaaggcttctcagcaaccaattaagagaattagtttctttaataagaggaaaatgtctgaacgccagatgataaaatataacttaagttagggtctgtttggattggaggaagctgtagggagaaaaaaaagtgaatttcaatgtctcttggttgtgaggccttagctgccttgtatacccccctgtatgctttgtggcttttttgcctcttgttatacattccgtgcttatttatctaaaaaaaaaaatgtctcgtttgatttgtcataaaaagtttttaagaaaaataaaatttaagctaaattatttaaaaagcttttccatattcaaatgattcattccccgcataaaagatgagcaaaattggagaaggatgggagagaattttattaatcttgaacttatttcttattgttctcactctttctgtcctttcatttttctccttagtttatttccccatcatctccttcaaactttacatgatccaaaaggatccttagcatttttctacaatttcctgtttattcttttgtgaaaattgaggaataattctgaattttcctgcaaactcctgattttcgactgtttgtgggtgttacgctgatggttgttaaactatataggttcttatacgtgttcgtcctcccaatagcattga

SEQ ID NO: 99297 - DNA, 869 bp, Vitis vinifera
  Intron number 1 from transcript GSVIVT01031401001 (locus G SVIVG01031401001) derived from phytozome v7.0 (chr-ID chr6 ; pos 19074040 to 19074908 reverse strand)
gaagctcgtatgtcttcattgtctgcttgcataattgttgttatattgctcttaatttggtttaattattgtcattgttgtcttgatggatggactttaattggatatccaatttttgttcatggtttgcaccagtgttatgtcacgttctcaagcatttgtgtgtctttatgtgttttgagttagtttgagtgttgatagtcgcagccattttgaaccccaaatcaattatcaataagcttgatgagattgagttgtttctcaagtggttagcttcatttcccctatgggcatttggaacctaatttcattattcctaacttcatgttgtatgcatttttataattttatctgtttaggggtgtgatatggattgaagaatttgtcatttgaatttttgttttttttaaatgatttctgttgtatttcttctgacttttattcatgtaactcactgccctcacagaatatgatgttcttaagtaggatgtaagggttccaatttgttcatataagcattacagcattcaagaggttgataggattgagaagcttctcaagtgggtcaactacatttttccttaaggaggctcaaatgtatttgttatctcctagtttgttatttgattcatgatgtgggctcatttactctggatttttggttagatagactgatgagtgtaatcttgatcgaagagttgaatttttcttgatgtggtagtgcatatatatgatgttatttattttttcaggtgtttacattctatggctattggcttttatttggcaatgtgattttggttgaatattgcattgtttctctacaatctctgttgcttatcatctcattattatatttttttaaaggt

SEQ ID NO: 99298 - DNA, 691 bp, Vitis vinifera
  Intron number 1 from transcript GSVIVT01036513001 (locus G SVIVG01036513001) derived from phytozome v7.0 (chr-ID chr1 4; pos 22886665 to 22887355)
cggacgatcttctcatttagtgttcttgctttttggtaaggattaagggattatgattgtttgcatttccgggtcttgaatttttgttgatttttttttcttttttttgtaagtttagtgccccgaaattccgtgtattgatgattgttttggaataattttgggtattgggaacttggttttctgaattttggtgtttggttttgggtttgattatcttatttggtttgatctgaaaaaggccccaaattttggatgggaatctgttgaagaactcaattgattttggttgattgccttgtttcttcacggtttccaagttgatttggagccacttttatgggagatttgcctctttaatggttctccaggaaatgggtctcttgagtttggctgtttcggttattgagttaagttagtttggctgttcgtggtgtttgagtttctacccttctaatctgaagaaaccaaagtctccttaagttaaatagcaaaaacccaaacccagatagatcctcaacttatacaaggtccaattcaaagttgttcttggtttttagtagttgtacttagaaattctgtaaaatattggaaattttcaattccaaaactataatatttttggtcttgatgctaattgttagctttgtgtacagatcttcttatattaaatcccagaagttggagctgc

SEQ ID NO: 99299 - DNA, 244 bp, Vitis vinifera
  Intron number 2 from transcript GSVIVT01032597001 (locus G SVIVG01032597001) derived from phytozome v7.0 (chr-ID chr1 4; pos 28697933 to 28698176)
tggtgataattgaaaagggaaagccgctctcaaaggtttgtctgatttcaatgtagacatccatggataattaatgcagtgggtcttcttcacagcgatttttttttactgtttgtttttccgggaaaacaatcttggcgattcatatggaaaacaagtttgatagttgggtttttttttaatacatcacctgaatgtggtgttcttcacaaaatgcacaggtgaaaatttccggaggagggcg

SEQ ID NO: 99300 - DNA, 801 bp, Vitis vinifera
  Intron number 2 from transcript GSVIVT01035430001 (locus G SVIVG01035430001) derived from phytozome v7.0 (chr-ID chr4 ; pos 1227240 to 1228040 reverse strand)
caccgccggagcccaagaagcccaagaccgttgaggtcaaaattgcttgaaatattggggattttgggagggttttgtttagtaggaaataatgtggtaaagtgggtctggcacaggaggctttgtttgggtttgattttgggtcaatggctgctggcgatgtcgtgatgaagtaggtgatttctcaagaatagtctaatgtgtagtgttgtgtactatcaatgaagttaccctttactcttcctttcctcctttttatttttttcagatatatttttaagatctgaactctgaaggcaggaaaaaaagcattggacgttaccaaacagaagatttgctggtgtttcctctggctgagagtttgattatgttttttctttgggtgattgaattttggccagggaacttgacattgtaacttaaaacttaaaatgacttattaaatcaacttaataaattattattacttaataatttaaacataattaaattgaaaaattacattaaatcattaaatattaaatactgaattttaccaaatgccttattaaccttttgaaataaaattatctaaacttgtaaaaacgttttattgacttcgaagaagggctcatgatttgttgtcaagctgcctttgaaggaggacacgcctccagaagctgaggggtattttggtaattgaaatgaccaaaattatacttctgattctgtctggagcatttgcgccttcttcgacattaacattcgcttcgcattagcggttgtttccagtttcacgtcaccaaatctctgaaacccaac

SEQ ID NO: 99301 - DNA, 635 bp, Vitis vinifera
  Intron number 1 from transcript GSVIVT01032247001 (locus G SVIVG01032247001) derived from phytozome v7.0 (chr-ID chr1 1; pos 13792583 to 13793217)
gctgctagaacccctgttccagggcttttttcgaggttggtttcatgttctaccttcaatcagacagaccttattgcttctattttccatgattcaagtagttaaatctactttaagagaacaataaaacatatgcctgtaagttagttttctgagttcattggtttggataatttgttttttcagatacactactcgaacaattacatattccatatttgatgctgtcaatctggtttctctgtgttggattcgatctatagtttcagcctgttttgagattatgttttgggcaggattttagttaaaaattttggattttgctgcttagaaactttcttgatatagaggtttaggtagacaaaggttgtcaaatttcaccttgagtagatccaaaaatttccatttttttgactttatgcaagcattttagtttttacttcaaattgacactgccttggatcatgtcttttggttggccctcttgttaagttcttccctctctaaatagacaccttggtgtgtggattcatttcaagcatcttgaaaaccatgcttgagctttgaagacatggttcttattttttatcatcccttcactgttattcatgtcttattttctagatttgggacaa

SEQ ID NO: 99302 - DNA, 853 bp, Vitis vinifera
  Intron number 1 from transcript GSVIVT01032923001 (locus G SVIVG01032923001) derived from phytozome v7.0 (chr-ID chr1 4; pos 24207133 to 24207985)
aaccctaaccgagctctgagtctctgcttcttctggtaatttctctttcagctgtttctcttcgctgttgctttcttctgctgtgagaatcactggtttcagtgttaattgtgtgtttctggttctggtttttggtggaatttgcttggaattggtgttctctggtggttaattgcttgttttggggaattggggtgttggtgtgtggtttgtttgatgcgtgatggatttttagggtttttgagtggggggtttgctttgggttttgctcaactgctgccatatttgtcttaaattttgctttggaaggcgttatgttcaattataactattttgtttgaagttcttgagctcgcattagtgtgaatctaactgtttttggaatattagtgtttcttttttctggttgagttttctctccatttaattgtgtatttatttctcaaaagtggtgtaagtttccttaatttgttgtaaacctagaatcgagtttcatttccctgtttggatgccgaggaaaaagagtggaaatatatgatttcgctgaaccttacctggttccaacatttcaagtttggtttctttccttatgctaatgtacggagcaatttgatcaaagttaatttactttgttgaggtggaagccggatggtgctgcagttgtattatatttacaggctctgttgtaggaatcaaacccgtactatttttgtgaagaaattcatcgtggacctgtctgaaagaagctgcaactgcttgtagctcttatctgatatcatttttagttcttgtttgctcactgtaattttattatgcagggttacattgagcagaacaaccacagaaatcgaag

SEQ ID NO: 99303 - DNA, 925 bp, Vitis vinifera
  Intron number 1 from transcript GSVIVT01030514001 (locus G SVIVG01030514001) derived from phytozome v7.0 (chr-ID chr1 2; pos 6379822 to 6380746)
tggcgtgtcgaatccgtcgtcggaaaacgtggaaggtagtaccgatccttagtactgcttttttatcggcgatctgattgatctgatcgttgatttgtattattttctattttagtcggaatgcctttcaattcgtttaactcgaccttttttttttgctctatttctgtagattttttttttaataaaatcaaggtttgattattattgttgttattgagatggaatgcctgaaaagttcttacgaatttggtgaatttgagttttttttttcctcctgttctctatttgatacattttggtgtcactgtcattctattgattttcaatatcgtttcaattttatttattttattttattaatattgcaatctcattgttgtttgaactggaaattttgccgtattgagcctttaatttattttatttacttttatgatcatatcctgtactggtttgtgttgtgcctttttcctttcgatctttaacagcgtgattcttcagttttatgcatcatagttttgttgaagttgaaaaggttgtgattgtgttaaattttagtttttttccttttagtatttagtgacatgtgttttctattaattttaatatggagttcccaagttttgcaaggtctgatttatttggtgttactggtattagtgtgtctattgtctaagataaaaatattttttaacttgttaagttttagaattttttgcctaatttttgtatgattgccttattcatggattggtgctgttaagatttggagattgttgccttgcttttaaacgtttgccttgtatgtgttttgtattcttgaaggttttcaatacaatgcacattgattgtaatgtttttatttctttccaaaattttgtttgtgggtgtattgtagaagcaattttgcggttgaaaatac

SEQ ID NO: 99304 - DNA, 965 bp, Vitis vinifera
  Intron number 2 from transcript GSVIVT01036788001 (locus G SVIVG01036788001) derived from phytozome v7.0 (chr-ID chr1 9; pos 22531216 to 22532180)
cttagaggaggtattttcaattgttctttgagtagagttgaatgtaatgttcggtgtggacttctggaatatttttatttgagttatatttcatttttcagtcctatattgggtactttcctagaagtttttgttagttattattaaccctcttactgaatatgcacccaagaaaatgatgatttagttaccatgtgtaaatgcatgtgtatggtgcatctgttattatcaagggctatatttgatgaaatgagaatgcttcatgatgactagctgaaaggtgtgtcaaagaaacatcatgattggagttgtttaagccaaaaaaaaaggtactaataaagatatcgtttgatggagttatggttaaggtgctaccaacagacatgacttctgagaccatttttatgacaatcagtcacacctaatatgatggaggaaattaaggtcgctcattttgacctgaatcaagttatcatttaatatttcctctttttatatgaaaagttcactgcacataaaaattacaaagtggaaatcctaaccatctgttttcttacttttctccttagcatgggtatttttgtggactctgtggattttatctaaacatttatggctgtctgattagtatatttttatatgtatttccaaagtaaaaaaatgaccataaatggattctgtcgattgatgagcagggtaagaggcagtgtggaatgcagtttgtatgtatatttaccaccacctcatcttctctttgctgaggatttgaccttatgtggggaatattcatcttcttttagccaatttcctttttctctccgtgtctgatcaaatgttcaaaatagttgtctcgtctttttcaatttctcttgctgcatactaaaaattttgttctttgttgcatcctgttgcaatactgaaacaaaataggtctggtgcctgattgctacaccctgggtagtgtt

SEQ ID NO: 99305 - DNA, 1027 bp, Vitis vinifera
  Intron number 1 from transcript GSVIVT01037695001 (locus G SVIVG01037695001) derived from phytozome v7.0 (chr-ID chr1 9; pos 6966777 to 6967803)
tcgcataagcaactttctcagttcctaagagaaaggtaattcactcgaataaataaaaaggaaaatgctccgtttggttgctgaggaggtgtagagaaagaaggaaaattgaaaatttttgtacttaagtcgaaaatatggagttcaaattttgctttggtttataaaaggttattaagaaaaatgcggtgcattcatttggatgacaagaaagtgcaaagaaaagaaaagaaatggaaaatttggattaatgtatttttttcattatacgggaccggaggtattcaatcgaggatagaacttcaccccgttttaatagaagaagcagaaaaaaagaaaacttgtctggttgctatagtgctgactcaagtaaaggaattggatgctggtgtgcttaaattgaaaacatagggttcggaattttcatttgctttctaaaaggtagatagaaaaaatatggtgcgtttggttgatgagaaattgaagtaaaagcaaaggaaatgaaatttagagttgattgatttttctattatatgggacctgtgggaattaacgagttagttctattgacatcatatttgtgataaatccttttgctcggttcctttagcagagataatttcatcaactttctgcctggttgctgtgaaaaatgaagaaaggaaatagagttttgaatcttatatgttgcgttgttttagtttttaaatgagtggaggcttctattttcccgtccaaaacatagaagattgaaaattttaacttttttgtttttccttccttttctcagcagccagacactgcaaattggaaaaaaaaaaatgaaaagaatagttcttgtttgtttactttggagtgtttttctgacgcttttctttttaatatacactctctttacctatcaaaaaagaaagaaaaaaaagttattgttcgttgtccatggaaatttatcatgcattgatactgtttccatgtgttattttcaaatgtagacacaaagctctgaaggacctcaaagacgaaattt

SEQ ID NO: 99306 - DNA, 456 bp, Vitis vinifera
  Intron number 1 from transcript GSVIVT01034014001 (locus G SVIVG01034014001) derived from phytozome v7.0 (chr-ID chr8 ; pos 15867289 to 15867744)
cccttggataccctaacttgtgagtttacgttccctctttggctttgaattctacttgggaataactgaaaaaggaaaaggcaatttgaagtacctgttttctattcttttggtttccagaaaatgaaaattgaggtctattgagtgagagaattgcattaggctcagtggaatggggaactattgtatgagaaggcaaaataaatcaagggaattgataatttgaagtttattcaacaagattttatgttaattgaccattccggtgtggaatttacaggaagctaacaattctgctttttactggtttttcctctgcgatagtctcaattggatgtagatagattttttatttcaactgttttattaatatgcttaaatttttttgagaagagtgtgttgctgtattgtgtttgcaaatttaattaaaaaatttccttttatgtggatatagag

SEQ ID NO: 99307 - DNA, 374 bp, Vitis vinifera
  Intron number 3 from transcript GSVIVT01034014001 (locus G SVIVG01034014001) derived from phytozome v7.0 (chr-ID chr8 ; pos 15868057 to 15868430)
cctggtaataattgaaacttttatatagaattttcctgggtaatccagtatgttaaactaaatatatccagtaagctgtttatttaattttacagactagtgtcagaaggtgccaagagaataggagggattttgagtcttcaagcagtctttggattgtttgagaatatgcatatagatatgacattaataatacattttattttatcggaaagagaagtgttatatagacaaatatgatattttattgatgaaagaaaagtgctacttatggagaaatgcaatgatactgattttcccagatgcttgtattgagtttaatgctgttatacatatcaggctggcctgcatttcaccagtcaactgtccattcc

SEQ ID NO: 99308 - DNA, 656 bp, Vitis vinifera
  Intron number 1 from transcript GSVIVT01032791001 (locus G SVIVG01032791001) derived from phytozome v7.0 (chr-ID chr1 3; pos 752801 to 753456)
aacgttttggggtcgagcttctatatccaccgaaggttcttcctctctctctaaaatatatatattttttttctgttgtttgggtttatagtgagataagtttttgtttggtttggtttctatggttgactttggatcgatcaggagatttttgtattgagaattgcttcttatgggtgtctgctcaaaggggaatttttttgaggattttgttgcagtggtttgaattcaaaactccccaggaaaaaaaaggaataaaatttaggaaaattggtgattgggtatgtttcaatttgcaagaagatactagaaatggtgtgatttttgtcccaatctgttctttttctatgtgggttgtactgattttttataccaatataatccacctgtaacggaagaaagaaaaattatttcttaatcccttaattgtcttgtgatgatgccaattttctagttcatagtctgagaacatatgaatactcgaaactcggattttttgctgttatttgatctttctcctattccaaaggaaatatgctagaaaatttattcaactaggaagttatctggttttgatgttttcagttgtttcctgatatttttttgctctgtgcttgtcaggtggtgcatctatataagaggaagtggatagagga

SEQ ID NO: 99309 - DNA, 640 bp, Vitis vinifera
  Intron number 3 from transcript GSVIVT01037402001 (locus G SVIVG01037402001) derived from phytozome v7.0 (chr-ID chr6 ; pos 14329734 to 14330373)
aagggttggctgctgccgccaagttgtctgacgaggttcggttcttttgtgttccacccttggttttagtttgtttttattttcattgactgttaaagaaatttggttttgtttatccaactctctgtttggttgccaagaaacacaatagaaagaaaggatgtgaaattcaaaatttttcagctcggtccttaggacaaagaaaactccacttcactaagccaaacaattacacaaacttaatgtagttgattatttcttttattgatgaacatgcataacgggtaatataaggtgttacatatttcttgtttccctctccttcccagtttctcagtaatcaataaaatgtggaaaaaggatgcacaactatttggtggttttcatatgagcaaattttccttttctattgatgctaatcaaaaaagattttttttcccttttcttttgatgaattacaaagttactgtaaggcaaaaaaaaagtggtgcaacttaagtatgcacagcacctatgggactgaccgaatgagaaagtttcttccgttttactatttttctaccattggaggagaactggtgatgttagccattcatgcaattcaggctagacttcgagaggcagcctcattggagaaaca

SEQ ID NO: 99310 - DNA, 949 bp, Vitis vinifera
  Intron number 3 from transcript GSVIVT01031115001 (locus G SVIVG01031115001) derived from phytozome v7.0 (chr-ID chr1 4; pos 2051332 to 2052280)
gcggtgagtggaatttcaatatatatgaatggaatttttattgttatcttcgcttttttatttttttggtttactgctactattcgtatcatatcaataacaagaggtttgattaaaaattagagggaatgcataccatatataaatgaggtcctatggaaaaatgcttaacaggattcagttctacttccgtgtgtgcttctgatgaatttgcacccatcgtagaaagctacaccaacttttcctgtaattgttggatgcctcatttgcaacctgtgaaaacaagaagcttatcattgagataaatgatacatctctttgatggttagagaaagcctcctaggacatgtgattatttgacagcacttgattacattttctattgctgaatcttccatgagagtggccttgtagtctttaaaaaaggaagaagaaaagaacttaggtttcagcctgtttaccgtctctctggctggatgattccgtgaaacaagtaatagctcccccagcatgatatcctttttttttttttccagattccagcaagtcatgtataccccaagaagattctactgaatttgaaactttgcaaaccttaatgggttaaatcaagccaaataaaggggttgaggaccaaaaaattcctttaaccaaagcagacaatttgcattaaagttgttttggtttagacgtattgaacatcccatcttcttatacctgggcagtgtaccaggtttctttctctttgggaaagagaattttaaggccagatgagtatgattgtcagttgtgcttgattctgatatagaaggtctttctgtgtggcccatcagtcagtatgccaatccttaattatgctgttgtttgtttgtttgttttttgtatttttttttctacttgtatttcctgccttactaaatgaacatgctgccttttcaggattactctg

SEQ ID NO: 99311 - DNA, 912 bp, Vitis vinifera
  Intron number 2 from transcript GSVIVT01033571001 (locus G SVIVG01033571001) derived from phytozome v7.0 (chr-ID chr8 ; pos 19659481 to 19660392 reverse strand)
ctttcggcgtcgaacagcttgcattgctcactcaggtttctcttcttttgatccatggctgatcatcgcttgtttgttttctttgtgctctctctctcttgattactgtgtccaactaagcgtttatgggttttggttatttcaacatataccgggtttggttttgggaagtgggatgggattttcaggtgggtttttgccctttatttttcgaatttcatcttcgtctgacgaagtgggtcggtgggtgccgtgggttcgtttttgggcagcaaattttgttttatttattaacttataattatcttctcccttggaagctgttgtgcttgatcatagagacatagtaccttttcttttctgcaactgcatatctccttttcagtttcttttaaagccttcgttccaacaattgtttcaattttcgtatgtcatgttcatgggttcttattcttcttctttaatcctcttctctcttcttctcttcacttgagatacaaaccagatttgctccctttggccatattttttcttatactttttatgggggtaaggtgttcttgtcgctgttggtgtcacatacaagtctatcttgatttcatgtgccattctgagtctcttaatcgagtttcttttatctttatgctgcatacccaatactttctatatatagttgttcatctctagtcttgtcttccacagtgagcacaccaaatctttcccaaatattcaactttccccatttggtttcagattggaaagaaataaaggaccagttagaagttaatttcgcacaaacaacccacattttttccagtgcaaaaacttccaaaacatcattttggtttgaataattccattcacgaatatttgtttattgctttttacgggttgcagaagcaattggcaagc

SEQ ID NO: 99312 - DNA, 602 bp, Vitis vinifera
  Intron number 2 from transcript GSVIVT01034224001 (locus G SVIVG01034224001) derived from phytozome v7.0 (chr-ID chr9 ; pos 13012883 to 13013484)
ttgttgtcactgctgtcgccaccgacaccagagcagtaagtccctaaacccatgcatattcatgtaccaactctctttccatactactcatcaatttttcaaattcatattcaatcatttttgcctttaaaagcaaaaaaagtgcattaatataattcttgaaaaaaaaaaatacatacgctttgtagaaaataaacataaacaagagacaggagtcattttcaagctttatctttgatcttttttaatttgtaagcaaagaaacaggagtcaacggaggaaacatgggtaacatgcaactccacttcccatgatgggtatgatgaatgataataatacaaaaaccgggttctttgggattgacccctctactcaatttaataaatttgcccaattttctagcactcataacaagggagatgagatgagaaggggcaccgaccctcactctttcttaatcatcatttgaaaattttgtatttttttattttttatttgtgttgggcaaaggagaagaaaaaagggaggtgaaaggggaatcttgtaatgtgggtgagtttgtgataggtgggatcgctggcgggcatcgcggtgggaggcac

SEQ ID NO: 99313 - DNA, 792 bp, Vitis vinifera
  Intron number 1 from transcript GSVIVT01037900001 (locus G SVIVG01037900001) derived from phytozome v7.0 (chr-ID chr3 ; pos 6522092 to 6522883)
gggcggcgtcgcatcggagacgcttcagcttagtaagagtcccttgttcagtgtctggttgctgaggaaaggaatgagagtgaatgtcagctggagtgagactgctaaatcatttccgcttggtttgttttgctttggtttttggataaagagtgaaactttgagattcttcactttgagattcgtgattttggtttctcgataagagagtaaagtgtcgttatattttagtgtttggttggtgtcatttttgagaaggaaattgtgaactcaacagagtcaactaagttgatttgcgtttttgtgataagtaatgaaaaattgagatttgaaatttgagattttttttttttttcctgttgttggcaactaaatgaagatttgaggtggaaaatgcaatattcagaatttctatttctttctttcctgaattctttagtcttgcctgcagacgaaatgtgatggtaaactgtaattggagttgcttgaaatgcttggagtaaatataatctgaggctaagattaatctaagaaatatggtctgaaccattagcatagtgaatcttgtgatctggcattgtgcaatttttcaattcatacgtaagatctgtcaaataagacggtttggtttcaaaattaggaagaggaaagaagtaacatttggaatcttatgttttatcattgttttcctatgaaagaaagtcttcatttcactgatctcctaataaccaagcatatggtttggaatcctttgtagagggcaccctttggactgggactcctggaaactac

SEQ ID NO: 99314 - DNA, 850 bp, Vitis vinifera
  Intron number 1 from transcript GSVIVT01033965001 (locus G SVIVG01033965001) derived from phytozome v7.0 (chr-ID chr8 ; pos 16242989 to 16243838 reverse strand)
ccaatactctgtattctctccttctctacaattttttccttcttcttctaccttttttttttctttgggggcatggaggtttctgttgaattttctgtttttgggacgttgaggtcgtttatttttgagattttgtgtttgattttctatgctgttggattttagctgtctgatatatgttggaaaagattcattaggattaaaccgtatctgattttgttgaaagagaatctgctgcaacccacaaatatattccaccttgggattattttgcctaaatttgaaggatatctttagggtttataggtgtttggttggtggtaagaccgactgttgccttttctgtttggaacgaagtttcaacttctggattgtgtacttatatcttgcctaatttgaggttttaagcatactggagcaaccaattgagattcagacccaaatggaaattatgaagttctacatattagaaacattcatgccctttgttttccgagggggaaaaatccgttttctagtttctattttggatgggattgctaacggacatccgttttcccatcccaggcaatgtggggaaattagtgggtccaattgtacacaaatcgaactttgggacactggagtactatctaagcttttaatgatttttcattctgttgatcgagtgctatacaacatattaaaggtcctttcttttttggctcttccttaatttggatatgtggatctattgcttacaagctaattttctcttttgcagagaaaggggttttctttttttcaactttgatttggtttctgattttgggtttgacttataccagggcttctggttatcagagggagt

SEQ ID NO: 99315 - DNA, 868 bp, Vitis vinifera
  Intron number 1 from transcript GSVIVT01034782001 (locus G SVIVG01034782001) derived from phytozome v7.0 (chr-ID chr1 8; pos 21495609 to 21496476 reverse strand)
aactctctctttcgacgacatccaagctaacttcggtcggtttttatttatttatttattgttattttatctatctgctgtttggttgctgcgaaaacgtgagaaagcgaataatatggatctgattttttatttatttttaataattctgatccccataacacttctggcggagttagaggattgtttggcttagttgagttgagtgttttttcgtatgaactctgaaattcctcttcttttttttggtaccagatgaattcttactgtttgattagattaatggtttttttggggagaaggttgaatagattgagttttaggctaagtttcgatgcttagaagacgtaaggaaaggaaagggatcgaaagtttgaatcttacatttttaaacttgaactgaaattttaatttccatttttaaaactccacccgatagtgtaatacaaccgtctgccttagttgagttgtcttttctgatataaacttgaaaacttgttccttttcgtttccttctttctctttccgagcatcggtgttttattagattgctgtgttttagaagatattgaataaattgagtattaggctccatttggctgctgggaaaaggaaaaaaaaaatcaaattttggaatttttaatctttaaaatagatgctcagttgaatgagaaattgtctttcttttcttttctttgttttctcttttctcttcaaaggagctggaaagtattgaacgatatacaggaggttgttatttatatatgtgtgcacctttttgtgggctgtaatgtcataagatgtttatgcatttcttgattttggttttgctgttaatttcagctaaaccagttaaagggtcgggaga

SEQ ID NO: 99316 - DNA, 917 bp, Vitis vinifera
  Intron number 2 from transcript GSVIVT01038712001 (locus G SVIVG01038712001) derived from phytozome v7.0 (chr-ID chr1 6; pos 20707410 to 20708326 reverse strand)
ctcctggtaccaccaacttatcccattcttttcgtaaattttttcttttcttttctttttttttttttttttggggtattagcccgtgttaaaaaacttaatataaattggaaattaaaaaaaaaaaatattattatattactgggaattgtttttaggaatgtgcttctgatgctgccatgaaaaattgaattatcacattgggttttgtgtataattttgtgcttatattgtgataatatatgtctcttgactagaaacaatgaatttagttaggaacaaaaagttcggattttaggaattttattcggagcataggaatactttggtttggggaaaatctttgttagctctgctcatgagaattaatgcaatttaagagcctaatagaggtgcgagttggctgggtgcaatctgagttcaagtgtcgggtaaaccgatccaattcaatgaaatgacttgtatcgatagagaaaatcatgcgtttgttttaccttgattattcatatgtatgtttgtttcattttaattgactcattttcaaaaagtttgactaattaaaattggatttagtacaataaatgagaaacaatatttcacaagtgaatgaggagagggagaattgtagccctctacctcagaatattgttcttgatgtggatgagttgtgaacttctattttatgtgatttttttggtttttgtgagtcttgtatgatttccttgttctgggaagaggagttttaatggtgcacattttgaattgaagtactaaagaaatgtataaggcaattattatttttccccattatgagagtttagaatttcaaatgtgattgttgttgccatctaacatctcctttacctcgtgattattttgcagtcattgattgtttttgctaaacccatcaaatttgc

SEQ ID NO: 99317 - DNA, 1007 bp, Vitis vinifera
  Intron number 1 from transcript GSVIVT01032386001 (locus G SVIVG01032386001) derived from phytozome v7.0 (chr-ID chr1 4; pos 26869767 to 26870773)
tgaagacgtttgtggtcaggtattgtctgatttttattttagttcttgaatttttggaaatttgaatttgtggttttttttttgtagtcttgggttatgggtggtcttcatttagctttattttgaattggtttaaaatagaactattttttcatttaccaatcgtctgtttccagatataaaattgtagatttttgttatagtcattctaaaccctagaaatcttgagtcctttactagggttgatttgttctttccgtttacaatttcctgggtaaattattacggcaacgaattcgtaaggttttttttagttcctttaataatttttctttctaaaagctggttttctgtgtgacaatgtgtttgtcactctgttctctttgaatttccatttttccttttattttattttttcgattttgatttggattgagtagaaatggtttaatctttcttgctccaataattgtttctaggcacatatacaaattgttattacgcccatagattttgtcaattgataggtttctcctctgtttaaatctgtttctgaatggtttgaagcaataaattccttttcttctctggggacttgcctcttttattcaaatttcaaagtgaaaatgtactactagggaatgtagaaatctatggttgtagcccttgaattataagtttgtaattttgaatttaataatgtgcgtatgtacccttttcaaagcattttcgattttgttttggtcttaaatcttgcaaaaaggtgaaccagtgaatttgggtgattggcattaggcatcttactttctttgtttgatgatttccttaatgatatgtgtttgaatgtagattatctgataatgtgatagaatatgcgggacaactggacaagttacgtttgagcttttattctattaaattccattgcttattttgaaatttagattggattcccaatatatgaatatcttagaaaggtttttattttgaactccagcaggcatccc

SEQ ID NO: 99318 - DNA, 496 bp, Vitis vinifera
  Intron number 1 from transcript GSVIVT01038730001 (locus G SVIVG01038730001) derived from phytozome v7.0 (chr-ID chr1 2_random; pos 9347 to 9842 reverse strand)
acttccttaatagttgattttatattgggtgaattgtttgttttggatcaaaacaacaatagttagttttttatatgagaattatatggctcaaggttggcatgttattgactactaataatcatcagtaatattgttgttggtgtgttttgtcttaataaaggctacattaagggtttatcacttttaatagaagtgcatagggtttacttaaaggttgtttgtgttgagctaatttttggttgcatagtgaattttaaagtataaaaggaaaacttgggtaatagccaaataaagaaaaacaaccaaagctatgattgataattttgcgtttgaaaatttcgtagatatctaactttttcaattttgaagagcatcttgagcttatagcacaaagaaaaaaaaggagatgaaaatagaagaaactttatgattgtggatatctaaattttgtttttttgaaaagcgacttgcagcacaaggaaaagaaagaaag

SEQ ID NO: 99319 - DNA, 620 bp, Vitis vinifera
  Intron number 1 from transcript GSVIVT01034768001 (locus G SVIVG01034768001) derived from phytozome v7.0 (chr-ID chr1 8; pos 21159600 to 21160219 reverse strand)
tctataggtagtggttgataaactattgcagctatatgagcacaaaattcttatcattagaagcagtccatctaatgattgcacttatatactttcccaggtcctatatatcatatttactcttggccttttccaacccctattaaaaacatgtcaatatagccctaatttcttgtagtaatttcctcaaatttcccaacaaccaaacagaggattaaaaaactagaaattcaaagcaatcttgtccttgaggtcctgctcaagtgataaagggatgggagggtttgtgggaggttctaggttcaagtcctaatggggacaaaaaatttacctataaaaaaaataaaaaaataaaaaaaaattcaaagcaatctctcttctaaattttcaaaaaccacaagaaaacatttaacaaggatatctaaacttttgcatcattaataagctttatgcacactaataaatggtgaagatgctactattgctaatctaatcattatggagtgtactaatttcattcataggttacattgcactgaaatttctattaattaggcagcagcaaggaagctggcttcttttaagttaaaacattacctgtaaaagagctggtctgtcct

SEQ ID NO: 99320 - DNA, 554 bp, Vitis vinifera
  Intron number 3 from transcript GSVIVT01033818001 (locus G SVIVG01033818001) derived from phytozome v7.0 (chr-ID chr8 ; pos 17492560 to 17493113)
ttcaagggaattatctgggtgagtctctttcttgaacatggaaatgatagctatagattataaccatgttggcacagtgacaatcagaatgatcaggatttgagaatgtttcaggaaatgctgtaagataaaaaagccagtggatatggacctctggctaaatagttaagaaaggggtgctagtgggaggaaaacaaagaagcatgttagcatgaaaatgacttatttattattctctttgatttattttggaacttaactcggggaatttggttaccctacagaagggaatggggaattaactgataaaacaaactctagaaggcgatttttggacttaataatatgactatcatttaggtggttgacatatagactgattcttcattaattcaactgcaattcgggcttggttcccaacatttggtcatgattttcaagattattccaatgtattaccaaagtagttgatatatggacttctgaaattattaatgttttgcttatgtttgaatgcagtcaataaagcctatcagtattcatcgattactagt

SEQ ID NO: 99321 - DNA, 607 bp, Vitis vinifera
  Intron number 1 from transcript GSVIVT01037210001 (locus G SVIVG01037210001) derived from phytozome v7.0 (chr-ID chr1 8; pos 27952865 to 27953471)
gctctcttgcccgtgtacgtttctttgtccttcctcccccctcctcgcatttcatctctacaactacaatttctttcatcatttctttaatattttattttattttattttttatgaataaattattaaatatttttcccattaagtgttgtaactgtcctttctctctaatttcaaatcaaacgattgttgattttgttcttaactatggacgttttgtttgtattttttgaggtcaaaggttagggtcaaaagatttctagagaaaatcaaaagggaaaagtggaacttggattctacattatcccatatgcatatagatcaggggtttccaccatttcagcggatatttgttgcctgactaatagcccattttaaatgattgttttagtctaccaacacccacatggtaattatcaaatgctaaattcccctttcttccctcccattttcttgggaaccaaacatggcatttaagtttaataacctcattttgctgcacttatacccaacttaaaccttggattttggttttaatactctatccaatctcatcaaacttttcatgacaggttgatttaaccggtggctactacgacgcgggtga

SEQ ID NO: 99322 - DNA, 797 bp, Vitis vinifera
  Intron number 1 from transcript GSVIVT01038096001 (locus G SVIVG01038096001) derived from phytozome v7.0 (chr-ID chr5 ; pos 23473268 to 23474064 reverse strand)
tgcagaggcaaggtgaattggacttaaccctaaaggtgagggctctgcgatatttctgattttctccatatgggtttgtctctgattctacttttcttctttgttgattctctgtggagctgcttgttcttctataatgtttctcgctcgcttgtatttgattagggcttctatggtatttttgctcttctccatatggattttggcttcaattctgcttttcttctttcgttcctgttaattataattcttttccatgaaaagttgaagatgtctcaatgggtttgaagtttgatctcaattctttctcttctttcattcttgtttatagttctttcctgtgaaatgttgttcctacttgaagtcgtttgttcttctgtcaaatttttgtttatactgtagagataaaggtttctatgatttacttttcagcttttgagaaccatttgttgaaaatatttcaaatatgacaaacggttctttcagattaatttttataaaatcatacgcttatgtacaatgcttaaactcaattcacttgtttctcagaacattctaaaaaatacttgacaacacctcaaatgtttttgagataaattcttaaacaaccattttcagtaaaaaaattcagtgtttttttagttagaagaccgttttcaaacaaacatacttccttgatacagcctaaacttgcatataatgtatatgtcgggttttttttttttttcatttcaattatgtggcttgatctgaaaaggaatcaggttataggtgtttgaatttatccggaaggaagt

SEQ ID NO: 99323 - DNA, 231 bp, Vitis vinifera
  Intron number 1 from transcript GSVIVT01038078001 (locus G SVIVG01038078001) derived from phytozome v7.0 (chr-ID chr1 9; pos 17510685 to 17510915)
ctttttcacagattctgtaaggctttcttcttcttcttcttctcctcctttgatctttatttataaaatctaatactccagctaaataatttgactacaaaaacctttggttccatgttttacctttcctttctatatgaacaaacttgtgtaggaatcaatgtagatgttatctgaaaaaacttgtgtttttttttttttaaaaaaggtttcggccccgcattcttattg

SEQ ID NO: 99324 - DNA, 846 bp, Vitis vinifera
  Intron number 2 from transcript GSVIVT01038078001 (locus G SVIVG01038078001) derived from phytozome v7.0 (chr-ID chr1 9; pos 17511005 to 17511850)
gctcaccctgaaggtataccactctttggccttgcattactgctctttccattgccatgcaaaatggtaaaccttcttgctctataattgtctccaagttctttgagcattcttagaagttttcttttacttgattttttgctttaatacagacagagcaatatcactgccacatattattcaccctatggcgaaagtttaggaatcttgacttgattgagattagttcaattcaaaatgtaaactgatgagcctgtagtgtcatcagcttatcgaatttacagccttttatagtaacctaaaatcgaatttttttttgtagttattggccttctgagtaggtgttacccaagtgtagaaccacaaatccactcttagacaagtttataatttaaggattctttaaatagttattagagttcattctagatgaaggttccctcccttttctgaaaatttggtttctgctgcaaacatgttcggaacttcggtatcatttcatcagtttatcttttactgtttacataaaaggcatacataacatcttagtccaaataaacttttgctgcatacttaaattgcacgaccagttcttttctaagtgccgttacactccatttagtttcttattagcagatggaagaaaatttttatgaccaatggagctttttatatgccataaagttgatttgtaattaatggaatgtgcttgagtttgaagtagtcaggtagatatctagctggatctgttctgccaactgacttacttttggaccctattatggccattgaaatgggaacaaggttttcaatctgataacttggttaattctcatgtaggagagt

SEQ ID NO: 99325 - DNA, 630 bp, Vitis vinifera
  Intron number 2 from transcript GSVIVT01036346001 (locus G SVIVG01036346001) derived from phytozome v7.0 (chr-ID chr1 8_random; pos 4023904 to 4024533 reverse strand)
gggattcattgagaaggagactgtcagtttcttaggtattgtctttttcttcctttctttgtcttctccatgaaagtaatttatggttttgagatttggattggagtatatctttaatttgatatatatatatatatatttgtggtcttttacttaattggtttgattataggctgtgtattttttttttctctattttggttgataaaaaactaagactatgaaaaaggatagatactttgaagcccttatcttgcgttgtggtttccaaaaatggagaatcatatgttcttggaattatgaatcttttatattaacactaggctaatatagatcacttcgtgtgatttcttagaatatttcctggttcattaacacatcgtctagagtttcatcggttttgaatgatctctgctctatttaaaatgattgtgatttgtgtttcattaatttgatttctcttttcttgcaaatggatcactggtttgggacctttggtgtttgattactatgattttacgggttctactcttgttctagttcttgtagtgtcacaaaaaatggtttttgtctgttccattgttttgatttgcaggtgctcatagcattggagtggttcactacaaattc

SEQ ID NO: 99326 - DNA, 1048 bp, Vitis vinifera
  Intron number 1 from transcript GSVIVT01032087001 (locus G SVIVG01032087001) derived from phytozome v7.0 (chr-ID chr1 3; pos 22853505 to 22854552 reverse strand)
gatccctcctttgtcctgctctcagtttttccgaggtaccaacaggggataaaaaatcatgttttcatttttttcccattttgttgttatgtgatccgattttttgaaaatgagattcggttttggggtgttgttgtcatgaaaaggggatccgcatttggttgctgagaaaatgttgttttcatttttggttgaattttttattttcaaaatttttggtttcattttgttttctctggtttggttttctgtttatctgagcttttagttgatttatgtgtagtttttccttttttttttgggccatatgttgtggttgataaattgaattagaaaagtgttttaaggtttttgttatgttgctgatctggttcggttgaaatgagcattatctgtatttttgaagaattttcctttctgtatttcgattttaatatgttgggctgcttaagaaaaacttagtgattttgaatctcaatatgttgggggtaaggaaatgaaacctccattggaagaggggtacggaggaattggttgcttgtttaattgaaaccaatgattctggaaatgcaattgcaaacacactttgaaaaattatcatccgagagtgtcatttttccctgtggattcctatttccaaaattttgtgtcttaacaggggaaaaaagaatcaaacataaatcactcacttatcgaacatgttgtgttatgttgtgcattttttcagaggctgtgcagtaatggtcgtttattccaactaataggtggagtgggatgtgatgttctgacgtgtcatgtgacacttttttttctcttaaaagcatcattccccatttgtgattattttgtttttcgataggcaaatatgaattctattaaaaaaaacgcctagcaaaagggcacacaaaagcatacacagcaatattattcaaaaacctttgtggttgattatttttaaactcgtaatctctacatttttgtttattagcttcatttctttgccctgtataatttttatccatgttattcatacagttctcaaggaatt

SEQ ID NO: 99327 - DNA, 560 bp, Vitis vinifera
  Intron number 1 from transcript GSVIVT01031635001 (locus G SVIVG01031635001) derived from phytozome v7.0 (chr-ID chr5 ; pos 19291333 to 19291892 reverse strand)
gcagtggagggaattctaggcttagaaacaaaaatgtaagtataaattccaatcctgtcattcctttttctttgattttactgcatacgattgaattctgaactggggtttgggctttgaaatcttcctcagctgttcttgatctgaggttcaagggatatattcaggtggaaattgagaggaataagaagaaaagattgaatacttcttcacagcttctcactcctttggttgatagagagaatttgtggaaatatttcaatattcatctgatattttgctttttcagtttggtttcttcttcatagaatggattgttctttttcatcagcataagctagaattaatttggggaataaacttgatccagcttaattcctttactcttcttcaattcccttttttttccttctgtcttttccttcaaattctgtggttgtgtttgatcaaacgccttagaggagtatcgctgtggactatttccagtaaaaatggcatacttctggtggcaaatttcaggactttttttcaatctgttacttgttttgttgaacagatcc

SEQ ID NO: 99328 - DNA, 814 bp, Vitis vinifera
  Intron number 1 from transcript GSVIVT01031756001 (locus G SVIVG01031756001) derived from phytozome v7.0 (chr-ID chr3 ; pos 4076055 to 4076868)
tagttaattaaatcaatttttaaattatgaattattatcaaaaattaatattatagcattgagtttacccgtcatattagtctaattgatcaggataaatactgagaagtgtagtctcaataagtgttattcgaatcctgccactaatgataccgagtgaatttacttggtgttgattgttgtgaagggttgatatatgaggtttgggttcatagtgtattatatactaaagacacaataaagtcatgactcatttcaatacgattttaatttattatttttcttacggattgagttaatatttttatttttaaaattattaaagtcattaaaaaattctgcacattaggtttcatttgatttgaagtcaaattgtcaaataaaaaaaattagaattatgtataaaggagaaacaatagaaaagcttggtatctaagcttatcttttattaattaaaaatgtgatttatcatttaggcactaattaacgttaactaaattggagggatgtttttgtaataatcaaatatttcaggggaggaaagcacaattttgcgattaataattagcttctccagcaagccgccatatttaccgccaaatttggtgattttaaaaaacggcaccgctctgtgtttggcgagaacagtgatagttcacagtgaacctctctccgtaaaacgaacgaagaagtcttccatggaagaatacgacgaagaagttccttcgtcgtccgatcccagtgattccagcgacgaatttgctggcgaaagcgaagaggaggaagaggaggagaacgacgacgaagaacgatc

SEQ ID NO: 99329 - DNA, 806 bp, Vitis vinifera
  Intron number 2 from transcript GSVIVT01031756001 (locus G SVIVG01031756001) derived from phytozome v7.0 (chr-ID chr3 ; pos 4076916 to 4077721)
tcgacgctctcttgaggtccgtataatttatttgccgaacaacttagattttgtgccgattcgagagcagttttttcgttccaatctagggttttaaatttatgtattcaatctcgtagtgttgtatggttttgcgtgaaatttgcaatgcaaggtttgttttatgtttcctactatgaggattattcaatgtatactattttagcttcgactaggggaaccgaggacaagagaagaaaatgaattttggctcttgttatttttggtgctttgtatgtggaaaatgggaaactcaactcaactctattgagttgaatagcagtatttagaattgatattttacgtccttttctttttaagcttctcttgcatgtttgttggcaatttgaaagggagtgtaaatgtcaacttatgatggtaatttagtatgcgatttcaattttatgctgttattgcaatgtggtacgtttgaatttgttggtcactgctcacattggcttttcatcagcactgtcctatcttgaattgtcattacattgcatttcaatcctgattactgtagagtgattttagtaaaattggaacttaaatttgataataattcaccaataaatgaaggaagtcaaactgttgatttgaaagttcagcatacaattccctataaggctctaatcctagtcaagctggttaattactattagcgtttttttttttaaagtctagattagaatttgtacaagttgtcatggaattttccttgtgatcttccagaggtaaccttgttttaagaagacaatcgttacttc

SEQ ID NO: 99330 - DNA, 598 bp, Vitis vinifera
  Intron number 1 from transcript GSVIVT01037817001 (locus G SVIVG01037817001) derived from phytozome v7.0 (chr-ID chr3 ; pos 7558982 to 7559579 reverse strand)
gtttctcaattctagggtttttcagcacgattcaggtagcttcctttttccttgtttcttttgtttggtttgatttggaattcaaattctcgataatttctctgatgctctggaaattattttctttacttcacttgattttttatttttttggccggttctgttttctctgacggaaaatttttccataagaacttcccggggaaataaaaattccagtgaatagctttgaagaaaaattcggctttttcgggaagtatcttttgtcataaaaaaccatgctgtgaatttcacttgtttaatcgcttcatgtattattagttgttgtttttcatttttggagtcaaatttttggggggtttgaatgctgaaatcaatgtgcaaaagtttcgactgttgggttaaactttgtgaaattgggtttctgattttcattgtgttcatttgatggggtctgagtggtccaaagtgggtatttatacttgaggatcaagtttattttttaaattaatgtttgataatttagtgtttaattttgtggtttaactatttgctttgttttgggttaacttctcatgattaattttctgcttcagac

SEQ ID NO: 99331 - DNA, 765 bp, Vitis vinifera
  Intron number 1 from transcript GSVIVT01031148001 (locus G SVIVG01031148001) derived from phytozome v7.0 (chr-ID chr1 4; pos 1715110 to 1715874 reverse strand)
ccccaaggcccccaacaggaggtatttttttttcttccttttatttatttcttttattttatttgttctcgctgtttgtttacttaggattcaagaggagattgcctttgatgtttctgttgctttgttgttgattacgatgttcttgtgttgtttgatcggtgatggaaaaattagggtttcgatttccttgttgatttatttgtatggctatgatcatattgggaggacttgaaattggggttgaggattgagaaagtatgttagattttgaactaacatacttttgtttgttcgatttcaaggcagaatgagtggaattttgacctctactccctgtttggttcctgagaaatggaataggaaaaagagaaaaagattgtaatttggacgtttgaaatttttgatacaaaaaaccaatctggagcagaaagttattcaaacataatttttcccactccatattaaaaccataatttatacgatatgttaaaaaaacaggggcctcctctcaatcgaatttaataaaattatgatttctttggctgtagttgggttagattttgaccccttttttgggagattgaaatgataaaaaaaaaacctaatattaaaatgtagtttggttccttgttctacattttcccagcaatattgtgtgatttcttagagatgtttcttttcttgcaacaaagattgatttgattatctttttgattcatgattgaaggctaaagaagaggaacagagactcaagtaccttga

SEQ ID NO: 99332 - DNA, 816 bp, Vitis vinifera
  Intron number 1 from transcript GSVIVT01030605001 (locus G SVIVG01030605001) derived from phytozome v7.0 (chr-ID chr1 2; pos 7105983 to 7106798 reverse strand)
gatcttcctcaggactcagtcttggccaggtcagaactcaacttctctcttgctgtgattctcatatggacgggagtttaaatgccctttgatctggttttctgcttttttctctctctgattctttgacaaatctacttgagttttcattttctaggacggtggtggttgttgcattaatgggttttcgattcacttttatcatctcctctcctcacaacattcgacacagcagatcttttttccaactcttcttccattacagtgaaagacttcaaaacaaaaaaaaaaaaaaaaaaaaagaccgattatcttagtgattatctattagcaagactaattttctatttcaagcaaaatccttctcgatattcgaaaaccgcttaaaagttttctgcacacacacagaggaaaagtgaaagagggggagagagatttcagacctataaatatttcttcttcttcattttttctctggtggctcatttttttttataaatatattgtagcatatgtttttaaaataaaaataaaaattgaaacgatgtatagacaaatagaaatatttttgccctacaaaatcaggtcggttgctttgttttcatgtagagatatcaaattagggtttccatctgcttgccttccattttggtcttggcttcttcttatatctgcagatcttcatctcgtttattttatgaagtggagatgtttttcgttttgctttcttttgagtggtaatttccattctgttgttagattgaaaaaccataagcttcggaatcttaaagatctgtagatatgttccagccaaat

SEQ ID NO: 99333 - DNA, 764 bp, Vitis vinifera
  Intron number 1 from transcript GSVIVT01033960001 (locus G SVIVG01033960001) derived from phytozome v7.0 (chr-ID chr8 ; pos 16287354 to 16288117)
ggggcgcgattctcgctgacctctacgcccgtaaggtattcttcttcttttcgtttttttttcttcttccattgatcttttcctctgtatttattccattaatagggttggcgtccccgatatcatcgaagagttaggtggctctgatttcatttattctgatttttataaagaaaattccatttcattctacgtgtgtcacttcaccttccacttttgatagtctacagtgccggtgttgttggtggtggattccacacgtcagaatctgactggatttccatgaattcctgaattacatgattatatccatattgaatggaaacccacaaatgaggacaaaagtttgtgagaaattgcaaaagtttgctacagtctacaattcatttataggccaagttggtggcggcggtggcgttaattctcactctccatctggctaatcttactattccagataaagggcatatcagggcagccatgacccagggcgtacttgtcctacttttccctttgtcttcattcagaaaaagaatactcattttttatttttttggtttatgttgcaatcattttacttatattttgaaatatgcctgattccagaaacacctagaccgcttgatctaaattgactaattaagagattaagatgaagctaatactcaaatcaatattgtgaaatggtcaaacagtggtatgaaatgggcgtttgatcctatgtttaatacgactgattttggcgtggaattgttcataggcgg

SEQ ID NO: 99334 - DNA, 624 bp, Vitis vinifera
  Intron number 2 from transcript GSVIVT01031657001 (locus G SVIVG01031657001) derived from phytozome v7.0 (chr-ID chr5 ; pos 19682119 to 19682742)
accccacaaccagaaggttgtgtgtgtgtgctgtagtatgtgtatttcgatcccttttcttcaattgatttagtttatattctgtatttcaatcccttttgtgttgttgttctagggtttctgagagaaaaaagtaagattttatttttctgttggaaaccatggtgaaaagaattgtttttcctggattgatttgggtttatgttgtgtcttttttaatgttttttgttggcagaagattgtgttgttctgggtttgtaagaaaaaagtaagggttttgttttgccgttgggaatggctgtgaaaacagcatgtttgcgctggtcttcccaactcctgtctcatgttgcatctaattgtgttttattttagttttccttttttttatgagtttctacctatgctctagccgctagtttccgctttgatttttttagggtatctagatatttggaggacgctactccctgtgagagtggttgtttccttaatattttttttttgggttaaatatcatatggttttgtccatgcaaatgatagtgtttgctactgttttgatttatttatatattttgttgggttttcaggataattgggttttgggggcagttgaaggatattc

SEQ ID NO: 99335 - DNA, 756 bp, Vitis vinifera
  Intron number 1 from transcript GSVIVT01035450001 (locus G SVIVG01035450001) derived from phytozome v7.0 (chr-ID chr4 ; pos 1358873 to 1359628 reverse strand)
gacgataatctcaagtggtcctttgccttgaataggtggggtatcccttgttcatcatcttcatattactttcttctttcatggccatgcatgcatgcttaaacggttcttgtaggttctttttcatctccttttattttttattttgctaaataggatgttgaattcaaatcttacaagattgaactgttaaaaaaatttataatttacatgggaataaaaaaaaattggtagtttaacatgagagcttccacgagaggtcatatgttgctcgcaattttcatgtttgtttccttaggtaaaaaaaaattatttgcatttgtttacccttggctagctatcaactatttatctctgtaagtgttaacatgagaattttgataagaggtcacgtctacccgtgttaacatgagaattttgataagagatcacgtgttactcaaaatttgcatatttgtttccttattataacaagaattatttgcatttatttacatatgaccgactctctctccataggcacctacgatgatttaaaacgtaatatgaatttttcatttaggaaaattggtaatttaacaattttttatttatttagaaaacatgttttcatttattttattgagttttccccatttcttttatggttttccttcatctttagtaagaataatggaaaggaaatcaactgaaaacctccataaccattgtctctccgcagtgtgctgcataagggtacaagccagtaccaggaca

SEQ ID NO: 99336 - DNA, 995 bp, Vitis vinifera
  Intron number 1 from transcript GSVIVT01038244001 (locus G SVIVG01038244001) derived from phytozome v7.0 (chr-ID chr5 ; pos 24576893 to 24577887)
ttgccacaaagcagggtcaccttggtaagaaatgattctaattttccattctttatgtattaattaatgctctgtctaccgtttaggaaatgtaattccgtgaagaaaccagtggctttgtattgggaggtcatggtctaggaaataaactggactttattaggcttattcattgtatgttatgcaaattcactagtaagatagcttacagtaatatgatcacagtgacatgcaattttgtccaacattatggttatgttttgttttatgattctgctttccattgaaataattggagcttttgttcacttctctttccttgttcttcaattttggtgatttcctgagttggcatttacacactccttggatccaaagccatccgatttgattttccatggtatttgaaggaaaaacttatcaatcgaagtggagtttcagtagaagagaatagaggttttttgagaaatatgaaaatgcagattgacctcagtctatcgtcatgcgaagcatgttagaatagtttccttttttcctagaatatccacatgctctttttctttttggagaaagataagatggtaatgccatttcttttttgttaaggttgaaatatgttcacctgtaaattcctggtttgctttctgctttctcattttggactggtgaggacctaatatcatatggattgggttcttctctctctctttgcatttcttttttcaatactttgagctgtcaatgaagccaaataactgtgcatacacatattgttattctctttttagcaatcagtttaatgatgattaattatgttgatttatcttgcaggccatgttgccatttgggtttttaagcaaattacatggatgaaagcctagtttgtttaggaaaatcttgatgatatgctgttctttctattgatgaaccaaaatttgattttcttaaatgatcttgcagaggtgttgaaggaacttttgcggtttttccccaac

SEQ ID NO: 99337 - DNA, 515 bp, Vitis vinifera
  Intron number 1 from transcript GSVIVT01031758001 (locus G SVIVG01031758001) derived from phytozome v7.0 (chr-ID chr3 ; pos 4095266 to 4095780 reverse strand)
ccatttggcttctgttgaggagcctcttgtatcatgtgagtaaaacctcttctacaatttacattctgttaggcctaagataaaacttattgtagaatatatcttgtccagtagcacaagaagaaaatgtttctgttgctatctattaattcattaagcacaaaagatccatggtcttattattggtgtcaaattgcttactagtgtttctcatgcattcaaagcaatgctgaaaaacaacttttgccatcttataattttgaatttcattgttatttgattgtattaactgttctatagaatactaaatatcacgtagaagtgaaaaaattgaaaatgctgtaagcacagtatcaacccttttacttgaaccaaagggttcctggagcctctcaaaggataagtctattgcttgtcaacagagctcctagtttaattattagattctattacttctgtgcctgtttccatgagttggcatgaactatgtatttattgatgcaggtgtacagtta

SEQ ID NO: 99338 - DNA, 631 bp, Vitis vinifera
  Intron number 5 from transcript GSVIVT01034309001 (locus G SVIVG01034309001) derived from phytozome v7.0 (chr-ID chr9 ; pos 14662188 to 14662818)
gaatcaagggaaggcagagccgcacgtatgtttgtcatccaacatcttgagttaattttgcttgagatttgatgtccatcttttgttatctattacctttgtttttatctaccgaaccatacataggtaaggttgtacacatgcatacacatgaactcccctgtacgaacacattcatctctgacctctatggagtttgattgctgattctttttttgctatttgcatccctctatctgcaatgggtcaaagaaatgttctcattagaaaagctcctaaccacttgttagctattagttgcaaattagattcaattccgcatacaatcttctttagcacttataacttatacaattctttcatagtgttttgtatattagctttcatggagttatatcatgtttaaagagtcatttatgtttttgcagtgaaatagatctttcttacagtaacttctctgagcaatctgcactaccttcttgtcgagatagcttgcaagaactatttcttagtaaactaaaccttgtcaagctttaggcgcagtttttctttcattcactgtctacattaaattatcttcttttttgtttcattaggaacttgttcagaagcttttctgaggaggggaact

SEQ ID NO: 99339 - DNA, 508 bp, Vitis vinifera
  Intron number 1 from transcript GSVIVT01032526001 (locus G SVIVG01032526001) derived from phytozome v7.0 (chr-ID chr1 4; pos 28084194 to 28084701)
tcccttctttgtctcttcagcctcggtttcccggggtaaagatcgtccttttttcccttttaatttcatcgatcatatttagggtttcgtttcaacttctttcaccttgttattaacacgtcgatgatctttttcagtatctttatccaccgtttggatgctgagaaaacgaaaatgaaatcattagttgttgcatgtgttctgttaatcgtgaataatgcaagagattaatatgctatgtttttgttgacaccaagagccttattttgtgttaaagggattttgaaataatatcactatatatggtactgtttgtgagtatttaaatgaaccctagtcgtttcgatattgttgtttaaatgttagggtttttaattcatcttcagcattgtcagtcgtgtgaaggagtatagtataggggttttgtagcaaatcaaatgaattttgatttttcatgggattgtgttatggtgcagtctcaggacttcaaagctggttttggatcata

SEQ ID NO: 99340 - DNA, 312 bp, Vitis vinifera
  Intron number 2 from transcript GSVIVT01035966001 (locus G SVIVG01035966001) derived from phytozome v7.0 (chr-ID chr4 ; pos 6597917 to 6598228 reverse strand)
ctctcactattccagtttcttctctattaactcaaactactacactttttgtttgtgggtttgttcgttttgttgtttcagtactgtatggtttggttttatcagcatttttgaaagcatttttcttgctttcaggagataaaaatcaatgcagtttttatttttattgttgttttttgtacttatttaatctctaggcaagaaaagtagtttggaaatgctagccaaacgggtttctcagtctgtacctctgtagaatgtccatatttagaagttgattttgtttccaggtggcccggctcaaaagactat

SEQ ID NO: 99341 - DNA, 924 bp, Vitis vinifera
  Intron number 2 from transcript GSVIVT01032799001 (locus G SVIVG01032799001) derived from phytozome v7.0 (chr-ID chr1 3; pos 667839 to 668762)
ccaagcaggtatctcatacatacctgcctatattttttttttccttttttcctttttactaatctctaaaacaaatgtttgacatacatagatacatacatgcatgtatatatacactcaaatgtttgtcaccccttgatataatgttgtgattctaactaattaatatactctcaagtctcaactaactctttagtcgagagtgatgttgtggttctaatcaattaatacactttcttgaatcgagactagggtggtgtttgtttttatacttaattttaaatagaaccttaatgcttaataatgttaaatattgggttatttgtttttgtagtattttatttctattaagtattaaatgtaaaaaaaaaaaatcaatatgttatttttctatttagaaaaagttacatattttgaatttttctatttagtaaaaagtttataataagtcataaaaaaagtagagaaacaaacaacctaaattttgaaaataaattgtttttaacaaaaaaaacaaataccatctaaggctttaatccaacaaaaatttgatcaaaacatcgttggtgagtctacttttccatttttcacacactttagaactagtccaagggtttttagtttggtggctagtcaaaatattgaaatgtacccaaaaaaaatgccctgttttcccaaatcatcagaaaaaaaaaaaaaaatccactctcctgtgattctctcgttgatcatagcggcactctctccgaaccctttttgtcttttagtctactccactatcctctcaaactcttgttacattattcttaagaaacagacatgaacagttagtcgtttatgttttgaagaagatcaatcggtgtactaatgtgctccaattaataccgcatgcagttatttgattttgcaaacagtcaccaaggc

SEQ ID NO: 99342 - DNA, 794 bp, Vitis vinifera
  Intron number 1 from transcript GSVIVT01037330001 (locus G SVIVG01037330001) derived from phytozome v7.0 (chr-ID chr6 ; pos 15577763 to 15578556)
acacgcacaaatcgagaagtccaaatttttttttctttttctccccaaatcaagaacactttcaacaactatgaacaaattacattacagagcctatctctgcttcagaaccagccatttctctgaaacatgaactgaactatggtcaatcaaagccttagccagttgccaggaaaaaatgaatagtacatcttagaaaaacaaagagggaaaagaaggattcaatctccaatcatagccaactcggtcttgactcatgcaagcccagttcaattgaaagcttgaggtcgcaggtttaaaccagtttaacaacatttgaaacctgacctataaaaactttgggtcttacacttgcctgagaggcaaaaagaaaatggacatcgtgttgtcctttgtggcaactataaatctaaaaatgaatctaagggaagaaagggaccacattcaaatataagcagaagtatattcaagtcatttccttgaataatgtgtttggccatccaaacaaagctcgtggattgactgctacaaggttatgaattgtgaacaatatgataacaggatggttgaaagcaatctccctttatgtgattctgttgttaggcaagaagtcaccatcagccaataatctgtcaagatttgagtgtctgaaagatggaatcattctttcatcagcagcacgaatataattagtaatcccgaaaagagaaaatgtaatgataaagaaggatgagagaaccttcaaagaaaaagaaatacaggataggaagagaaggtaaaaaaacagaggacaa

SEQ ID NO: 99343 - DNA, 699 bp, Vitis vinifera
  Intron number 3 from transcript GSVIVT01038710001 (locus G SVIVG01038710001) derived from phytozome v7.0 (chr-ID chr1 6; pos 20732520 to 20733218 reverse strand)
gtagtttttgaagccacagtgaaagattcacaaaggttagttcaaattattgtttaatttagatagggcacatttgaatgtggcatggatattttgttgttccattttgtttttcatatcattctaaggtagaaatcgataatctataatcgagcttataaacaatgataggtatttcataaatgattataacatgttaagacattgtgggtccatttgatggtggaaatgaaaatgaatttttgaaaaatgttctcatttttggaaatgaaaaaagggaacatgtttgattttttttttcttttcattgcttttaactgttaaaaagtacttgcaaatatgaaaaatatcattttgacatcttctaaaatgatccatttttaggaaatgtttttaaaaacatgtccctaggcacgtcctgtgtcatttgtatcctttttttctgaaatagaaaacaattctctttcccactaccaaatagcccctgcttatttcatgaaaccatgtaacaccattagcttggtggattattcccatgatcttttgttggtccattatggcttatggaatttgaatttgaaactttatgtaaaatatgagggaaccttcaaattctaagtgacatccaaaaacacttataaaatgttgctgaagagattaaagcttaatgtttggaatcatggacttgcagccctctga

SEQ ID NO: 99344 - DNA, 600 bp, Vitis vinifera
  Intron number 1 from transcript GSVIVT01038710001 (locus G SVIVG01038710001) derived from phytozome v7.0 (chr-ID chr1 6; pos 20734571 to 20735170 reverse strand)
cgtttcattttctattcgaatctcttcaatatctggtgagtctctgaatttttcgttttcggatttctaacttctcatttccgtttggctgtccagaaaacggtggaaaataagttgtgatcttagttctttgattttcttgatccatttaatgtttttaatggtcttcgctgagctgagcatatttcgctatttggatcggctacaattgaaatagcggacaacatgaaaactcgaattgaaacttcctgtttccgtttggtttctaagaaaccgatggaagataagttagaacctcttttgaaaatttggttcattatttgttttgtcctctgtaaatggaggaaatttagtttgagttgagcctaattcagactactagcctggattttcatatcagaatctaaacggctgaggaaatatcggggaaaaaggagattggctgagctatgacttcttattgtaaatttttacttggaacgacggaaattgatcataattttacttgtttaattctacttatccgattttattgatttattttatgttgtcatggtcttggcagagttgaacatagctcaaactatttggattgatcaa

SEQ ID NO: 99345 - DNA, 375 bp, Vitis vinifera
  Intron number 2 from transcript GSVIVT01032361001 (locus G SVIVG01032361001) derived from phytozome v7.0 (chr-ID chr1 4; pos 26710729 to 26711103)
tttttgacgaggctggagttgtggagattgcagaggtaaaatttttatttttatttttatttatttatttttggttgtgcttagcgcctctttcgttgatgagaaaattggggagaaggaaagaaagtaatcgtttttttaattatatgtatttatttttcattttggttgagtagagtattatgatttcttgagtcccatatgatgaaaaatcaaaggccccaaaaaattcatttccttttctcagtaaggaaatggactccagtctctcttaattattggagcataggggattttcttcgcatttggggttctgatgtttttctgtttctatttgtaggtaatttacaatagagaaacagatcagagtcgtgg

SEQ ID NO: 99346 - DNA, 288 bp, Vitis vinifera
  Intron number 3 from transcript GSVIVT01037479001 (locus G SVIVG01037479001) derived from phytozome v7.0 (chr-ID chr6 ; pos 12972259 to 12972546)
cgtccaaaccatttcgttggattggcgaaccccaggtaaccgtcaatctcttcttgtccctattttctacgcctctacggtcaatttcaaaacggtcgtttttcagtatggagtagttggtatttggtgaaacccttgtcttgttgactacgttttgaaattattaagcaccaaaaaactgggggaaaaagtcaaaacaagaggaagtcttggttgtccattaatcattaattctgtggaatattgttttcagactctgctcatcaacggaagaggccagtacaattg

SEQ ID NO: 99347 - DNA, 706 bp, Vitis vinifera
  Intron number 1 from transcript GSVIVT01036531001 (locus G SVIVG01036531001) derived from phytozome v7.0 (chr-ID chr1 4; pos 23106802 to 23107507)
cagatcttcccagaactgtaatgtgcactcacacccccttaaagatctcacctttctctttctgtttcctcggtttccctttattttcaatgtccatgtggttgtcttgtggtttgaattttgatccttgctcaatgctttgatggttttctccaggatttctttctgggtttggatgttctgtttgattggtgttgtgggggagttgtattttgagttctgttcttttttccgtaatggggcggacagtgctgttttgggtaattgggttttctttttcttaaccaaatatttctttttggtttttcgctttatggtctgtttggtaggggagaaaaagtaggaaaagggaaaaaatgaaataaaattcaatttttattatttggggcctgggaaacttcaaagctccattatactgaacctaattcaaccatgtagattagtgtgcatgaaaattttaaatttaggttatgaaaatgacatgaagtgtgagattcaaaatttaattttttttctaaggtcggtcgtagtcttttatgctttgtttggatctgctgaaatcatacccaccaaggttttagcacaattttctccatgagtttggcctaattttatgtgtactgttttatgttaacaccttcttattgttcatcttcgtctccctgatacagagtccattgcatcgaaaattctggggtccggtaag

SEQ ID NO: 99348 - DNA, 983 bp, Vitis vinifera
  Intron number 2 from transcript GSVIVT01038595001 (locus G SVIVG01038595001) derived from phytozome v7.0 (chr-ID chr1 6; pos 21618216 to 21619198)
ctttctggcaagacctcatttctaaagatttttgggtaattattaacttgtagattaggcccactttctagtctttccttgctaatcttttatgtagtttggtaaacttgtgctcctcaagaaagggaaatttttttcttgagggtgagggcagatttatccactttcacccatttaccttcttagaattcaaatttatattctttatatttccttcaaactctttaggggcaatcttttaggtagaggtcatttgagattgttaaccctaaaagtgtttttaggctttggtaaggtttgatgagttgctaatatggtactttgcatcataacattaaaactttgattaattagaagtctcgggttcaattgaactacaccatagtatcatatctcccacatccatgtattgctttatcatcgatttagctacattgatttttacttttagatgatactctatatcatagtatcaaagctttgattaactagaattctcgagtttaaattgaattgcatcatggtattatatcccccacatacatatattgttttatctctatccgatgtgagatgtcacaaacaccccccatgcagacacaatgtcctcgttgtgtttcattgacagataaacactcttacggagtcaaacaaaccccatactaaggttagatatcgactttgataccatttgtaatggtctgcttccaaccgtatatatattgttttcttttgactcaaaggaaccttcacagccttaaaacgtgtgttcatacttttatagcgcccaaaattttccctttatccgatgtgggatgtcacataaattatataaatttttatatcctgtcatatgatactttacatcatagtatcaaaactttgattaaccagaagtctcgagttcaagtcctccccatttgattatctatctaattgtcttcatataaagggaaaatctgggcgagcattcttgttccacc

SEQ ID NO: 99349 - DNA, 429 bp, Vitis vinifera
  Intron number 1 from transcript GSVIVT01032820001 (locus G SVIVG01032820001) derived from phytozome v7.0 (chr-ID chr1 3; pos 500259 to 500687 reverse strand)
gttctgattggaaccctagcaatcattcaggtattcattcttggtttgtagttttcccccactttgtttggttctcgggaaagaatgagaaaacttcttaagaaatcgagctatttctgagggcattttcccttcgattttcttcattctttcagaatggagctcgtgaattgggttggtttgtttcgattcaaacatgggttacggggtttgtaggatctagggtttggagtacaatttagattttgaaatttggttattgatggatttattgaactcgtaattaggtatttttcatcgggaaatagggtttactcttgagtctatacaagtgagaagaatgaaattattagaatcttttattcttatattgatttttttgttacaattgcagagtcaattgagtgccacagtctcaattgagcagaa

SEQ ID NO: 99350 - DNA, 924 bp, Vitis vinifera
  Intron number 2 from transcript GSVIVT01037073001 (locus G SVIVG01037073001) derived from phytozome v7.0 (chr-ID chr3 ; pos 8187143 to 8188066 reverse strand)
ccatcaacgttgcgggcacaacaaaggtattcatcgatccaacccttcactttagaagtttgattcaaattggctcataaaatatatatatatatatatatcggttttaggcatgttttgaaattattgctcaaatcagctcttatttttagttggtttgaaaatgcagcttttatagaaattaaaacctgcaattataattttgagattttttgtggggtttatggtggtagcggagggatcgggtgatgatgtatatttttaaggttatgatgattatgtttctactgtagtctcgtttataactttcctctcttataccaatattttgatatagtagattttcttttcttcttctttcatgtatatggttttttttacgtaaatctatatgttcttattctgattttttttattgtctattcttgttattgtataacaacataaataaataagacaaaatataaataaaaaaaggagttcaatacaaaaaaaaaaaagtgaaagaggtataagataataagacataagatggatgcaaatatacatagtatatatgttatgtttggtctcatatagttaccgatttcataccgtaatgaaacccaaatgataagttacaagttacaagttgaagatagcttactagcgttctacatattggttagatcatgtttagttttagtcccacatgatattattaatatattttctctctctctctctctctctctatatatatatatatatatatataatttcattatctaaaattacgagtgcaataggatatcagacgagattgacactgaggtctacactgatgtcacatttatctgatagcttaattaaaatttgagctattcttatacttagttattttcattagaggttccttccatctgattttggagttgaggagga

SEQ ID NO: 99351 - DNA, 777 bp, Vitis vinifera
  Intron number 1 from transcript GSVIVT01035424001 (locus G SVIVG01035424001) derived from phytozome v7.0 (chr-ID chr4 ; pos 1199828 to 1200604 reverse strand)
gctccagctctcctctctcctccacttcgcccactgtactctctctctctctctcgactctctctgattttaaccttaagtttaggcttctggtggaggttcttttgcttttgttttcccgagaaccaaacatcaggatgtggtggataaggtaaggctaattggtggaattttgttgctattttgattgtgcattggaggagactgtgacatagtgaggttgaaatcagtggggggcctgaattggtttggcaatgattcgagtttatctgccagtggaaactgtgtgctcgatgtgaatttattaatctatttttgaaaattccagatatgcagtaagatagggctagagcttttagagaagtgtcgtttgacaagatttaggcgaaaaggaagcttttgactgaagatgtctcaatgttagcttttctgtacaggcatggtcatggttaaaagagtctagggcttcatttggatcattggaaagttgaggggaagataaaagagaaggaaaattataattagatttaagctgaataaagaatgataagtcagaatatatccataatatagttctgttttagtttcctttgagttcttggcaacaaatcaaacaaaaagaagcatgttatcatgacttcccatgtagaggaaacagtgctgcaagaatgctacttctattactaattataaattccatgatttattattatggaggatggtttgagttttgttctctaatgtgccaattctacttctcttgcagctttagaagaa

SEQ ID NO: 99352 - DNA, 714 bp, Vitis vinifera
  Intron number 1 from transcript GSVIVT01036012001 (locus G SVIVG01036012001) derived from phytozome v7.0 (chr-ID chr4 ; pos 7179006 to 7179719)
cgtctcccccctggggaagattttggcatcacaaggtaaaatccttactattttggttttattttccttagaaaatcctcagaaatcaaacctagggtttggattcactctactcaaagcttgctttctttgttggagttgaaacgtgttatctcatatttttcatatatttttctccaatacattgagaagagcatatgttttttgagctgaaattttcttttcttttatctcttgaaatctattttgtgggggtgaggtcgatgatcttcatggagagggtcctttggaattctaactgaactgtttagtttaatacagtcagaaaaccaatttacggaactggacaggatttattttccaagtctagatgatttaagtcgttttttgtaatgaaccagcaagaaaaataagttagggtaatccctaccgaatagagtggcggaatcctgtgactgctatgtacaagattttgacaaaccattgttgggccatcaaattagaaaccaataatatcaaatattggttgtaacaccgtggagaagatgttaacatggagattccatgtcattgtcgacgataattgcggggtttgggagttttgggactgctttgaagttttaggtttataagtgtggagcctcagcattcccactttctgagtatccccataaacaagtcagtaattttcttttattttgttttttggcagtg

SEQ ID NO: 99353 - DNA, 307 bp, Vitis vinifera
  Intron number 1 from transcript GSVIVT01032491001 (locus G SVIVG01032491001) derived from phytozome v7.0 (chr-ID chr1 4; pos 27846704 to 27847010)
gctcttcctcgggaacggtgattctctttttcgaggtcaactttcttttcttcccattatacccttggtatttctcgtttattgtttccttctgtttggttcccgtgaaatccgatgaaaacgatctcatataccgtgttctgtgttttgttttagatttcttgaatttttatttgtttgatttcctatattttctccacaaccaaacggaattgtaatttacgtagcaagtttatttcattttattttatttttagttttctgcaatgattttgtgctatcggttgacacaggaccaagatcaatt

SEQ ID NO: 99354 - DNA, 377 bp, Vitis vinifera
  Intron number 2 from transcript GSVIVT01032491001 (locus G SVIVG01032491001) derived from phytozome v7.0 (chr-ID chr1 4; pos 27847096 to 27847472)
tgccggagaagaaacgtcgcctcactcctgaacaggtgtgcgtaaattgctgagattcgatacgtatctagaaatatgccatattaatctcaatcttataagcatcgaattccctcgacttctttttcattacagtaattattacataagataagaattttgggatgtgatttatgggttttttttactattgaaatttgatgaaaagaaattagaattttgaatcttcttttcgttgatatatttcggcaagcaattgggagttggaatctcattaaagaatgatttgaggagtgatgtatctaatactggcttgtaactttttgtgggtaattgattaaggtacatctgctggagaagagctttgaggcggagaa

SEQ ID NO: 99355 - DNA, 592 bp, Vitis vinifera
  Intron number 3 from transcript GSVIVT01032491001 (locus G SVIVG01032491001) derived from phytozome v7.0 (chr-ID chr1 4; pos 27847643 to 27848234)
ccatcctcaaggagaaggagaagctcaaatctgaggtatactaatctgcataattcattttcacttatcgaatttgtagagatccggtgattagatcttcaaaattattgtaacaatcgtccacaatccgtgatcaattagaaagcattgtaattatcatccataatctttgataaattagagaaggatttgtttctttttcctaggctatgtagtttcattctgggtacaaactcaagcttaatctgcgagagatattggcagcctgtaggtgattgggacctgctttgtatgagcttgcacccattagattcttgatataagcacaaagaaaattttgattgattctttttatatactgatagttggaaagaacagcatctgttctaaaccaaagacagtttcaagtagcaatagaggaatatacctttgtagtttcctcaaaatattcttggtgtagggtgtttgggcaaaacttttgtgcatcgagtatttgttccttttgttgtgtggaccacgcagtgtgaatgtcatatgataatatggttgctctgcaggttgtttccttaactgagaagctgcaagctaaaga

SEQ ID NO: 99356 - DNA, 777 bp, Vitis vinifera
  Intron number 1 from transcript GSVIVT01032403001 (locus G SVIVG01032403001) derived from phytozome v7.0 (chr-ID chr1 4; pos 27048769 to 27049545 reverse strand)
tatcttcttcaaggaagtggcggttgcttcaagtatcttcactttcctcgtcctatatctctttgtttggttgccgaaaataatttggagttttcattttgcattttatagagtgtaagacacaactaacaaccgagaaactggaaagtgattacttggattttctgagttggacttttcttttataggaagtaagaaactgctaagagggattcaaaattttttgttcttttcttcacctgcattttgtcactagccaattgtcttgctttttaggcttttagcaggtgattctgtattgttgccgaatagggattttggattctggcattgtgatactcttaagttcattctaaatgcatatagtatcggttgaaacttgaagttgggctgcataagattgatcattttttttaaaagaaaaataattttaactttgtatgggaatgcaaatttgatgctaatcacataagatatgatggaaaaacatgatgggtttaatggctgtataagtattcagaatagtcagtgctgcttgatatgtagcagataatcaaaagcaacaatggctatgctatatgtaagtttaagtcttaatatagggaactccatatatatgcaactttatttgcctatcaaaacaaaacaaaaaaaaaaagtcttaatatagggggttgggggttgaataggtagtcctcctacacattacatctgtaaatttttttaattaattgcttatgattggtgatatttgagttttatctattttttcaggtc

SEQ ID NO: 99357 - DNA, 551 bp, Vitis vinifera
  Intron number 2 from transcript GSVIVT01032081001 (locus G SVIVG01032081001) derived from phytozome v7.0 (chr-ID chr1 3; pos 22912778 to 22913328 reverse strand)
aggtattgttgcatcttacctccgtttggttgtcgagaaagtcgggaaacaaaggggaatagattttttgagtcagaggttttgtggttaaaaagacagagaagtttgttgttctgtaatgtctgttgttacgagaaaaggaaaaaagaaagatgtgcagaattggtgaacttgatctgaatccgactgttttttttctttttcttttcctgattcccagcttctctatttttctatgctcgcgaagaaaattttgttaaatattattgcattttaccttcgtatggtttccgagagaatctcagaaaaagaacagacaaattttttgagtctgatgtattgtggtgttcatttcttccttcctcaaagacaatgtgaagcttgtttttcccctgtctttctatacctcaatgttggtgtacatctgtcgtcgtttcagttcttatgaaaaaaaaaatcatctgtaatctaacagttttcttcttctgatgctctgattttattttatttttccaggaaaagtttgttcaaaatacgaagaaatttttgtt

SEQ ID NO: 99358 - DNA, 859 bp, Vitis vinifera
  Intron number 3 from transcript GSVIVT01036631001 (locus G SVIVG01036631001) derived from phytozome v7.0 (chr-ID chr1 3; pos 19486821 to 19487679 reverse strand)
ctctccaggtagtgcaagaggccataaaacctcaggtacttgccccaaatccttctctttgaaatgatatatatatatatatatatatatatatatatatatatatatatatatatatatatatatatattttcccttccatgtttctggcgatctgcacatatggatggtttgcttctttgttcaacttgaatgtaaaatttgaaattctttatgcccgtacttttgcacttttctagactttcctgataaccttggtttaagtccagttctgtgaatgatcggaattttttttcggaaaagttggagcttaaaccttgggtttatagcattgacatgctaaataacttcattcattagagggtgtcatggtagcttgctgacaaggtttcggggaggtttgatgggattgagtccttcctcaatatgggtttaggggggtcataattctgaaaagagccccattctggatcccatagtggcctttggaagaaaccccaattacattgttcctctttggcttgctagtcaaagttctccacttttatgtctgagattgatcgtcagatggatttttctttgatattcaaataagaatatatatatatatatatactggaagaaaaactatggcagttacatttggtagcattaatttcttgacattttagtatatgcaaatcttccatttttgggtttatgatgatatgcattccgactaaaacaatgactataacaaaccagtacaacatgcttagtttctttattttgcatgttctttatatggagtcatcttgtttagtttgatctgaccaggtgaattgactttctcgacagaagcaaacaaaactagctcaag

SEQ ID NO: 99359 - DNA, 309 bp, Vitis vinifera
  Intron number 2 from transcript GSVIVT01036631001 (locus G SVIVG01036631001) derived from phytozome v7.0 (chr-ID chr1 3; pos 19487694 to 19488002 reverse strand)
tagctttggaaattcagggctctggaatttttgtcgtctgatagttggtgatttattcgacgttgtggttgaatctttgacatggtaagtcctttcaatataaactgtttcattttggtggttctctttggtggcattttgtagctttgtgtcttgctgatttacttttgatatgccattgtgataatgtcgtggtttattttcttttattaatttgtttctctttggtttttctgtttatgtaatcgtgttagcatttgtgtattcttctcaggaaatattcaagcaggccttactgaaacctgggcc

SEQ ID NO: 99360 - DNA, 356 bp, Vitis vinifera
  Intron number 1 from transcript GSVIVT01036631001 (locus G SVIVG01036631001) derived from phytozome v7.0 (chr-ID chr1 3; pos 19487951 to 19488306 reverse strand)
acctgcgccggagaaaaggtgttctcatccttaccctcctctttctttactcaaatttcctgctccgcttggttgctcagaaaccctaggaaaacgaaagacaggataagaacaagaaagattaagccttctagcttctcgtcttcatttcaacttccattgaatgctgtgcaattcctctagtgatttgatttttaactagtaaacagaagagcaaaaaatgcaattttattttattttcccttttcttttccgcggtttgaaaatgataccagataggtcgaattttttctcatgacatttttagctttggaaattcagggctctggaatttttgtcgtctgatagttggtgat

SEQ ID NO: 99361 - DNA, 681 bp, Vitis vinifera
  Intron number 1 from transcript GSVIVT01035241001 (locus G SVIVG01035241001) derived from phytozome v7.0 (chr-ID chr4 ; pos 11138190 to 11138870)
cttcaattggtcataagaataatattaattgtagtgtaagtccccgatctttatttgttgattctgtatagcattggtcaaggcattgaatcagttcaatatttgtggtagagcaaacattgccatcatcttcttttgagtggtcataataaattatcttcataattttccccataacaatattgttatgctaagaaaatctgcaatattgctagtctatacttttttgcatacaggcttctactttttatatagaagtttctatttttaaaaacagaaaaaagaaattgtgttgaaatgaagcataagtaagaaatctgatattgttatctctattgtagttttgattggctgtttttttagatggtattgttaagaaaatctgcagtgtggaaactgtctgttgtttgaaatgagtagtgattggatgtgtggagaaatgagtgaatgacatttttgctttagtatttggtacaagatttacattgtgcctctttgatgcttttctttgtttagacctttcaatttctcttttcttgggaaattttgttgttggttaatctttgtcctgtgttattcctgtattttaccgaaaccctattcctctatgcttgaggttgattggagttgtgttgtatgcttgcaggtttacacctttgagttcaagactgaataggtttc

SEQ ID NO: 99362 - DNA, 604 bp, Vitis vinifera
  Intron number 1 from transcript GSVIVT01033307001 (locus G SVIVG01033307001) derived from phytozome v7.0 (chr-ID chr8 ; pos 21628147 to 21628750)
ctctatttccacagaaactgccaaaggtgtttatttattttattttatttatacgtaaaattcagttccctcttcgggtaccgagaaagccgaggacaagaaaagaaactcaaatttggagtccaagaaagagtggagattgtaacaaagataaatttgagattcgatgttagttttccctttttagtgaatcttctccctaatcgaacggaacttgttatttcgttccttctttggttcgcttccgatttttcttgaggtctgaaatgttctttttatgatcaatgtctgacttagctttgttatttttatgatatcttctgcagaatattgttgcgttttttttcattaattcctcctttgttgcgatttggtttgtgtagtttattaattttcaaattcttgttatttaaaatatctactagcaatctcatgtgttacaatcttatgaattttattttttatattttgaatcttattatggtgttaaaatcataatagtttcctgtgaaattcagtttggcaatggtgcatccaatatcttggtgcaattcgagacttctaacaccagttgtataatttcttagagaaaaagaggcaatta

SEQ ID NO: 99363 - DNA, 950 bp, Vitis vinifera
  Intron number 1 from transcript GSVIVT01031919001 (locus G SVIVG01031919001) derived from phytozome v7.0 (chr-ID chr3 ; pos 5406979 to 5407928)
gaagcagagtgcgggagaattacgacttcataaaggtattttgtcatttattttaatgatggcatttaatttatcttatatgttttcttaaagactcatatatgaagtatcttctttcaatttttctttttctttttttataactaaaaatttggttgcaagaaaggatgagaaagcccacatgcatatggggtattgattcaaaggaaacaagattcacattctaatggaatcaaaaagtctgtgaaaggggttccaacctgaaaatcatcacagggcctcacacaaaagaatctttgctatcaaggttttaaatgcactgaaatcaccttgtcctcaaatattctacaatttgtttattctcataaacataaaaaatttgcatgttgcataccaataatttcctttcttcaaagtccaatatactaccctggaaagaacctcttttaatgttgttcctccaaagtctagtcaacacatccaaagattgtggaccaagtctagggggagggcatggattgctacttgacttctccagagattgtttctacttcttggtttgatttatgatatgttatgtggtgaatggttgatgtgtatggtttttgtacattgccaaaataaaaagtttcattcatatggcccctattttttctatcattgactattaattcataattatccttattaaggaactgggtatttgaatccagcactagtttgttcatagaattttgtttgttgtttattgagaattgtcactacagattcctttttttaattcctaatttctactaattttccctttgattgatttgatatcaaatgtatgaaagaaatttgctattgaattctgctggtagagttataccatttgagaatcttgtctaattattggaacttctgatcttgtagatatcagtgaactgaatctacccaaaacttgttgc

SEQ ID NO: 99364 - DNA, 639 bp, Vitis vinifera
  Intron number 3 from transcript GSVIVT01031454001 (locus G SVIVG01031454001) derived from phytozome v7.0 (chr-ID chr6 ; pos 18333775 to 18334413 reverse strand)
ccaaactgctccagaagaatcggcttctctcggaagtgagtgtcgttggatctgaaatttagggttcgaagatttcttttagttttgattctgtgtttggttgctgaaacaatacagttttagaaaaaaaaaaaaaaaattgaaaataaagtcttggatcttaaatctctttcccctttttagcgactggaaaaaaattcaccccgcggaataagggtgtttggtttgctggggttgagtttttcatctgggttctgtttggtttgggaaattgtaggaaaatagaaaactgtattatatgactttggatttgttggattttcttttggttttttgtcattggtggaagcaaaatgacagtaaatccatgactcaaaattttgtttctttcattccattttctcagcaatcaaacagaggattttctaaaacaagagacataggattctagatgttgatttcttgtcctccaattactcttgcaattgaacaagagagtgatcagaaaccattgcagaaagggcaattattttttcctctctttctgcttctaaacagtgcggttttttctattgaaaaagaaaaaaatttcaatcttctgcagccctaaagttgatattttgttgggttgatttcaga

SEQ ID NO: 99365 - DNA, 509 bp, Vitis vinifera
  Intron number 2 from transcript GSVIVT01038719001 (locus G SVIVG01038719001) derived from phytozome v7.0 (chr-ID chr1 6; pos 20626122 to 20626630)
gatcatctttgcttcaatttacactccgatcattggtaagactcccaagttccatctcttttttccttgtaaaaacgggataatcatgtaacattcttgcttttcaaggattatactctggggtcctaggattttaattctcagcacctgggtatgtaaaattagatgtgaaatgatcaaccaattcgaaaaaaaaaaaacccccgaaaaatctacttttgttttgaaatttgtgtgggtttgggattgcattgaacctgagttcgctcctcaatccacttgtatgaaaagaacatgctgcgaaattggaactgaggcctccagttctgagtgccccaattctaggaaaccaaacagaaactgattttctcccctggaaaaacacaacttttccaaccaaatacatatcatcataactttcactatccggttttcaaaaatctgtcatttttctaacatttgattcacgttcagctgcaggaattttaggaagagctttacttggggtg

SEQ ID NO: 99366 - DNA, 288 bp, Vitis vinifera
  Intron number 1 from transcript GSVIVT01033687001 (locus G SVIVG01033687001) derived from phytozome v7.0 (chr-ID chr8 ; pos 18687999 to 18688286 reverse strand)
cgtaatcatctcggaaggtacatccttcatttttcgttttttcttttcacaaacccttagcctacatttggttgcctaggacactcagggaaaagaaaagaaaagaaaaagtgggaaggtgttatcttgattattagggttttctttttcttctttgaatcttaaaaagctccttgaattttctcacagaaaataaccctatatatatatactccattctatttggatctcgctattttattttatttttttgtgattttatttttatgtgattgggcaattacagct

SEQ ID NO: 99367 - DNA, 1043 bp, Vitis vinifera
  Intron number 1 from transcript GSVIVT01031074001 (locus G SVIVG01031074001) derived from phytozome v7.0 (chr-ID chr1 4; pos 21860126 to 21861168)
gagtctcaggggatccattcagcaggttagtacataattgctactaatgctttaattaactgacattactattatattccttcctagttcaaacatgattaccgtgttgtagattaactgaaatctgtaagcactggtccaaggacttggggtgaacaaaattacttcctagttgtgcagttgatgttcttcgtctcacacatggttagaccatcttaggcaaactgagtctgatttcatctccagccagtgtaacattatgaagagtgtatatattttaattgtaactttataagagacagatagataatgtacagttactagtagcagccaataactaacagattgtcattcataattgatttttcctttgcccacttccattttgatgggaggggatgttggtttaaaattgagaacgacttttatgcctcttatgcatttaacttactagttcttgatgatgaagaataacagaagagctaatttagtccatcttttcaagctgacttatacacaattttcttcaactttttgcttgtctacaaattgaacctgatctaagtgtagttcttttgttgctatctagtatttttatttgtccttccaggtgaacataaaatcttttaacttgaaatttactaataatgtcctttcttaccttgcatggctttgctgttcattcctcaaaatgtttttacacatctgtttgttttttcatttgatcatgtgaatgaatcaagggaggtcatgtaacatgtgttagaattcgttctagaccatgatgatcaggctgttgacattgcatgtggttaaattgttttcttatgggtcaggctgttgagttaggttatatagattttacaaactcattatatctttagttctttgccatccaaattctttttgcaaatgctagaagtactttttagttgatgcaaccttcttgtggttataaatggccattaatatgcttgtatttcttctttgaaatagaatctttcgaagaaagtagcaggacagaaaataacaaattccaccag

SEQ ID NO: 99368 - DNA, 779 bp, Vitis vinifera
  Intron number 1 from transcript GSVIVT01031516001 (locus G SVIVG01031516001) derived from phytozome v7.0 (chr-ID chr6 ; pos 17745871 to 17746649)
cgctttctatcttacctgtccttactcagatccaggtctgtttcagctttcaattattctgttttgttatgttctagtttgagcgttatttgatttgggttcagtgtgaaatgtagagttgctgtttccttttatgcaatttcttgggatttgagtgtatttgagcttctgagattttcttatttttgctgagaacaagcagaaaagggagtatattggtatttgattaatgggttctggtggtattatatcttttatttgacctgggttctgtgtgaaatgcagagttacggcttcctttgatgtaatttattggggttttagtgtatgtaaggttctgggtcttctgattattgggttctttattctacttctgttatttttcgtttcttattctctgtttgtttgctgagaaagcgtaggaaaagggtggaaaaaggtattgagttatgggttgggtgggttcagtgtgttatgggttgagaatcaggaaagcagaagtatcaactatctggatagtattacaatcgaagtgctacaaacatttagcttagtaactagaaatacattttgtatacgattccaaattttgtttctttttcttcgttttctgccatcaaacaggggtttaagacttaaaaaattgcatttttactgtgaggcactgcaggaatctgaaaattgtgttattctatgaattttactattgtctgtggggtgtttatatgttacttttgaatgcaggtttggtcacgatccctgcctgataggctttgtaa

SEQ ID NO: 99369 - DNA, 577 bp, Vitis vinifera
  Intron number 1 from transcript GSVIVT01035612001 (locus G SVIVG01035612001) derived from phytozome v7.0 (chr-ID chr4 ; pos 2708801 to 2709377 reverse strand)
cccaagcagattaaagtttggtttcagaaccgaaggtatatcctagaatttgagtttttgggtgtattttaccgtttggtttccgggaaattttaggagagaaaaagagaaggaaaaatcgagttttattctcgtctttagaaatgaaaaatggaaaaatatatatataatatacagttctgtaaagctcagtcgagtgcaggctttcttgagtaagtgataaatctaagattcagaattttattatatcttcccatttgtaaatgttttcggaaagtaatttcgggtgtcctctaccaacctccctttggctgccaggaaaatcgagggaaaggaaagaaatttattttgaatcttatgtttcatttttctgaaggcatccaatgaccataataggatttgttaattgatggtttttgttttccgagttctggataatgcaaaatctgatattcagaatctcaattcttttccttttctatttctgtcttcttgcgcaacaaaaagaatattatggttttggaaattctcttgcaacagtctcttattggacatattctatcctttatttctacag

SEQ ID NO: 99370 - DNA, 603 bp, Vitis vinifera
  Intron number 1 from transcript GSVIVT01038353001 (locus G SVIVG01038353001) derived from phytozome v7.0 (chr-ID chr7 ; pos 13418375 to 13418977)
tttgtctttgtcaatatttgtttcaatctaatcatttccacaaaattttgtcaaaggttcataacatctactatttaagtttagggtttgatcaaattaatttatgatcgtgttattttcaatgttccaatatagaaaatcaactatccaacaaagatggtgatactttttaactttcagtatataatttatttttcaagtttaaagtttcaatccaacttacaactttcaggacatgtaagttcaactagagtggcaaattcttcaattgtgttaaaatattaaaaaatcaaattgttttctccatcatttatagaatattgaaatgaggctttgccagattgtaaccaccacaagaggtgttgagaatttttgtagagaaggtagaaactctttaaacacagagaaaaacaaaagaagtgagagaagtgtatctgtgttgttttcttcaaatgcctattccatatgaaagtctagcatttattagatataaaggacagtagtttagattgtttgcttcctcataaactcaggccaaagtctagtagtccactaaagtttcataattatgtatagggctacaatactacaagtttgtgtgtg

SEQ ID NO: 99371 - DNA, 1042 bp, Vitis vinifera
  Intron number 1 from transcript GSVIVT01034501001 (locus G SVIVG01034501001) derived from phytozome v7.0 (chr-ID chr1 8; pos 20255831 to 20256872)
gtggagttgggacgggtaatagaccgcggtttaaggtgaaaatttgtttttcatttggctattctgattgtggtttgaaattttgtttcagagtattctagaattttttaagttttaattgctgttggcttctgttgaaatagatcataatttctgaaaattttacccggaatggcatgtttctcaaattttgaggttcagaaaagcggaactaattgtttttcaaaatttagagcatctatgtattttattttgtctgagaatccatgtgaggaattctcaggtgacatggcataagtttatcaaaatcattgagattttaatgtttcaactaatttaatttagtaccaaaaaaactacaacttcctttatatgttgtgagggaatggtaagaagggaataagcaaagggatgaaaaagaaattgagcctaattaatatttcctccaccctttccccaatgttatggtgtttttaaacagaaaattaagagctctaatctatagttttttttttctattttctgtcatattttctttcccttccaatttttcataacaaccaagctgaagaaattgatactctttctcacatctttcccccctttcctttatttgttccaatatcctgataaaacctatgcaagttcatgctaaggaacaaatttaagcttctgagcttaagattataaattctccaaattgcttctccaagagacataatatcatgactggtaacttttttgcaaaatctagaccattttgtgaaatgtgtcttgttagagaatctgtcagacattgtgggaagcattctgttaaatcatgacagtgaatcatttaaagttattagcaactaagctgctaaaacttgatttaggcaataaatttgtgctgtatgcccattgtggtcttagtagcttagcaagtttttgaatcttacaagtgcttatgttggccctcctagaaatggagaactttctgtaatttcattgaatgtaaatagaagttggaaagtggttctgcagggaaagcagggcagtggat

SEQ ID NO: 99372 - DNA, 476 bp, Vitis vinifera
  Intron number 2 from transcript GSVIVT01034228001 (locus G SVIVG01034228001) derived from phytozome v7.0 (chr-ID chr9 ; pos 13064401 to 13064876)
tggttgcttcctcctccaaggtatgccctcataattggaaaccgtttcttttgctatttgttattgttgaattatagctacactgcatttggatgctgggaaaactgattaaataaaaggaaatctgatattgattctcatttgccaagttttgtttcattcaagcaatggtcttctacttttcttttgatagaagatcatagtgttttttgcggtttgtttggttgatgagaaaaactgataaaaaacaaggtgatcaagtattgcagttcctgctttttatttggttattgttgaaaattgtgaatcaacccaaacagggactgcataggtaatcaatttggttcagcttgcatgagtttcatgatgaagtttgtttttaaggattcttatatagcgtgttgatccaatggaacaccattcttcttcgatagtaatctctattttaattcttacagagttaaaggcctctgaac

SEQ ID NO: 99373 - DNA, 564 bp, Vitis vinifera
  Intron number 4 from transcript GSVIVT01034228001 (locus G SVIVG01034228001) derived from phytozome v7.0 (chr-ID chr9 ; pos 13065232 to 13065795)
gtttgattttgttgctcccagtgcctgctttgaaggttagcttttttactttttgaacagtgatgaatgcttatgttaatgaacattaactttcagtaattgcttaattgtgaaataccagaaagtacaatctgcactcgagtaatggtactttcttgatgcttttctgttcagattggtgttgcttgttaaatggtaatcagcttgatatgtgtagttgatgaattggccagagattttagctttttgtatggtggttgtagtctgtatgcttcacttacacatgggtactggttgagtaccttctgtaattttttaattattttttgcattacctcttgcttgtacaagtatgagcacttagtggcttcttttcttttttaggtatgggaagcttaaacaactcaccaaatctttctaatctgttttcaattttgatttatgtgaaatcttgttttttgagtttgttgtactgatctcaagcaaagtattaccagttatctcttcaatagttcttctgtggcagtataattagctaaatttatttcctacagagaagaaacc

SEQ ID NO: 99374 - DNA, 921 bp, Vitis vinifera
  Intron number 4 from transcript GSVIVT01030799001 (locus G SVIVG01030799001) derived from phytozome v7.0 (chr-ID chr1 4; pos 16253735 to 16254655 reverse strand)
aacttttggtctccacgttggaccaccaactttcggtgaatatttctgaacccgccaaactcttcttctcatgcaagttttcaaaattcaacaatcacgttcgccctatttattgctcctaaaaaaccaaatttaaccggacaaggaggggatactgtagaaaactcctatacccccttcaaccttttcttcttccaatttttagggttttttttttcctcaaaattttaaatggtattaaagaaaaatacaatttataaattaataagtattacaaatatttataatttttttatgaaaagcaatatttttttatttattaaaacgagttgaaaatattttaaaaaaatcatttaaaatatcttttcatttaatattttatataatttgcaggacagattaaggttaaaccccaatccgtctcgagttttaaaaaatatttctaaacccatcatgaaccatttacattttaggatgaagtagatactcgaaaaaacacgttccgtagtcattcctgctttttatgttttaagagccgttgcccttaatttccaataagaactttcaaatggaagatgaagatgaaaattgcctgagcacatttcccctccagcaccctacgcttgccttcctgtgagcttccaccctcacggctcaaggcctgaacgcttctttttctaaaggacaccatttcatggcctcttaaaatgatatctaacaaagaacatattatttgggtaagtttgtttcaaatgacaatctacttgcttaatgttctcacagagcctgcctgcatttttgtctagccttcagatacacttcacattgtctgcgtaatgttcaacatttgaattgtaatagaccattttatattgaacgtggtgacttaaacagagactctaccaactgggtgcacgaaag

SEQ ID NO: 99375 - DNA, 973 bp, Vitis vinifera
  Intron number 3 from transcript GSVIVT01033782001 (locus G SVIVG01033782001) derived from phytozome v7.0 (chr-ID chr8 ; pos 17872837 to 17873809)
tcttttctctcaaaactgattgtagcatctttgtggtaagcagaaacctatgcagctttagaaccttttttttcctgttttctgttgaatgtattgttttgagtttgttgcattttaaagacaaggattgtcaacagagggtgttcaaatggctgtcagttgttgtctcatgacaactgatcaaacttatatgcttaataccaagtctttggatggagttatcccgtccaaaggggatggaacctattttgcttcttatgcctgctgctagtgtctatttgcatagatgtacatatttgaatttatatttactacacatggaatgcatgttgttgagagtgaaaaatactgattagctttgacagctatttcttaacttctgttttaaagcttgttagaaaattttagaactgattaaatgatgagcatcataaattccaaaagatgcaatgatatctggtattttatcacattatcacacaattttttccacaacctgacctttaaaaataataataaaagaataaataaaaagtcaagttatacatgaaaggggttgattttcccttctcaatgtgtaaagacatatagttgatggaatggcattttaacaaaagaaaaaaagaaaaagaaaaagaatttccccctcttctgcattattgtaatttctccatattctgcagtcaaactggttgaagaatgagatgaaatgttgtagtgtatcttttgttctgatttcacttttaagatcagaatatggtctcacatgcacattcttgcacattatggattcatcttccccccttgaaatactagtagaatctccttacaaaataattggagtagattctgagaaattcttattagggttcttttgtttactctggatttttttaatgtaaatatcttaatatacttctatggcttctgttttgtagtttggttctcattcaaagaagcggcccgataatct

SEQ ID NO: 99376 - DNA, 732 bp, Vitis vinifera
  Intron number 2 from transcript GSVIVT01038675001 (locus G SVIVG01038675001) derived from phytozome v7.0 (chr-ID chr1 6; pos 21075015 to 21075746 reverse strand)
ctgttctggttagtttcctaatactctatttcatttgtggttattggcataatcctcagaccagcttatgttacttcttgatttggtttccaaagaatttacacggcttgcccataattttcattgggaaaatttagtgtatatcacttatttgcttttattgagagttggatgtgaacagaaaaaatgggcatttcgagccccaagtcatttgggtcctttcaaattttaaatgccttaatttgaggcatagatttgagtaagctttttttcttcttatatatgactagtattctttacatttataaatgggaattcttgatatctctcattgtacttttctaaggtttgccccttttgatattttgatcctttgcttgtcttagagcctgtttggaagcttttatagttaaagcatttttgtctatggtgcttccgttagaaacacttttaaagagagttgctaacatggagtgtttggatataaactagaaaaagtgttttgatagtgtttttggtaatgtcttatataacaaaaaagtgatttctgaaagaatcacctagcaagtgattatattggaatcacgtccagctattctacagattttcaaaagcgattttactcccaaacaggcacttaatctatagagaaaagggtgaaaaaccttgtatacgtcataggcaagctaaccatctgttttgtgttcttgaaggttaaatctgctatccagc

SEQ ID NO: 99377 - DNA, 565 bp, Vitis vinifera
  Intron number 1 from transcript GSVIVT01031432001 (locus G SVIVG01031432001) derived from phytozome v7.0 (chr-ID chr6 ; pos 18653079 to 18653643)
ccggttgagggcacctacgatccgtatcgtgttgggtaattctattgttgtcaatctctttttttatgggtttgaatttcttattttttgttttcttttgttgttttcttttgatgtataaagaattgtgtgattttggatgtttcgggttgggatttgtgttttggattatgggttttcgtttttggattgactgatttatttttaagcttgttttcttttgtgggtatttatttctgaattgggttggttttttgggttccatgctcgtttctttatctctctgcttcttttgtgttgttggttttggttctttttgtctctcaatttgtgggaatggttttctatatgggtttgttctcatttctctttggttatgatgtcttctttagttttggtcaatgaattgatgggtttttcctgcagctctgtagtttctttatgggattgatgggtatatatctcctctgtgtttgattaattacagttaatgttttgattgtaatgtttaatttttggttttggtataggctttattttacaagagtgcttttgggttctcctc

SEQ ID NO: 99378 - DNA, 931 bp, Vitis vinifera
  Intron number 4 from transcript GSVIVT01030915001 (locus G SVIVG01030915001) derived from phytozome v7.0 (chr-ID chr1 4; pos 18931084 to 18932014 reverse strand)
aattttacttggccggttgattgccaagaaattcagtaagtagatttattcataagcgtagcattcaatatagttactgcttaacttccctgacatgatttttcatcatgtgaattagaaatataaatcgctaccaaagctcatctcagaagtccaacttgtaagactcttttcttctctttaagatttgtcataagttctacatataaccagtgaacagtaatgttaattgtttggtttccaactcaagtgaggcaaatttttagcttacatataaaaacaattcagtttgtaatgctaaatgaagtaaatgaaatataaaaacataagtttcttttgggttcctcagttatctaagttttttttttttttttgtgttgtggagaacaaaatattattgattcatctttcttttctttttttttcatttcctgcgtcttgcttatgtctcttctcttctctttcctctgttgtcatggcattgccttttaatataatgcttttatgtgcatgtattattattattatttttgaatttaagagtgtgttcaatgtaatttggactagagttcttagatgttgacttagatttatgtttgtggtttgggctgtgtggtgatataggcaggcagcagatacttttggtgggtcggagttggcaattcctaggcctgatagtgttgtgttttatctttcattttgtcatatatttgagaaagtttacttacatgtttccagtatgactctggatagaagtagaagcccaccacgagccaagaggcttcgtagcagtgaccgtgcttcttaccgagacgcaccttattgagttcactggtttgctcctttatcaattcaacaaaatctaactattattctttttatctatacacacacacacttatagctcatgttgcataaatgttatagttac

SEQ ID NO: 99379 - DNA, 673 bp, Vitis vinifera
  Intron number 1 from transcript GSVIVT01033393001 (locus G SVIVG01033393001) derived from phytozome v7.0 (chr-ID chr8 ; pos 20995469 to 20996141)
ctctccaggtacttcatccttttctctatatatttatgctccactctttctctaaactagtaagttattagtttctatatggtagattcattcaggattctgcaaaaaacagctgcaagttcaggataaggctccatggaacataatcaagaattaatagatatccttttcaaagtatgacactagtctagtgaagaggtttttggtacatttcagggcgtaccagacttataactactgtgtaaaatattcttcatcttcatatagatacccttttccccaataattttgatgttagagtttgtgtcatgctgaattggaaatcttatatttctaccagaggcattgattcattgaaattctccttcacaaggaaatttgggtggagtgatatactcatccttggtaaaagcaatttatcactttaggtttaacgctactgtgccagaatgtatttttccccttttctaggaaatgcctcctattgctacaaagtacaaaatgaacctaaatttggagagccctgttagaatgctccaaaaagagtgaagcatgaaaatagtatgaactgctaagcttgttactcccaaaataatttgagcaaaaaaattgtttgatttttcaatgcaatgttgcaggttgaattgagctgcaccagtggaactcttgatat

SEQ ID NO: 99380 - DNA, 715 bp, Vitis vinifera
  Intron number 1 from transcript GSVIVT01034628001 (locus G SVIVG01034628001) derived from phytozome v7.0 (chr-ID chr1 3; pos 13700034 to 13700748)
ctccagttccgcgccgatattttcctcgttgatccgtatgtatctccctctctctctccttcactatcttcaaatgttgaagactaatgctaggtttttctgcaaagaattcttggaactcaaaattcttagagtctatggaagaagcaattccagttgtgttgatatggtattcttgttttggaacaatgaataattggactcataacataaacgatcatgggatgggtatggaccaaaattgaaaattttagtttgtctcataaaatggaagaatgcttgtgttgttcgtttcactcaactatgattcttttagccggcccctgcaaacctatctttgatgtaggttgtgaggattgtttcattgacaatggttttatttgatagtgcttgatacttgggccagtttcccatattgatccgtaatgaaggagaacaattcatttaagttgtttgcttgcataattctacataacctgcgaaattcaacattttctgtgaatggcaccttacacaatgttcatgattttgcacaggtacaaagatgtaactaattctggaaaaaacttgttcacatgactacatctctttgtatagtcttgtaaaaatcttcattctattcgtatgccaaacttattttgtaagttcttttgtgtgtttatgtatgattgttcaaaaacacaaatggaaataggaaggagtactttgagatccc

SEQ ID NO: 99381 - DNA, 654 bp, Vitis vinifera
  Intron number 1 from transcript GSVIVT01037897001 (locus G SVIVG01037897001) derived from phytozome v7.0 (chr-ID chr3 ; pos 6549053 to 6549706)
ggtttgcccatgaatacacctatcaggtcacttggcgtccgcccccattcactagtgcagaaaccaaacagagatggaactgcaattgtggcgagatttgatgattccaacacgggctttggaatgacatggacacccttcacactagaggaaacgatggacgtgatgtggcccggaagctaccgcttggaacaacaaccatcagagcaaacatcagagccacttaagctcgacttaaatctccggctctaacagacccttcatcagcccttgtccagaattgtccatctcggttcatttctgtaataacagttcttgttttgttcttccatcaaaaaacatgtactgtgtactaacttaggtatgagccaaacaactttgaagagtcaaaaatccatgcctggggttctgcctaatatctctagaagaaacactaggaatatactactgtttatgcatatgcaggctttttagtacaagaaacctagagctcaaccacacttttcagctattctcaactcctcaatgcctgaaataattcctgctgcacctaacatgtaaaccaggtttgtaaatgtgtgtatctttttttctttctttttcttaaatcaattataagtattgtgctatagcttcattccattttctttcatc

SEQ ID NO: 99382 - DNA, 586 bp, Vitis vinifera
  Intron number 2 from transcript GSVIVT01036138001 (locus G SVIVG01036138001) derived from phytozome v7.0 (chr-ID chr6 ; pos 20243309 to 20243894)
aattttctggccccacaggtacaaaaataaacccttttccttaccttcttcctcgtatagatcccaagcagtaggcaaattctcacttgggttttcacctgcatagatgatagaacacggttatcaatttgaggaacagagacagggtacatgggaaactggaataaaaatatagcttaaaaatgtgcatgggtgatgaaaagatgaactgaatatttttccaaaatgcccttgatatcaaaatatgacatttctcaagctgtaagaacaagaaattctaggcacctagtatatatgagatgctaaaaaaaaattcagtttatgtagaatagacagcatatagagaagtctggaacagcaattccaagcacaccacatgtataaaagaggggttatgtagcgaaagcatctacagatgctctgagtttggttttgtttgggaatcatcatcattcacagtactcacttcccaccatgttggcaattagcagtcttgtttcaccttttcagtaaaagaagcaatgaaaaattatatattttcaaataaaatgaacttcgcaatgtttaaacgtccaggagctcatag

SEQ ID NO: 99383 - DNA, 538 bp, Vitis vinifera
  Intron number 2 from transcript GSVIVT01036523001 (locus G SVIVG01036523001) derived from phytozome v7.0 (chr-ID chr1 4; pos 23045285 to 23045822 reverse strand)
cggcattctcccggaaactcgtaagtaattatatcactaaacaatgttccattttttgggctggataagtgttctgaactttgagtaaatgccctcctccctcagtgtttgaagactaaataaataaataaattatgtttattataatggttgagcatttaagacaataatgcgctccaactacgttcccatgtgggatgtggatcataaaatacaatcccacgatgtttccacttagatttgaagaaaattaagaggagatcatcttagctttcacgtatccctttactagtagtgctttggtttttgctcaaagcaaaccatatataataaagggggtgttgcaagtgatcagctaggaaaactctgattgctttacagggtggaatgcaccattgctagctgcacgatcgtgttcattttcccggtcaatgcatgcacgtctaattactattttttttttcttttaaattttcaggaaccaaacatagcctgaattaaaatcttaagtaagctaataggcacttcagtcaggaac

SEQ ID NO: 99384 - DNA, 889 bp, Vitis vinifera
  Intron number 1 from transcript GSVIVT01033386001 (locus G SVIVG01033386001) derived from phytozome v7.0 (chr-ID chr8 ; pos 21027691 to 21028579)
tgtttcagaggtttggtcttggatctctcttacaggtctctccctcctttgaaatccccctatttgtttcttactttctttaaattatcctatttggagctctgttttgttaaataattgataaaatttctggggttgcttttgctttaggcgtttagcttttgtattcttcagttggtattttagtgggactgacgtggtattaattcttatccaattgggtcccattcttttaacacgcttcaagtattcccaagtgttggaagatgagggattcctactggaacaagacttggatgccctttgaaagcaacaaaggatatgctataactttgatttccaattcagacgagagtgctatttatgttttgtgtctacttcatgctggtgtaacagccgctagtattgtagtgtctattcggttgcaatggctgtctttgaagggctctttcttatcattaggaagttgatgtcctccaattaggttctgggatttctgtgtataggattttattggttgcttgcaccttatggttgttaatattttcttatcttttcttttctttttctttttgatattttgtcgcttcttaattttccatactttgtatgttgtactttagtctatgccctaggtaacacgtccctataggtgctcttcccctttcatgtatttctaagtttgaagtatgattgttcattgatttcctgattttcttgttactatgatgttataatttagtttattgacattcaaaaagacagaaaagaaagttataatttctaagctgttgattgatttcccactttgtatggccttctaagaaagaaacttgcatggttgcttgctcatgcatttcatggtggttgtcctgtgtcaggcctgtca

SEQ ID NO: 99385 - DNA, 894 bp, Vitis vinifera
  Intron number 1 from transcript GSVIVT01036113001 (locus G SVIVG01036113001) derived from phytozome v7.0 (chr-ID chr6 ; pos 20556899 to 20557792 reverse strand)
gtcgacacttccaaccgagagtacgtggtttctccatgccttgatattctgtttctcgtgttttaattttgatttgttttgctttctgggtttttagggtttcagttttgaaaccctagcagggttttgttttgggatttcaaaccagagaatatgttttcacggaaaataatgaaacaccagtctgaaaatcctattattattaagttattttctcttcaggtcttcgttttggagttttaaaaaccctaatttctgttctcgtgtgttttttttttccctttttttacaattttgttttttcaggttattttagggtttcggttctgaaatcatagattaattacactataaggttgaaactagagattatgtttccttcataaaaactgaacgcctatctgaaaatcctatttttgattcttttttgctttttgcctcattgctctatattgtgttttctatgtaggattttgtgtttccaagccctaattgaggtgtctaaatcttcttaaaggggaaaaggacagcagatgaaaaaaaacaaaacttgaaattaagtaggaaagatgcccttgagacctggctcaggtagtaaagggttggggggggggggggggggggtggttgtttgcaggaggttcagggttaagttggggaaaaaaagaagaaaaaaaaaaagattaggaaacatgttttctgagacattcaaaaaattgttttctaaatcatttcagggtcatttttagagaacctaaaatattgttttgcatgtttttaattatgtaaatgttttactgatagatgtaatgaaattgtaaattggactagtatgatgtgaggttcttaattttttcagggtccaagcattgatcctatcgcccacaagggaac

SEQ ID NO: 99386 - DNA, 931 bp, Vitis vinifera
  Intron number 1 from transcript GSVIVT01031770001 (locus G SVIVG01031770001) derived from phytozome v7.0 (chr-ID chr3 ; pos 4254521 to 4255451)
ggaagaaggcccaaacttgtatttgggattggctagtttaattgccatttcttaatatgtatttggataattttatctacctacttattatatcgacgcttttatgaataatatgtatgctcctaacaaatttctataggaaaaaatgagaaattttggggggtttcacatggtagacgccttatacatgtggaggaaacttttaggagatcacatactatggtcacccttggaaattcaccatcaatgagtttgagagtgattttgaaaagtatttataatatttttaatatttgaaaaataaaaaattttaaatgttagaaaatttaaaaatacttctatcaaacgcactccaactaaggaacagtaccttcattccttggttttttccttttataactcatcttgctgtagcagtatttggaatagaagagaatcaattagttacacaatgaattagttactgattccgaataaactaactaaaataactagttcttatcttagtttcttgggtgaagttacttgactgcagtagataggggatgatagagaatttgatttcaacatgggtggaggcagccatattctagaaagatttatgaccgatggatttggtactggataattgattcattgtttcgcccctcccggtcggtgtcaagcatatgaccatttttgcacagcaaggttatgaaaatccatgagaagtgactggatgtattatatgtaccaattgtcatttagctaataagcccgtggatattgaggttctcctaaagataggaggaattcagcatttttcttttggaaaacacagtatcgttcaattattaaggttgcaattcaacaaattcatttattttactttgtatctgtttggtctttgagaaaaggacggaaaaattacatagaagtgcgctaccaccaa

SEQ ID NO: 99387 - DNA, 442 bp, Vitis vinifera
  Intron number 1 from transcript GSVIVT01032264001 (locus G SVIVG01032264001) derived from phytozome v7.0 (chr-ID chr1 1; pos 14220527 to 14220968)
ccccgacactcattctttccactttcattttggaggtaaccctttctttcttcttttttatttatacagtgctttgtttggagctttgggttttgtttgtttgggctttggattgtgtttacaggctttaaggatgttgggcttacatggttgttgatttgggctacatatttgtgtgatttgggcttacatattattggatttcttattgggcctttgatttattcatttggacttattttgggttgatttatgttttccatttattagtgttaggctttggcttgttggattgttgtttggtttgatttgtgcctattatattagttggatttgggctggtatatttattaaatcttatactgggcctaacctttttgctgatacatggttatggtatttctttatgttttagcactgtgttaacagcgggaagagcaag

SEQ ID NO: 99388 - DNA, 520 bp, Vitis vinifera
  Intron number 1 from transcript GSVIVT01037798001 (locus G SVIVG01037798001) derived from phytozome v7.0 (chr-ID chr3 ; pos 7852135 to 7852654 reverse strand)
ggctcttgcgtctccaccacgccactaagtcacatgtactctctccacctcaatgtatatatatttgtttgtgtgtcctttgattcggttctttctgaattttggtaatgggttttgatttttttttcttttttggggtgtgattgggactatagatttgggttgattggggtttgtttctgttgtttttgccagtgatataaagtcaagattgagaagcttgctttaagattatttatttatttttatttgcttttatgggatgtttgttatctgacatgtctgtattgcactccttcaacttcaaggtaaagaattttcctttcttgcatcagtgtattgctttgattgttctctacaaattgattttacattttatcatcctagtgggcttgatcttagttagcttttcagctttgtggatgttgaatttgaagattgaaatgttgttattaaaaaataattgaccttttgcttatgggtttttgttgttgttgaattgggtgtaaaggagggtgga

SEQ ID NO: 99389 - DNA, 505 bp, Vitis vinifera
  Intron number 2 from transcript GSVIVT01037319001 (locus G SVIVG01037319001) derived from phytozome v7.0 (chr-ID chr6 ; pos 15819911 to 15820415)
gtggttccaatctctcctaggcaggacacagttgggtaggtaatgtttcatcttcctcaatccaaatacaagactatcatttgttgagcaaccaaatagagcagactggtccatcttattgacgaacatagaaaagaagaaataacaatgaaaagttgggatcttacaattatttaaatttcaaatgatgatttttagtagtgaattttgtgtttatactcttcatccagaccgaagccaatcaagcatcaatgaatgtaactagattttattatatgcaatacaagatcttcacatggttctgtcaatttgttaggctttgatataaatctgcttgctttatgatcatcggcatgtgcttcactactttgtttttaactggagaacttcatagttttgttatatccattgatctcagaactcaatggtgttaattctagtaagaactcctaacatgttggatgcaacaggcctatcttaggacaaccttctattctatagagat

SEQ ID NO: 99390 - DNA, 1025 bp, Vitis vinifera
  Intron number 3 from transcript GSVIVT01036653001 (locus G SVIVG01036653001) derived from phytozome v7.0 (chr-ID chr1 3; pos 19896645 to 19897669 reverse strand)
atatcaggccagcttcaccagttgaaattgacccggtaatttttcttggattgttgcttgttgtgtgttgttgtcgttcttgttttatttattgacttatttatttttgaacttaaattattagttctctctccaaatgtcttcacctgtgaggtaaaagtttattgaaccaagaaagaaacctaccctctccttttgttttccatcattaaacgaatcaatggaaggaagtggtgggatgttttaaaaattcatttctctctaccaaaggtgttcatgatctgaaaatttctgttttctaaaggcaatgtatcaagctatgaaatcagaacagtatgttaaaagctttcaagaaaatgtagaggatattgcacactacactaagctttcacagccagttcctactaaagaagttccttaatggaaatgataaggaaagctttggtaaattttgtcttgttcttgtacctagcctttgaacctatctaatcaccttttataagttataaaaaggaaatgtgcttgcatttgtaattcactatctagttgaatgatataagtgtgggttgtgacagctgactaggcccaagatttcaagcgggagttgactaaaacaggcattttaataataataataaaaagaacagttacaatataacatgacaaataactctccagaactcttgaaacatgttatttttttcttcttattttaaatatcgggttcagtttctaattgttgatactccttgttcatcttgcaccctagttttaccttttggaattctcaaattgtatgttctccattaaattcttgtgggttttaaattcaaatttataattatttttaagattaaattcttgtaatcatctcgatgtataactttcttgtctcattaccataccgtggtactccgtataagaccaaagattgcattgtagctagagaatatccttgcttttcatttgcaaaattgtttaatattttatgttgtatatagattatagaggaaagcgagaagcgg

SEQ ID NO: 99391 - DNA, 908 bp, Vitis vinifera
  Intron number 2 from transcript GSVIVT01033693001 (locus G SVIVG01033693001) derived from phytozome v7.0 (chr-ID chr8 ; pos 18600169 to 18601076)
gcgataaagtttacactactaaggtatgctaatcgaggtttttgtttttcttcttctttttcaccggatgttctaacttatgcatatatataaacctgaaatgcatgctcatactagatgaaatgaagttcggatttaattgggtgttggtgtctactagtggaatctgacctgtcccaattttcttctcaggtctaagactgtatatagatttaataactttagatggtagatccattgacactcctatttctatcataaaaagtcatttccctgtctgtgtggttctaggagaagtgttgatgaggaagtgatcacctaggtttcttctttgttctccatctctacttttcttttaaatccctgtactgttgcactttagtgttcttattctgcttttttaataggtcctgtgagctttccattctttctccctctgacgtaagcctctgtttactgtcctgatctattttctaccttcatgctttttccaaacaccctaaagatgataattttgttgccgtccagttcagtagcaacctgtttacttaatttggggcagtgcaccattaattccccctcaaacactgaaacagatgttgacatactcgtctaatagttgacgttgttttcattaatgtatttgatttgtgagagagtattatccatgtggcatggcaacctctgagctagattctgattgtgtgcatatccttgatgcttttgcaaacatgtcttatttgtttggcatggaattgcagatattttttctgtggtccgacttctcattgtcctaacatgatactgtccatgctagtatatttttctccttatacttctgctcatttaccttcatgcatctgtggcatgcagaaagaatcaccacttggagtgaacacacaatctgc

SEQ ID NO: 99392 - DNA, 549 bp, Vitis vinifera
  Intron number 3 from transcript GSVIVT01033693001 (locus G SVIVG01033693001) derived from phytozome v7.0 (chr-ID chr8 ; pos 18601050 to 18601598)
accacttggagtgaacacacaatctgctcatccaggtaaacttaaaattttttgcaagggtaattacccttttattgtccatcctaatttccagtttacttgggtttttgaattactgctggtaagtttagcatgggataatggatgttggacttcatctttagctagttgaagtagccctcatatcaagttttgggttgtaagtaatggtgacaacacattgaaaaaacaaaggaaaaaggtaaagatgttgaatgctctactctatttactgataccagaatgaacaagaagagaaggtgctaatgattattctggattaatttttatgcttaattgcattactgctatcagtctgtgctccatgacccatcgacttattttctctgagtttcttgcattttgtcacttgatttggtgtgattattatagtttccatcatcagctgaattattgtcaccaatcatttgattgctgggatttgctatgacactcatctgtctttgtcatccatttcctttgcctttaatgcagctcgcttctcccctg

SEQ ID NO: 99393 - DNA, 496 bp, Vitis vinifera
  Intron number 1 from transcript GSVIVT01038085001 (locus G SVIVG01038085001) derived from phytozome v7.0 (chr-ID chr1 9; pos 17731597 to 17732092)
ctgcctgtcttacaattctatttgaaacggaatctgtatgttttctttgccctagatcgataaaattctcaatcggtttagatttattaatgtttgtttttgtctgaatctccttttgtataatatttggtcttaatttcctggtttaatcatagcaatcttattgttggtcttgttgtcatttcttgtctctgttgggtttgcgaggaaagtttaggatatgggggtacatagtttgtacttttattgtgggttatataattatattgggagggcatctttttactttgatatagttatagtaattatctcttcattcaccgaatcccagattgggttttctgtagtttttgtaaatgggttgattttcaactatatgctggcataaattttattatgtattgtgccttaggtgtttttggggccatttgtgttaattatcattataactttggctgcagctatacaaaagaggaagtttggggtgaggtagttt

SEQ ID NO: 99394 - DNA, 695 bp, Vitis vinifera
  Intron number 2 from transcript GSVIVT01031282001 (locus G SVIVG01031282001) derived from phytozome v7.0 (chr-ID chr1 4; pos 624786 to 625480 reverse strand)
tcaagatcacaactcctacctcctttgccgagcaggtttgtcaaattccatgagggtgttttgtcattttagctcgtttagtatctgtttggcttaatttttcctgggtttccaatcgttcaactctaaactattattttcctggtttttctaacatggatgaggtgttttgaggtcatttctgtcgttttaaactaatttagtttttgttttgcttgaaaattttgttttttgttatcctctatttccatttttctggtttttctctaaacttttgcttttactgaaaacatgttttcaaaaaacacatgccccttggtgcaacacacttgagggcatgtttgtcatttcaaacttatttcgggtatctttggctcgactgttttctttcttcctgttgtaaaaatatttcggggattttggggccttgtccttttcaaacacctccctgaattaggtttcggttttttctactttggcgcatgcccaactgtttcttttggcttcttgctttcttaaaactgaaaattcttacaaaactcaaccatgtcaacatttcccaggaaacagccaaacaggggctcagtttcttgtccatgaaacttttccttctcagttgtatcatctaatacctaccattttgtatatttctgtttgcaggactatttgaatatattcttcagggacatctacag

SEQ ID NO: 99395 - DNA, 725 bp, Vitis vinifera
  Intron number 1 from transcript GSVIVT01031802001 (locus G SVIVG01031802001) derived from phytozome v7.0 (chr-ID chr3 ; pos 4483747 to 4484471 reverse strand)
atattcagcaaaagatcatcaaacaggtaaggcatctttttcctttcctttcctttcctttccttttcttttccctatcttccgttagtgaatgcaaacgttgttttcaatgggtggttgttcttctccaaaatcctaatttccttttcataactgatgattgttttggattttatattcttgttgtgtatgattctttatcatccatcacccatttcccatcccccatctttgccatttttgtatcatttgaaattcttgataatgttagtttcaaactatttatgatatatgttttttcatctggcccataaactgtttggaatgaagcctctctccaagtgcaaggtgaagttgtttcaattagtgccttgccttccatcattgaaagttctaagccaatggaatgttttattttttggaaaatgtgattcacatcagattcttcatttgattttgtgatgcttctcatcaattttaaccaaatcttttgctgggtttcatttctttatggttcctaatggtctccaaagtgtgacttttgatctcatatcttttttctcatgttgccctcatccgcttcggatttcataaatgtattcatatgaactgcaatgtatttatttatctctttggctttatggtttgacaacataattttgtttataatatatctcaaaaattactttgagagttctcttggaagcaggtagagtaccaattca

SEQ ID NO: 99396 - DNA, 781 bp, Vitis vinifera
  Intron number 1 from transcript GSVIVT01038196001 (locus G SVIVG01038196001) derived from phytozome v7.0 (chr-ID chr5 ; pos 24269421 to 24270201)
gaggaggaggtggtgagtctgaagaagagatggtgggacaaaggtcctctgatgattggtttcatgattcaactgaatcttgagtcttgagggaagaagatgaaaaagctctggtttgctaccagctacaaggtccaattttacatattttgatacaaaatattaatgacgtaaaaaattaatgaaaacacttaaaaatatatatatatatatatatatatatatatatttaaaattatataaaaaataaaaataaatattttaaagctacttctttcaaaaatatatatatatataatttatcttatttaataataataatttctacatccataaaaactataaattttataaacatatattcattaaattgtattatatatcattttataataatgatatataatacaatgtgataagggattagagcattaaacaaagaatacaaatataaataaaatttaaaaaaaatattaattataccattatttttaatttgaattataataaatgagaatatttttatttaagctattagcatacaataaaatttatagtattaaacagaagtagaaatatacgaggtgttgagacatggatacaaaataataaaaaagctgtcggtggacgtggcagaatctaattggtggtaccttttgccttacaagcaggggttaaatacgtcatttagactttaactaagagggaggtgttgtggcttaagccttgtagggttcaatttggagaacgcaagagaaggaacttcacatcggttcttctt

SEQ ID NO: 99397 - DNA, 624 bp, Vitis vinifera
  Intron number 2 from transcript GSVIVT01038196001 (locus G SVIVG01038196001) derived from phytozome v7.0 (chr-ID chr5 ; pos 24270170 to 24270793)
gcaagagaaggaacttcacatcggttcttcttcaggtatttcccgcttaatttcttgtatactaatagtctctaattcttgccaaagatctcttctcttccgcactgatctggggattttcttccctttccttttatgtttgtttcgacctttcttcttcttcttcttcttcttcttcttctttttaatggttttggatgatgcattcagctgtttttgttagtcttattaatccagaattgggttttgggtataaatttaatcttttctattatttctacaattcttgtttaatttctaggttcaaattttttttttctgggtctgtagtcttatggagttatttcttgagaaagagctgatgtgattagagtttgctgaaaagttagttcattgtggattatctctaatgggttcaagtttttatttggcatttggcttggatgtttgaaactgatgaagtgtttgaaccgctgttattattcttcatacacaattgggtattgggcctttagggtttaaattgaattacttttttagggtttatgcaagtatgaaaacatcagaaattttgaattttggattttagggaaatattggaaatatcaaattttggaaaaatat

SEQ ID NO: 99398 - DNA, 440 bp, Vitis vinifera
  Intron number 3 from transcript GSVIVT01033381001 (locus G SVIVG01033381001) derived from phytozome v7.0 (chr-ID chr8 ; pos 21072534 to 21072973 reverse strand)
gacttaccttataccatctgaagagtcatctacaggttaagtatcaatattaccaatgttattttttaatttttctgtgataataggactcagaaatgttcaggtatttccatctaccattcattaagttacctatcacagggtgctaactgaaggaatctactgtcaattccatcattttgaacaaaaagccatgttgttttgatagttgcactctttacttgtttcaaaaaaataatgaaaccccttgtgttgatctgtacactgtgattaggaaaaaaacctgaacaggcctgagaagaggaaaatgcccaataataagctaaatatcccctcctttttgttttagttgatagggttgtggtttgttgaattgtgtaacccacagagactaactctagcatttttatgacagaaatacaggctcagtaagaatcttc

SEQ ID NO: 99399 - DNA, 961 bp, Vitis vinifera
  Intron number 2 from transcript GSVIVT01038279001 (locus G SVIVG01038279001) derived from phytozome v7.0 (chr-ID chr5 ; pos 24928987 to 24929947 reverse strand)
tatctcacagcaataaggcctggcgtcttgaatgttgtaagcattttgtcttggtttatactttgtgcaagtgaaatgcatctcaaggcagcaaaaagggtgattagatatgttaaaggcacctgtgattttggcatcaaatttacaagaagcaaaaagttcgagttggttggttttttagatagtgattgggggggctccattgatgatatgaggagtaattcaggctactgtttcacttttggctctagtttttttctcttggtgctcgaaaaaacaagaaattgtagcccaatctacaactaaattagagtttattgttgccacaactgcggtaaatcaagctatttggttaaggaatatcttaaatgatcttaacatggagcaaaaggaaagcacgaagatacttattgacaaccaagttgccattgttatatctcataatcctgtgtttcatgggaaaaccaagtattttaatattaagttatttttcttaacagaagtgcagaaatatggagatgtaattcttctttattgcaaaacagaagatcaggttatggatgttttcaccaagccactgcaagttaacaaatttgattttctaaggacaaaacttggtgtttgtagttcctgaagcaaggaggagtgttgaagacgtgcttaggactgctgatgtggtgtcataaatttttagttgttttgaatgtttcaaagttgttgttgctagcttttaagtattggtttgtttttctgttttgcatgttttggtcatggcttaatcctttgtccacgtatatagtgggtagttgttgattaagtttttattataatttctgatgattaatgaattattgttgttctggtttgttttacttctgcaatatctttctgtttttcttcatccttgtttctttaaaaaaactatagattaatagaaaaatagtaaccatagcgaaaaaaa

SEQ ID NO: 99400 - DNA, 304 bp, Vitis vinifera
  Intron number 1 from transcript GSVIVT01035884001 (locus G SVIVG01035884001) derived from phytozome v7.0 (chr-ID chr4 ; pos 5248496 to 5248799 reverse strand)
gcggtatccgcaaccacaaggtaataatcttggctctctccatcctcaaattcatcaaaatttgaaccaattttcaattttttcatttttttttctttgtttttgtaaactgatggcaaatctagtaccaaatctgaagatcagttaagaaaaattgatcaaaaatggtggtttttggcatcagattctgtccataatatatatgagctgatcagatttccaagaaacacctttcatcagagatggattttatgatgtgtttttttcaggttgaagttcttaaaatagagttggagcgtttgag

SEQ ID NO: 99401 - DNA, 914 bp, Vitis vinifera
  Intron number 1 from transcript GSVIVT01033765001 (locus G SVIVG01033765001) derived from phytozome v7.0 (chr-ID chr8 ; pos 18018765 to 18019678 reverse strand)
tgggtccggcaactggcagcttctggcttctttaggtgagttaaaagggaagtatacgggcagtttgccgtccgtttggttactgagaaaattgaggaaaagaaaaaaaaaaaaaaagtaaagctttaagtagtatgttttgtattattctgtaagccaaataattgtatttggtttggtgttgcacttgcacccactttgatttcctcttgttttggggcagattggttttggttttcccaactacttcgtttggttgctgagaaagtggtgaaaactgaaaagaaatgaagagaaagaaaaggaaaaaaaaggaagaattttgggtagggaattttaaatatttgggacccaagcaaacaaaaactttcgctcaactgagcctaatacaactttttgacttggttgagcttctttatttttctcggaaaaccaaaaccgtaagacccagaatttaattttttttttttttcagtttctcaactaccaaaaggaaggtgaacaactcgtgctagtttaaggtattaggaaaattaggttggagtgcggtgggtgtagggtcttaattttatcctggagaggaatcgaaattttggtaattaaatttttagttggtgacacacccagggtttagtggaggtaggttttctgttgggaaaataaattagggttttcatttggggaaattagggttgctgttttttgtggaataggttttgtttatgaattatgttaatggaaattatcattcaacgctctgaatcttttcttaataataatgaaatgaactaaaaaaaggatcaagggctttgctaggtgtccattttagttttgtttcgtcttggatttatcttacacctataagttgatctggtgaaggtgaactgtttgccaacacagcaggaggggacttt

SEQ ID NO: 99402 - DNA, 617 bp, Vitis vinifera
  Intron number 3 from transcript GSVIVT01038611001 (locus G SVIVG01038611001) derived from phytozome v7.0 (chr-ID chr1 6; pos 21497432 to 21498048 reverse strand)
ttgtgcagtcgcctgttacagcattgctgtcggaggtcagagacttagggccaaaaaaaacacttccgaaaaccagattttgaacactcaactgttttgtttaataaatgtataagagtgtttttaaaaataatttttatatttaagatttttaattgaaataactaaagttactatctgaaaacacttattttcatttttaagaatagaaaataaaaaataaaatttttatttatttatttattttcaaaactattcttgaaaatagttgtgaaacaggatttttaagtttcgaagtgtttttcaaaaacaatttgaaaaactgctataccatgttttgaacaataaaagtctgtttgaaattagtttttatgttttaaaacaatttttagaaaacacatgaaaagaactaaaagatattatttcttatcaccaaatgggtgttcctgttttctggcttttttttacttcggagaattagaaactgttttgattttgtgaatttgcagtagaaaatcgatcttctcttcttgcttgttgtatgttatatgcttattggagctattgattatggtactgcaggcggtttcgggtcttatctgttggcgttgaacagg

SEQ ID NO: 99403 - DNA, 1012 bp, Vitis vinifera
  Intron number 1 from transcript GSVIVT01033406001 (locus G SVIVG01033406001) derived from phytozome v7.0 (chr-ID chr8 ; pos 20935438 to 20936449 reverse strand)
cttctccctcttcggttcgtttctttctgtatattcccttctttttggtcttttttccatttattttttatgattaatagctgaaaatgtgatattatttgcttgaattcagtttggtttctctttcgaatcttctgaatgcgcatagttttgatccgagctcaaatattcttttgaatcttttaaatgatggttctgtggaatatgaatcggatgatgattcctgatcaacccctttgaaattttgaattgtgtccagttcttctttttcacatccgcggcattaacttcttgctaggaaacatccttctgaacgaggttaaggcaaaagaacacatggaatgccttttgatcttgatcaagatcataaattttttgtactaggatgaaaatgggaggcggaaatcactgcctttcgcaatggaaaaccgttatgtttggttcgtggaaaaaaacaaggaaggaaaaaggaaaaaggaaaacggttttcttattcttagaaacacctggacgggggaaaaggaattttgatccgttcctaagatattgtgggaaaagattgaaaaaacaatgatttgtaatttatttatttatttcaatattttttcttgcaactaaactagattttgttactttttttattatctttgtattgaactttccaaaaataaaaaataataaatccaccgaatattaaaaggaaattttgttaatttttcaagaaaaaatccctgatcttagtgttttgcaatatcgaatttggcagcctaacctttctagtttcaaaagaaggatggattctgatcaattgattatttctttccttaaagaaccagatattttcttgtttgccttttgtttttaatggtgtattttcgggttttcttattatacattgtattttttaaaaaaagaaaaaaagaaaaagtaatatcttgtattcttatataattgggttgtttcctttgatttggacatatacttgtgagcaggaacaagaataacatttctg

SEQ ID NO: 99404 - DNA, 355 bp, Vitis vinifera
  Intron number 1 from transcript GSVIVT01035332001 (locus G SVIVG01035332001) derived from phytozome v7.0 (chr-ID chr4 ; pos 550992 to 551346)
tggtggaaattggattgctttgccaaggaaagctggtattttctctcatttttctctctcatttctcaattttcttatcatagaggaaaatcatgcacaagggttgttcttgaaaaacagaattatttctcgaatatgtcactgtacggaaaacattttccttgttttcaagccagaattttcagtacctgttcttcacagctgtgctctttctttaattccaaacaaacaaaaggaaaactggaagaagggtttcttccataactcgaattaaagcccaatttcttattattcaagtaaaatttgatttcttgttacaggcctgaggcgttgcggcaagagttgcagattgagg

SEQ ID NO: 99405 - DNA, 616 bp, Vitis vinifera
  Intron number 1 from transcript GSVIVT01034001001 (locus G SVIVG01034001001) derived from phytozome v7.0 (chr-ID chr8 ; pos 15993525 to 15994140)
aagaaaggagtgccgtggaccgaagaagagcacaggtaatttattctaattataaaattatgtttaatctgttcgaattttctatttgttaattgatgtaacatgtctggatgacctgctagccttactagaagtcaacctacattccaattggtttctttgtttacatagatacccaaatatttgtttggtcgctgagaattcagaaaggagttgaaaattcaattttgaatgttagtttcatgtggtttcggtttttgtaaagtgaaagagtttggctcaattaagaatagttttattagtctcagttcccatgggtttttgttttaaaaatctaatattcaaaattttgtatgctttgcttttcctacattttcttgcaaccaaatggaatatgactacatagtcataggtttggtaactgaaagtatctgatagcctgaagtttgggtggttcaatgagaatttcttcatatgtgctctggttatttgcatttataaatgctattctattgaatgtcttttcttcaagataaggatcaagctcttgatgtttttgtttcctcctgcggtttgtgatgtgttttattgatgatgaaaccacaggcagtttctg

SEQ ID NO: 99406 - DNA, 793 bp, Vitis vinifera
  Intron number 2 from transcript GSVIVT01035451001 (locus G SVIVG01035451001) derived from phytozome v7.0 (chr-ID chr4 ; pos 1368580 to 1369372 reverse strand)
ttctcggtaattttgcttttcaatttattattattattattattattcaatttatcattattattattattatattctttgtttcattgctgggaaaacgttggaacgaagaggaaaacatatctgaagtttagttaaagaaatttattattattattattattattattattatattctttgttgattgctggcaaaacgttggaataaaggggaaaacatatctgaagtttagttaaaaaaattttagaattggattgttgtctgtaattatgcttcgattttgattgcttagaaaattacagaaaaggggaaaatatttccagtgttctacaaaatcggctagccagactccacttgttgctgataaaatatagggcgtgagagtgtattaaaattttgacttttgatttttcatttctttagggaccttttgcttttagttctgtgattgtttggaaaccaaagtggcataatatatagatctaaattctcatattttttcttcctggcaattttctttgcaacaaaattgagcattagtttctaaataaattagaatactgaacacaggcaaattcattgtagaaaacatggaattgaacgtttttttcttttggggggagttatgtaggcttcaattttgcattttgtttacttgtcacttgtttctcggcattgaagaaatgtggtttcatgctgttaaccatagggttttattggttgaatgggttgattttttattttttatttttcaggtgaaaagggaaaaaggatcagggagctgacttca

SEQ ID NO: 99407 - DNA, 448 bp, Vitis vinifera
  Intron number 1 from transcript GSVIVT01033932001 (locus G SVIVG01033932001) derived from phytozome v7.0 (chr-ID chr8 ; pos 16617863 to 16618310 reverse strand)
tgcttagatagaccagtgtagcctgaaatgctaaataaccaacattaggttaaactaaaaacaaaagcaaaaatcagcacaagagtgaacccttcgatctcaccagaaaggaagagggacatcaacattcatgcaattgtcaacctaaggaagaaaagtacttattcaggacgtgagcacctgaaaattgttgctagaaaaactatgaatcatcaatggattaaaacacgtgatcaagtctatggcgaaaagactactgaaagtgaaggcatataaacggaatgactctattttgaattaacatcacaatttgtacaccacagaggagaagttctcaaaggccccgaagaattacaacatacctccaatcgaccatgaaacttggcttcagtggtctttaacattatagggagaggaaagcacacccctttttccacacaacactggt

SEQ ID NO: 99408 - DNA, 1002 bp, Vitis vinifera
  Intron number 2 from transcript GSVIVT01037303001 (locus G SVIVG01037303001) derived from phytozome v7.0 (chr-ID chr6 ; pos 16129000 to 16130001 reverse strand)
taaaaaggctaaattagtttcacctcaaaacacaggtgatcttcaatgtttgtaatttgtggtttttatagctgtctttagttattgatgcaagagctatggataattatggttttctgagtgtatctgtataatttctatgccacattatcctgatatgtgcttttttcccctagttaaataatttaatacaagtaaatttggaatgcataggtgccccattcataaggtattcatcttaccttacgataatttgaaaccaatactcaaatcagataagcagctaattgactactgcttgtatcctatgtggctagcatcgtatggaatataattgttgtatcctaaaaaatgcattgtaagtgatatattgattttgtgtggcttctcctatgatataatttctattcatctttgtgatttatgagagcatttctgcaggaggttaatttctatctgaacttggtatttttcctactaagtttttaatctgtttgtttttattagtattttcatgggaactgtcatccttctatttattcatctctccaccaaaaattgtttttaccttgttggacatccattgataaatttgttagcatatcccaaataaccttcaaatcttatttgaaatatgtttgaaatctcctttgttctgatattgcattttaataaatttatcaaatttttgatatatttctcattcatctattgagagtaggagtctcctctgacagcttccgttttaaccctttagttttatccataattcattctattgtggtggaattcattatctgctcattgctcgtcaatattctgttaattgtctgctaattgtctgtcaatatcctgcaccctacattcccaagttaatttgacaaattatgatgtgaattgagagagtacttgacatggagcaattaaaatgttttttgttaaaatgttttatggcatgaattttgtgttaatgctgaaaagagtgttgcttatggggtgcag

SEQ ID NO: 99409 - DNA, 563 bp, Vitis vinifera
  Intron number 1 from transcript GSVIVT01035004001 (locus G SVIVG01035004001) derived from phytozome v7.0 (chr-ID chr5 ; pos 833352 to 833914)
cagctctgggaaaccaccggttctcgtacgttcctttccttcttttccttacgcgcttcgttttctatttcggttatgcttttaagatctacgcttgctgactttcagattgaagcggattttgatttgttttgttttattttgccttctgttttggttttatttttgttttcgtttggttttgtcttttattttttatttttacagatggaaaattctttgagttttggttaatctaaagtagacatctatctgattgtgctaggttaagcttatccccagtcactttactgtttggatccaaagaaagtttttttttccctcttctcttttctgaagttcagaaatgacgatttgattataatgaattaacatttacaaagaaggatatgacaagaacctaaatggatatttgacaactttttgatagtgattaagtagccaaaggtcatgttcatacttagatctcaatctagtaaggtagattgtgttttttctggctgataatgtgtttgatcgatttggcagcattaattcctttgagtgagttttctgacccgatt

SEQ ID NO: 99410 - DNA, 635 bp, Vitis vinifera
  Intron number 1 from transcript GSVIVT01032907001 (locus G SVIVG01032907001) derived from phytozome v7.0 (chr-ID chr1 4; pos 23984232 to 23984866 reverse strand)
gagttcaaaacttcaacagtaagctttaatctttttcttgtcttcctttgaattgtttgtgacccactcgagatattttttcagtatatgcttgagcaaaaaaaaagaggagaaaatggaagatgagtctcaggggtgtccatgtatgctttttaagttcctagttgtgcctgaatatttgtggttagatggctcatagtataggtttagataaagggaaagtatgtttcgggaatgaatttggattggattttcaattgggttcatatgtcttatatttgtgaaactagtcgtgattccagcaggaggtagaggtccatagttgatactacctggaggaggcagaagctgataaacaagaaaatgaccttgagaatacccaatttacaaatttaatttggtcattggtgaatttcagaggtagctttttaactgccaatgctacaaacagcaaacgaattcagttcacaaagctccaacctcaattgcttggagtttatctaagcccttttccattatgtactgaaacctaatatctgcatcaaaatatgtggaaatttcaattgctgatagcattgtttctgctgatttcttttgcaggtaagctggcatcaaaaccccagattcaagttcca

SEQ ID NO: 99411 - DNA, 1024 bp, Vitis vinifera
  Intron number 2 from transcript GSVIVT01031328001 (locus G SVIVG01031328001) derived from phytozome v7.0 (chr-ID chr1 4; pos 334283 to 335306)
attcgcattctggattctttgtcggttgcattacggtatggtcctcgttgttattttatcgtcaatgctctgtatgattggatttttattagagccccaagtttggtagcatgctggtttgattaaggtgatgaaagactggagccatgctcttgatttatcctcaatctttactcaagtgattgttagtttatattcacttttggtttctcttgttatggctctctgatagttatcagaaccttcttagttagaaaggtcagctgtagtgtttttattcaatttaaagcaaagaggttttgatatccaaaaaaactattctgcttgcaatgcattttcttgctatcataaatgtttatatgttttacagaagggcctatccatgatctgatgctttgagattggaatattgtgtcacaaaagttgtttatgcattgtccagatgttggggatgtttgttttcttcttcaaaagattattcattactaaatcttcaaaataaagctaacgaaatttgaactgatgttctgctgtttaagttacattgattgacatcttacactagttatttaaaatgttccaaaaggactttcatgattgaaggcatgcaaaaccttattttgttgaaatacatccatgtgatgaaaggcaacccacctggtacctaccatactcgaaaaccacttcttccaacaccgtggagagttaaaataaacattgtcaggattacacaacttggctccttggtgagtgaaaatggaaaagagaagaggaagtcagaaaaactctacccatataggacaaaatttagaccttaaacttcttttgggtgggtggagtggactgtgtttaatctttaaactgaattacttttactttagctctttatattttgacatcttcgctagtaattataccaaaattccactcactcaattctattttgctagaatcacattatatatatttactttttaatgcttatgcaggtcccagaattacagtgcccagaagtcttcggtgg

SEQ ID NO: 99412 - DNA, 962 bp, Vitis vinifera
  Intron number 1 from transcript GSVIVT01036437001 (locus G SVIVG01036437001) derived from phytozome v7.0 (chr-ID chr1 8_random; pos 5150011 to 5150972 reverse strand)
agccctctccacttgtatgtattcacctctctgcctttgttattgtttggtaaaattaactggggttttgggttatgtgtcttttatgcactcgaggtgtttgtggttttgcttctatggggatatggtttgttgttctgtgttttcttgtgttggacccagttctgattgttgggtacatcgtagacatgagcatgtgggttttacgacttcttttcttgcctgctcatgcagcaggttgcgattgaacgtgaaaaaaagtaaactttatattagttccctttccgtgtaatgaattggccgtatttatagcattttcctatgtcatacatgggctcgaagcatttgaggcattgtgtgattttgcttttgtggaacatggttagttatttaattgtttgttgtgttgcacccagttaagatggttggatgcacatgggttcctgggttattggcttatatgtgtgtgtacttaaggtgtttgtgattttacttctgtgggacacggttagttgctaaccgtttgctgtgttggaccatggtaagattgctaattacacattgggtatgggggattttggcttacatgcactccatatatgcgcttcaggtgtttgtgttgctcatctttggctcactgaaatgctatctatttgatagtgtctgtatttctcaagtttatgggggttaaggtcggtttgatgcaattatcttttactgttaaatggggttttggcttgaggatgccttcctgccttctttgttcttttgcaagtcgataagtctttgtcacatacctctccttaatgcagacatgagacttcagtttctaatgaaaataaacaatagcaagtgaagatttaagggggaaatcacaatgcttcattcgttacatgtagaaattttattatttgattgtttacttaatcacttgttcaatattatttaattctgtagcttag

SEQ ID NO: 99413 - DNA, 650 bp, Vitis vinifera
  Intron number 2 from transcript GSVIVT01033859001 (locus G SVIVG01033859001) derived from phytozome v7.0 (chr-ID chr8 ; pos 17201174 to 17201823)
gaccaactttggtgacacatttggtaagtcttttggtcccttatgaaatttctccctgtgctataggccattccagtcctcttgaattatttttgcctgttgccatcacctgaagtaaatgctcttattgcttatgggtgaagcacttctcctgaaaatcacaacacacatgcataagcatgcaccatcagaattaatatattgtatttgaattggatggcagaagatgtttacagtgacttctgattctagattttacttggagcacgcctatgcatgtgtgttgaaagatgactgaaatactcctcatgctttgattattgttagaaaatataaataaataaataacaaatattgcattgaattgaataggtggaaatttttgacaatttattggatagtagtccaggatggttttagtttctaacccatttgagtactgatttgtatatgataagtggaatcagtagagtcatggttcccttgtgcttgcgggggatatgtgcagatgtttaacagtttgaggtcttgagagtaaactgtataatcagaaatatgttctttaagcatatgagttcacatttttaacttactggaacattttgtgattttgcttctgagaaagcttatttattttttggcagacacgt

SEQ ID NO: 99414 - DNA, 397 bp, Vitis vinifera
  Intron number 2 from transcript GSVIVT01031854001 (locus G SVIVG01031854001) derived from phytozome v7.0 (chr-ID chr3 ; pos 4923265 to 4923661)
ggccttgtcatcttgtttggactgtttactgtatagtgaggtttgtttctttactctgtattattcgagttgaaaggaactaggaagattgcgctgtttggtttctcagaacgggaaagaagagcaaaaaaaatttgaatcctaagtaaaccctcttctcatctgtgtccgatagaaggggttgtttggtttaactcttttcctttctggaagacaacatgccgtatgattaagattcaaaattttcctctttttgttttttttcccagctaccaaacatgggaatacagaaggaaaccttccgtttcaatatttatttgtttatattcaattaattcactgactcaatgtaacttatgaagaacaggacaaagaaatttgatccatatttgaagtg

SEQ ID NO: 99415 - DNA, 263 bp, Vitis vinifera
  Intron number 2 from transcript GSVIVT01033480001 (locus G SVIVG01033480001) derived from phytozome v7.0 (chr-ID chr8 ; pos 20365847 to 20366109 reverse strand)
gaagccaaaaggctgtgatttacccaggtgcggtagccaatgttttctccttttcttttctcaagtattttccttcatttgaatttgattttctatccattaaatttaattttctggattctcttttaataccatttttgttatgtaggatttatcgtatcctgttgtgttgtatttttataatgaaactgatccatctagtttaagttcctgggtttgttccagtgatgttgatttagatgaattgattgcattcaggttga

SEQ ID NO: 99416 - DNA, 345 bp, Vitis vinifera
  Intron number 1 from transcript GSVIVT01038031001 (locus G SVIVG01038031001) derived from phytozome v7.0 (chr-ID chr1 9; pos 16532026 to 16532370)
aggccaggttctgggcggactacgtagacaagaaggtatgtctttgctgttgatttaaagcattttcttttcttttttttttgtttgataatggtgcgggatttgtccaaaatgctgggtttcttcttcttcacacattcccttctgatatttttcttccaccggcccttcattttgatcctagctagtgtatgagatttctatgctgaaggttccttaataaacgtgttcaactatacagaaagttgaaacttgatgaaatgctccaaaaaaaaaaaaaaaaaaaacccttttctctctttgactccattattttcaacagctcgctgaacttggaaagaagat

SEQ ID NO: 99417 - DNA, 945 bp, Vitis vinifera
  Intron number 2 from transcript GSVIVT01032441001 (locus G SVIVG01032441001) derived from phytozome v7.0 (chr-ID chr1 4; pos 27434850 to 27435794)
aacaaagggctgcttcagctaggtgagaaatttagatccctacttgatagatttctttgtaatattattggtaattatgatatttatattcaccagcttttcattgtttatggtgtcattttcttgtttgtgcattagttttatgttcactttccagaaacactacagagtttcagggactactttttaacagttgaatggaagtttaagagcctgttgaatatttgatgaactgacttaggtggtgtttgtttttttggctttttgctgaaaaccatttagttttagaatttaggttgtttgtttttttactttttcatgacttattataaactttttactaaatagaaaaagccaaaatatgtggctttttctaaatagaaaaaataacacaatgattttttttactttttaatacttaatagaaataaaatactataaaaacaaacaacctaatatttaatactattaagtattaaggttctatttagaattaagtaaaaaaacaaacaccaccttagtctgtttgacctgattttagattcagattgtctcttcatgttgagggagtgagtcccttcctaagaaacccaagaaactctgattgtaattctcaactggttatttgaaatatcgtctatgataacttctgaaaacttgaaatttagatatcagaaatttatttatgtcaaattaccaattgggtttaatctatagctcatttagtatggcattgtatacaagttatttgtttgagcagacttgatcccccaaaatgcaaatgtactatgctattgtacccctttcatcagttgtaacaacatatactgaagcatattaaaagaaagtatttgtgcttgaattcaatatatatctcaaaaatgctggcttgatcttttttgttcaacagggaggattttgagaaaataggattgagtagcttcg

SEQ ID NO: 99418 - DNA, 291 bp, Vitis vinifera
  Intron number 1 from transcript GSVIVT01036005001 (locus G SVIVG01036005001) derived from phytozome v7.0 (chr-ID chr4 ; pos 7015995 to 7016285)
aaattttgtatacattatttacaatataaattttgtttttggtttttttttttaaaaggattattttttccctaggccaaatatttaaaatagtgtttatttcccttaaaaaaaaaaagctagaaaagaaaataaaaaaataaaaaaagggcatacaattgtctgcacgtgtgtattgatatacgacttcaaaattttatttctatgtttgtattatttctcccagcctctttgatgcgtgtgtgtttcagaacaggcttcaaccgcatttctccccttgaaggcttgaag

SEQ ID NO: 99419 - DNA, 671 bp, Vitis vinifera
  Intron number 1 from transcript GSVIVT01034032001 (locus G SVIVG01034032001) derived from phytozome v7.0 (chr-ID chr8 ; pos 15697299 to 15697969)
ccttggccaggaacttccccgacattgatttcaaggtagtttgggtaccgggtaggattcaaaatcattcctactttgggttttgtgttcaatgattgatgaatttcagttagaaatgctatgctcatgcttttgggtttcactgtttcatgtctgcctttagttgtgttgtatgtcatttgaattatgattcctgtatactttgagggcgctgtttttggcttcccctcttttctatttatactacttctctttacctatccaaaaaaaatatatatcattggtattatgatcagtcttttaggtttgatgtgaatcctttgatagatattcttctcgggcaaaatcccactgcgcttatgttggatacaatgccataattaagttaaagttgcttaaccctacctcaagtttcttatatagtccttggattcagtggcagttttctattccatgtagattaagttgtcagcattatgctagatcctttatttcgttgaaatttttggagtttctcgaatcttgcgagcaaaatatgatttaattttgttaattgttttggaaatggggcttaatgatgactatttgaggcatatggatttgaatgccaaaaaaataaaattgccacaggtggattgcggctcaacctccttactgtttgtttcaggttt

SEQ ID NO: 99420 - DNA, 897 bp, Vitis vinifera
  Intron number 1 from transcript GSVIVT01038778001 (locus G SVIVG01038778001) derived from phytozome v7.0 (chr-ID chr1 2_random; pos 825111 to 826007)
ttttttttccattttttgagatttggaagtagaaggtgaggtgtttgtttcatatttcgagttgggattgttagattttgtttgtttcccttttgaatcaaatgaaattttgatcggtcaatttatattgaaagtcaaggcactgttgtgaagagcaggggacttattagacaccattgattgattcaggctgatgttcatgagtcatcttcttgaatcatatctgcatcaaattctcagtcttggagaacactttcgttgagccatcctactgtttaatgctatgcttgtagcgccttcagaatgaaactttatcttagttgggcatgaccaaaaccatgtcaaccaattgtcttcagtattgtcctcaattgttgttagctttcagttcatatgaatgtgtttttttccccagttttgccttctcttctggtacatctcatacatcttggcattcttaatttaaataggcttatattgtggatatcatttcttgactgttgagcaaataattttcagtttgttggttaggattcatcatccatcaggtttgaaacacctttcaatttaatctttcccattgtagctaggttaccaacatcttcaatctatcccactttgtagatgattagacaccgatataaagaaagcagacactcatgggtatcaccaggttatcaatctatcccattttaggcattttttttttcatttttgtagaaagaggataaggcatgttattgagtgatcacatagatttcatctagtagcaagtgtttttgagctgcctactttgtttattccatgtcaggactgatttaaaagcttccagcaatatgtcttaacaatttatgcaaagttctctagatcctaaactagatctctcgtttgcaggaa

SEQ ID NO: 99421 - DNA, 639 bp, Vitis vinifera
  Intron number 1 from transcript GSVIVT01032880001 (locus G SVIVG01032880001) derived from phytozome v7.0 (chr-ID chr1 4; pos 23702710 to 23703348)
aaaccatctttaaataactcaatagccaaaccctcgttcaagccaaaccctcatctctacttctctttaactccggttcttcatcattgatcatcatcgtttaggccatggagctcatttgatgaatccaattgaattcaaaactctgctttttgattgatttcgcagattttattctttgaaaatcttttataaaaggctcttagaagtaatttagttgattttttactcaatttttaatgtggtttatgaatgatttttttttatttattgtttccatgctttatctggttattgagaaagtgtagcaaaggaaaaaagaaaagaaagaaaaataaaacttgaaatcttaagactttggttacaccttagactagtggaagattccaagtttttgtttacttttcatgtgttattgggaattcaaaacacccgaagaaaaaaagttttgattcccttgttttagaagatataatgcttctatatttcaaagatgaatttggtttgttgttgacatgatatttttgttcccaaattcaaaattatcttatttttttcttatgtccttatggaatatgtttgaattagtcattcttttttttagttcccctatttttgaaggtttagacatttggcttc

SEQ ID NO: 99422 - DNA, 1013 bp, Vitis vinifera
  Intron number 2 from transcript GSVIVT01034038001 (locus G SVIVG01034038001) derived from phytozome v7.0 (chr-ID chr8 ; pos 15667885 to 15668897 reverse strand)
tattgacctctacttcaatttggccgctggagaaggtaacacttcttattcaccttgcccttttctctaactattttttatacatagatagtttatagcttcaactttcaacaagaaaaaacaaactataattaaaaaaaacaacctccatctgtttgttcagaccaattaccttatgcatatttttattacaaaaatgattaagtccaggaggatggaggggctgcttgggacattctttaaaacagttatcaaaaaatatttttcacctattttttaggttttcaaatattttttatctaatcattgtcatttttgaaaacagctcagcctcaaggaaacatttgaatataattaaatatgttttaaaggtaatcaaatatgttttcagaaaatattttgtttcaacaagtgtttttttttttttttttaacaaaaaattactaaatatattttcaagttctatatttttttgttaacaaaaaattaccatatatgttttcaaattcttagaaaattgttttttttttcaatgaaaaattaccaaatatgtttttgagtatggaaataattatatatttttaagaagaaaaaaactgtttttgaaaagaaatctcaaactttaaatttctttttcttttttttttcttattgaataattcacaatcacaaatttgtttgaatattttgtgaggtgtaaaatcaaaagttttcagtccatagctattcttttagcgtaactgaaagtctaattatacccttcaagatacttttcttttggtggagatgttttagcttttaggtagacagccagatcccttgtatgtcaaggctctatattttcctctggctttcacttttacagtgaaagagttgcgatgccttccttacatggccgtttgtcttccttctcctccaatcaaagaattgaaatgtcttaaattatatctttattaattaaaccttgaacacgtgcaggtgtgtttttgccggacctttgcgaggcacggcgc

SEQ ID NO: 99423 - DNA, 673 bp, Vitis vinifera
  Intron number 1 from transcript GSVIVT01037123001 (locus G SVIVG01037123001) derived from phytozome v7.0 (chr-ID chr1 8; pos 28905611 to 28906283)
ttgggagtctctcatttttcctgaagacatcaggtgtaaaatatgggacaacggtcgcttttcaaaaaggttaatgatggaataccaagaaaatttctcatccactgcgttcataaagtttgtaatagaccgtagtcgtggacgtgccactgcacttgggctccctggctgctgcaccgaagaggcactggagtatgctgctaacgagtaagtaatctaaatttatctatcaaaatagtgcagataaacaaaaaaatacacacgcacaagtagaggcaaaagctcaaaagtgttacaatttttttatgactgcctctattatattttgaggttaatttggtttttatccagtggttctatgaagaaaaaccaggggtaatcaacgaccatttctcggatttttacatgcattattctcatctgtcttagcataggttgcttttcctccttttcctttacatcctccgcattgccaacaaaaaaataaaaaaataaaaagaattatcctcttgcagtgtgaaatcctaacgaaatcattctttcctgcaggtgtcctgaactaaagactttgaaattgaatgctgatctacctaacaaacaacgaagaattatcccaaggctgataccaaagtggaaaaatctggaagttttggtcctcgacaggagacatagg

SEQ ID NO: 99424 - DNA, 759 bp, Vitis vinifera
  Intron number 1 from transcript GSVIVT01030540001 (locus G SVIVG01030540001) derived from phytozome v7.0 (chr-ID chr1 2; pos 6588776 to 6589534)
ttcggcctccaaagtcctgatcttagtcggagcaggttcacttgctcctcgcccctctcttcattttctctgtaattgctgtttgatcggcgcggttttgaaagttttggtcaattgtttgttccgtccctcttctttgatttgctatgattctgcaatctcaattcccgttaaaatttccattctgacatgaaaattgtggttccgaatcactcatatgttcttgtatttatgtatgtatgagttaaagctgcataactatatgcataattgtgcagaactgtattctcattttcccttgatttgctatacctgtgcaatctcaaaccctattgaaatttctatttttttttccatgaaaattaggcttcaaaattatatatagatgcatgcttgtgtatgtgtaatatggtgatataggatgatgaaagctccaaaatatatgtataattgtggaagctacgtggggaattaggtaatcatgacacacaattaatatcttgtcccaaacttaactgaatctagttgtatgtgcttgattatgacttgatatgtgcttcatttgatatcatcaagcatgtaatgtagatttgtttatttatttacttattattattattatggaaggactttgttttacatttgtaaggttttcaaatggtttgggctttcaccatactgatatctctctttgctttcatttttccttttccttgtaatacaggtttgactggttcagttgttttgagaagtggacga

SEQ ID NO: 99425 - DNA, 443 bp, Vitis vinifera
  Intron number 1 from transcript GSVIVT01031892001 (locus G SVIVG01031892001) derived from phytozome v7.0 (chr-ID chr3 ; pos 5212091 to 5212533 reverse strand)
ggagttctttaggtatggactccgtcgtgcttctttccggccatgttttgcatctttttggctggttttcgatatgactacatttcttatcatattatgacgtggaaaataatacggcaaaaaattatgtttttttataaaacttggcccatgcaggtctcgaacctgcgaccttcgcgttattagcacgacgctctaaccaactgagctaataggccattagatttgtagatttcctgtattacaatatagatttaaatttaataacaatgacattatcagtagcatttgattcatgttcttcactcacgattgagaaatttttccttttcatccgttactccccgaaaccctcttcaatctgaaactgcaatcatggctgtttccaatctcctatctgactcactcaaagtgattccgtcgagagaaatcccaaaaaccag

SEQ ID NO: 99426 - DNA, 255 bp, Vitis vinifera
  Intron number 1 from transcript GSVIVT01031317001 (locus G SVIVG01031317001) derived from phytozome v7.0 (chr-ID chr1 4; pos 415746 to 416000 reverse strand)
gctactgctctctgttcttgccttctactcttcaggtaagtaactgacactaatgtttttaatgttctgttttatggtttggtttgttttcatctcaaaatagcttgatctaactgggattttgagtaacgctgcatatacatttagttttcttctgatgttttccctattgatggattgaattttatggacattgaagagcttaaatcattattttcattttgttccatgcagcaactctggtgggtttctcct

SEQ ID NO: 99427 - DNA, 759 bp, Vitis vinifera
  Intron number 2 from transcript GSVIVT01032423001 (locus G SVIVG01032423001) derived from phytozome v7.0 (chr-ID chr1 4; pos 27259824 to 27260582 reverse strand)
ttcaggtatgtgagagattgagaataattactgttgctcacttctgtgatatatttgattttgtaaaatgttttgtaagaaagaggtggaaaagaccatgcatctctgtcagaaccaatcacttggtgggtcttggggatattctgcatctgaaatgatttgaaaaatatctttactttgatctgccaatcgtcaataatgtgctgttcattttttttggatattttttttcaaagatttattaaatagtttgctacagctgactacacacactcgaacactgagttgatggcttctctagttattcttcttggttacctgttcttcacttgggttttatgttctcatatttttttagtagaaaactgaaagtgttgttagtagaggaaatgaaaatatgagaaaggttatgttgttgtcatgtgcatgcacatgcatgaatgattgattatttctaaccacctctctgcctaaatataatgaggctgtcattgcatgcctgggtaggatctatcatcatcatctcagattttaacaatagtagtaaaatggtttgttttattttattttattttttcaatgttagggctacaatattcaaattggtgaattgaaaatccatttttctgagctaggatctctcattatcttcaagcaattatcgtttttggctttcatgtatattttgactgctatagctaatttgtggttttgcaaatttcagagtctttcacagtttaacctccctgtttcacttcc

SEQ ID NO: 99428 - DNA, 857 bp, Vitis vinifera
  Intron number 1 from transcript GSVIVT01035377001 (locus G SVIVG01035377001) derived from phytozome v7.0 (chr-ID chr4 ; pos 882630 to 883486 reverse strand)
aactggtttgttcgtttgtctcgttacaacttctttctgaatctttctttgattaagacaagtgtgcttttccaagctttggtttttgttctcaaaaagggcctttttgacgattctactgttttttttttaggagttgaaatgggtttttgacgaattcaagtgggcgtcttctgtttgttaatgggacgtttttgtttttggtgccaaaacatgaatttttgtatgattttgtagtcatttgaaggagctgtgaaatgggtgtttgatgaattgaactgggtttcttttgcttgatgaaatgccaccatcgctgggctttggttctgtaaacatgatctttttgatgattttgtgttcattttatggagctttgcaatgggtgtttgatgtgtcgaactctgtcctgtttgctaatggaataggttttagtttctgggcttggaacatgatttttatttttttattttttttattttatgattccgtgtttattttgatgagcttgacattttgtatgatgaattgaactcagttttgactaaatgggacaggtcttggattatcgttcttggtttattttgatgatttattgaactggatttcctctgttttggcataatgtgactattctggggttttgggttttgctctaaaaaaccactgagcttttgttttgtattttatcgactatgggatggatggtttggtgcatctaactcggtttcttcgatgattccatccgaagataggcctgttgttgggttttccatgcttctgtattactgttctatgagttttcattttaagtttttatgggtgtgggttgcaggtaaagagaaagataaacttagtct

SEQ ID NO: 99429 - DNA, 899 bp, Vitis vinifera
  Intron number 2 from transcript GSVIVT01031668001 (locus G SVIVG01031668001) derived from phytozome v7.0 (chr-ID chr5 ; pos 19895649 to 19896547)
ttcagcaccacttttcaaggggtaagtttcttttagctgcattcatttggattttgcagtgtactttgtttgtttacctggaaaatgtttcaaggcagtgttttagatcagagtttgggactggtcagatttattgataaatgaaaggaaaaaaaaaaagaaagaagagtgagagaaggtgtgggagggaaaatgcttgaagggtttataagcgaaccaaaaatatgtatcgaactaacatgcattacataatcatgaaacatcttaatgttgcaggggttctatttgaggattgtgaggtgtttactgttagcttgtgcatgttatgtagttggtgaagtgtcacttagtcacttctaggagaaatggattgtgcatgttacatatttgatgcaatgcctcttagtcctttctaggaaagcctattatttgttgcaaaatgatacttgtttaattttctttcttctctatcaaacaactttctaccccatgcaaaatagttcaagcaagctcctaggtcaatgcatgcaaatagcatatgaaatctgaggatgattgaatctgtttgatctatctatttgatataatgttattcagtctaatttgtcatctggttgttgcactggagcttctgtactaatggaagacatgctacatcactgtgcataaaaaggttgactgttagttgctttgatttgcttgccatttgattaattggtcaaaatgctttggcttaataagaaaaacagaagaagatactctcctggttggctttttagttgaataaatccatatcaatgtgctcctttagggagaagtattcagatgttttataacttcatggacgaaatgtgaatgacgcatctttatttttcaatattttcaggaagatcaaaagg

SEQ ID NO: 99430 - DNA, 549 bp, Vitis vinifera
  Intron number 2 from transcript GSVIVT01035643001 (locus G SVIVG01035643001) derived from phytozome v7.0 (chr-ID chr4 ; pos 2927382 to 2927930)
gggtcatcgctctcgggtctttctctagccttactgtaagtcgagttctggttttcttctattttctgtattttttttatggtctgtttgtttcccgggaaattgcaggagaggaagaggtgtagagtttttttagatagttgaatggaccatcctttgaatgggtacaaaattctgaattccctctatgtggttgctgataaaaaccaagtctcacagtttataattgaattaaaaatgggaaactccgctaaaccatgcaaattggttctaagtaatgaaatatttaagattcaaactttggatttcttttcttgtcttagattttcccagcagccaaccagagggggaaataatttcctcttggcctcgttttgttaacctgtttcatcatatttatgtgtaattgggtagaacgattcctattaacaaccaaaattttacttttctctggaaactgaaaacattttctcccaagacaagcatgtgctcatcgatattgattttcaaaatctaatggtgctcagttttgctttgtttcaatagggg

SEQ ID NO: 99431 - DNA, 994 bp, Vitis vinifera
  Intron number 1 from transcript GSVIVT01036977001 (locus G SVIVG01036977001) derived from phytozome v7.0 (chr-ID chr3 ; pos 9342261 to 9343254)
tcggtttttggagcggttcaggaacaccaacggtactctcttttacttgaaaagtaaattgcctctcttttgatttcttggaaaataaagaggaaattataggccagtttggtggcataaatgggattttttttttttttttttttaattcaaagcagaaccgaaaagttgctgatacgatttcaagaactgtttttgaaaacattttatattgcttgaaaacaataaaaatgaatttgttcattcttttgtcttcaaaaatgccacagcgcctgtaattttgaatgtttgtgctttgcattgttttggccaagtgactcactcaaaagtaaggtagatattgttttctattgaactgggtagacaggcatttctcctttctgtggggttgcaggatgaaaatgattagactttaaattattgtttcttttagtttcctgtcgtttcttggcctccaaacatgtggagggaattgagaaattgaagactgcttgtttgtaaaatatttggttacaagcttgggtcatgagcaattcagcataatcatcatagttttgaagtaatcatgtaatttcaaaccttggttgaacctgaaaatgaaagattgggtaaattggagccaattggaaaaagggtttgttttccattgatttgcctttatcaggttcaaacaaaatttaggaatgtcatttgtatgatttccgacagcctaagacataaaatacattgtagaaaggcttcatattagaaatgaggctgcactatatgtatactaattcaaatgaaaggtatgttcagatggttttttcaggcatgtcccaatagctttctccattgctcttgtccgtatgatcttatggtttatgtgtttcttgatttttattaattttatttggtttattttaattttatttacttggatatgtcatgctttttatggacattatgaattttcaacagtgcaggctttgttggtgattccctaaataggaat

SEQ ID NO: 99432 - DNA, 673 bp, Vitis vinifera
  Intron number 1 from transcript GSVIVT01032470001 (locus G SVIVG01032470001) derived from phytozome v7.0 (chr-ID chr1 4; pos 27725904 to 27726576)
cttcgactattgagtatctgaaacccaacccttttgtgagttctggttttttctcagccggctattctgtttaatgcccgactcgtagttttttgtcaaaataatttgagggttcctttgttttttgtgatgttggcactcatgattgatggggttgtttcgaagaagcaagattgttccttttttgttttgagatcatgtgttattctattgtctttgattccaaacgagggagctggcggacatgattgtttttagttttgcctttttgttgtatttgtgaaccatgccctcaaagcttttctgctttgtgggtcacccaatactaatttttattattcaagatttagtttaattctcttttccccccaagttttctcagcagccaaacatagctttcctttagtctgtttagtttttgttcaatcatgactcatgaatacacgttttgaaatttgggattttcattcatgctcttttagtttagatctttgattaggaaactgggtaacatttgcattccatttttatctgttagtgccttttcgccttatattagttcatgtagttgttggtaatttgatgtctattcaattctcagaaaggaaagaaaaagtgaattactaatttttcttttctcctcttgctcttgtccctcagtagagggattgca

SEQ ID NO: 99433 - DNA, 804 bp, Vitis vinifera
  Intron number 3 from transcript GSVIVT01032470001 (locus G SVIVG01032470001) derived from phytozome v7.0 (chr-ID chr1 4; pos 27727449 to 27728252)
aggagactgttagagtaagcttctagactgataatttcgctctgtcattcattcattcatcatctttgcgatttggtaagagaattgattgccattcatttttttcatgggcttcacatcctgcttagttgatcaaacttgaaaaatttgtgtgctgtgccaaacccataaaattttaatgtgcactcctccaggcgtgggtaccatttaggaggaagtttggtaggaaaggggaaaaatatggggtatcgggaaatcaggttaacaatatagcttggaataaatattttcgttcttataattctaggaattttcatggtggaatgtaactcaaaaatgctttgaaaaaggttaagagaagaatcttttcctgaaatgcaacagttaatattagatgcatatatctgatatacgtgatacctccaaattcaatcctctgtacaggataagatttgattatagtaaatgtactagcaaaaaatactgtagtacattatcatgggtgtcttccttgagttacttctcaacaagtctggattggggatttttcatttttctttatagttccctccttgtgttctgttcacggcatgttgagacttaattatactattaagttctgagaaattagaaataagaacgcttttttgcacctatacctgttcttacattgtgtcagaaattccagataaatattattcaattagcatcattaacaattttcttatgagtcatcgagcttctcctcaagtttgttattattctctaggtggtttgtacagaaggacctgaccgaattagaga

SEQ ID NO: 99434 - DNA, 877 bp, Vitis vinifera
  Intron number 1 from transcript GSVIVT01037037001 (locus G SVIVG01037037001) derived from phytozome v7.0 (chr-ID chr3 ; pos 8657432 to 8658308 reverse strand)
ctttaatcctgttacacctgctaacagtccttcaggttcttgggtttttcttattaatttcttttcttgtttaaaatttcttttcaataacccttcgattgtctctaacactaaaggcgttaatcctgctacacctgctaacagtccttcaggttcttgtgttttctttttattcttttcttgtttaaaattctgtgctttcttgtttaaaatttcttttcaccaagccttcaattgtcgctaacacgaaaggatttaatcctgctacagctgctaacggtccttcaggttcttgtgttttactttttattaatttcttttcttgtttaaaattctgtgctttatgtttgtctgtcgggaaaattttggacattctttgttgtgaatagtagtagttttaattcggtttttcttcttagtgtcttttttattctaagatttcttgtactgcctgtttggtttctgggaaaataaaagaaatttggtggatggagtttcagaggaaatccattcacaagatcttcatcttgggtggtgggatgggggccggggagagttttagtatggttatagctgaaaagtttccttcaggttcaagggtttttttcttctttctttatttattttttgttctaaatttacagcaccgcctgtttggttgcttagaaaatgagaaaaagaaaattaaaaaaaaaaatctagtttgattatgggaagggttagattgggtgtgacatttgaaatttctaattttatcatgggtggcatttgaaagatgtcctattttcttttgcttcagtagtggaattagaactctgatttgtttcttgatactgtcatagattttccacgaagatactccattgcaaaagaaggt

SEQ ID NO: 99435 - DNA, 648 bp, Vitis vinifera
  Intron number 1 from transcript GSVIVT01035674001 (locus G SVIVG01035674001) derived from phytozome v7.0 (chr-ID chr4 ; pos 3198521 to 3199168 reverse strand)
ctctcaaatcttcatctcctgcgaaagctcacctggtaattatagttttttctccttccccttttttatcttcacttttccgcggttttgttgttgagaaagaactgagataaacaaaacgaagagaaatttgaatcttatgctcttttgagtgctgtagaatggccattggtctatttggtaggtgagaaaacacacagaggaaaagaaaggaaattttgaatcgtgtttgagtattaaaaatcgagtgtaaaaaaaaattatttctatttctcatttatgtttgagcatatatttatgttgattaagggtgagaaattgttggaattatttgcgtagttcattgccctatctttcatattctgatttttcatgtatttttttgtttggggtttgaataattaaagaatatggaattccatgtttggaacttcctcatttgctgaaccagggccgtgttttcttagtcggtgatttctgggtttaatgttttttttgttcagaatccaaacatgtccaaaattctgaattaacaaattgccagttaactttttgtaccctgattatccaattttcacaaatcttgtgaaaactacaatatgcttctgctaatactttcccccattgtttgattgtttaggtcttgga

SEQ ID NO: 99436 - DNA, 941 bp, Vitis vinifera
  Intron number 1 from transcript GSVIVT01034022001 (locus G SVIVG01034022001) derived from phytozome v7.0 (chr-ID chr8 ; pos 15778078 to 15779018)
tcgctagtagcgctttcgctgcttgtttcgctgaggtatgcggttgccttttgactgtctttgaaataaatctacgatcgcttcgtgttaatttttgttgttcttagtttctgagatctgctgtgatggatctgggagtggagtgtgaatttagctttgggaaattgtgctgtttaggaccttacctttttgtttttgtgtttgtgttctgcttttcagacacactgcaccattaaacacattttcctctctactgattttagaagcacaaaactcgtttagataatgcaccaaagaggtccttagttacaataatagacgtgatcatggtgcatggactcggtgctgagtaaggaaattccgcaaaatcagggtatttggcctagattcctacgggttttacaagatgtgttgagtaagaatgaactccgctgaactggctgaatacaggtgtatcatttttcattgatttggaacccagaaccctgagaaatgtcaaaatctgtcctaatcaggtgattctatgcatcaattccatcagtttgaattttgcctgatattggtagataatttactttaccctgaaatcatgcagtccaagaaccatcaattctaattcttatccttgtgcgtggattctggatcttctagaaaaatccagttcagtagggttaaaacgcctgaattgtgtgcggaccaagtataactaggttctttgagtggtgttggggttcttttacattgtaccaatgtgtttcttcttacatgtataccatgagaaattcaagacaccaagcttctaaagattaatttggatccttgaaataaactaccttgtactgtcttgatgtaaattggttcctatggtgttatggcatccctgaagtgtttttaattttgatgcagatctgtacaattcctttggatactgctaaagttag

SEQ ID NO: 99437 - DNA, 863 bp, Vitis vinifera
  Intron number 1 from transcript GSVIVT01031365001 (locus G SVIVG01031365001) derived from phytozome v7.0 (chr-ID chr6 ; pos 19550683 to 19551545)
aaaagcgcctcggttggttgctcaccttcgcatccgtgagtcaattattattattattattattttttaatttgtgaaattttattttatctcatactatgattttcctaaaacgttcatttatctgaggtttgcttgccgagaaaatgaaggaaaaagaaacaggagtgtgagttgtagggcactagccactgaagacggtcagaattttgacgagtgatttattttttgatgctttattggtcttaacaacgttcggggactgatttctggtcttatgtttatttcgcctgaattttcacgctttgtttcccaattttgctgaaattccacttatttactgtttggtctgtttggtcttggagaaaaaggagaaaaaaccaagaaatatagagaaaagaataactaggtcttaggatgtctgggctgggtttcaagatgagttatgttgtttcaaaatgcaaagttgatttccttgaaaactgtgactgtaaagtcttttgaaaatgcagttttttgtattctcaaagaaaaaaagtatttttaatctgtttttaattatgaattgttaaaactttttttttttttttttcttttcttttcttacttgggtcgagggcacaccaaatgttaaaacaaaccattttcaaaccttgaactgaacttgccctatcttttcttttccctttccgaaataagcaataaatagtctacggaagattcaaagttttatttcctctactttctcatttttatatttcttcaggaatcaagtgaacctaacgttttcttaattttgaatgcaaatactgttatatggaaaacgtggatgcattgttgtaatctgcagtcatcttgggagg

SEQ ID NO: 99438 - DNA, 585 bp, Vitis vinifera
  Intron number 1 from transcript GSVIVT01036558001 (locus G SVIVG01036558001) derived from phytozome v7.0 (chr-ID chr1 4; pos 23437652 to 23438236 reverse strand)
aaaaaccagagagcaaggtgattcttgttttctttagtttcttcactttcagacggatcttactgggttttaccctgtttctttcttcctccttttgctgctttcagggtcaccagtttctggtttgtgctcccttatgataggtgcttaccacttttcaagtggttttcatggtttatgctgttttagctcaaaggaacagatggtatttttagggcaccctattcatttataggtggtggcctagtaaaacccccttttgagaactcacaagtactcattaatcccaagtgacttatttctctctttctattttgattcattgatactaataagagcttgtaaaaattaaactcaatttttgttttttctttggctttgagtgcctagatttcatagtgaacacaggccaattaatacagagatgttcaaaaagtgcagttccttttaggtttctagtaattttaccctgaaaatcactgatcattcttgatgtttatcctctgtatagatatatatgtatatatttttaagaatgaatggtttagtatgaatataattttctttaatttttctgtaacaggt

SEQ ID NO: 99439 - DNA, 1069 bp, Vitis vinifera
  Intron number 2 from transcript GSVIVT01031297001 (locus G SVIVG01031297001) derived from phytozome v7.0 (chr-ID chr1 4; pos 570383 to 571451 reverse strand)
attcagaatcttcaaattccaagagaattatttgggtcagttgctcacatgtttcttacttcaatacatattaaaagactacttctttgattataaatcacttagggtcaagctggccaaacagaaaagcatgtttcacaacactatggctccatttggcatttagctaaatggattcaggaaatgttatcggaaaacctccatttctgatgtagttgcagcacaaaaacatggattctttggcaatggcatttcttaacttcctcaaaatgcaggaaactggtttcacatagtttcatctcccccatgcctctcttaaaaaaaaaagaaaaaaaaaaaaagaagacaaacgtgactagcaattaaaatagctagttcaataacttggaatcatttctgttcttgctcactttccaccaacaagtggtgcctatgagactagtaatcataattccccgctttttgatgactcctctataatttatatggcatagttgcaaacggtgaaggtccccgtagaacattagaacaaagttcaaatttatagactacataccatgggcattaaacccaattttaagatgcttccttgcattttttatatttgagatctgttgttaatgtgtgaaatgattgccctagactcttcctgttattcttttaatgtttagtctcgtggtaaatgtctcttgatctaaagattgagcctcacattaagggaagcctgttacatgacatagtaaatctcacagttccttcaattcccaagctctaactctagagatttgtactcttcaagtttaagaatttgtggatctgtctttgtgcaattacacattgacttttcatgttcatggatatcatatttcttgcctttccaaacttttcaaaaaagaaaaaaaaaatttatggatctgtctttgtgcaattacacattgacttttcatgttcatggatatcatatttcttgcctttccaaacttatcaaaaaaaaaaaaaaaaaaattcttgccttttcaaaaacatttcttcaggtgcattttggagttaacagtggtgcaacaaggtt

SEQ ID NO: 99440 - DNA, 918 bp, Vitis vinifera
  Intron number 1 from transcript GSVIVT01031297001 (locus G SVIVG01031297001) derived from phytozome v7.0 (chr-ID chr1 4; pos 571722 to 572639 reverse strand)
tgcttcaattttaacccctttttttcaggtagattttctgggtttttgatgtctgtgatcatttgggtgtctgatcagttcaatcccaattggggttttggtttcttgtgctttgactttgttgcagtgacgaattgggttgggtttttggtttaatctctctttggtgtctctgcgttttttttcatttcttggatcggattattagtttgtgttttgctttaatctgaatgggttttaagtttcacggtttgtctcttctaatctacttctttttgcaaatatgttgttcattccttctggtgttatactttatctgctactgaagctattgggcttttcgattttgtttttgtttaacattttttaatataatcacatgaaagtttagatttttgggtgttatttctctgtttcagaatttgttaaaggtattacaacaaggaatacagaattttctgctgttactttttcatggatagtggagaaaacagaggaaaagaaaagaaaagaaaattttgaatcacaagttttacactgtctcaattttgaaaaaaatggaaaaaaaacccacctcagcagaatcaaatagtcaatcaggcgtagttgagtggaaataattgctttctcaagtcccaaatgatgagaaatcttggattcaaaacttattcttatcttttcccgcattttcaaggaaccaaacacgagcaccaatagttgatctgaatctgctgatatgactattaaattacatcttggagagcattggaatcaatattaagagtgccgtaacatgaattttgtgggggctgcattgatgttagatgtaacattttactacttgatcatgcttacgctgactgctgaactcattcgatttcatttgttgcaggtattgaggcatttggttccaatttg

SEQ ID NO: 99441 - DNA, 425 bp, Vitis vinifera
  Intron number 1 from transcript GSVIVT01033415001 (locus G SVIVG01033415001) derived from phytozome v7.0 (chr-ID chr8 ; pos 20883521 to 20883945 reverse strand)
cccaggtcatttctgttttttcttttttctcctttgtttttttttctaggttagtgacatcaatcttccttgaatttaatgagtggggttggtgtcacattgaggatccgttatgaaatgatctcaaatcctgatacaagaccataaatgcagacaaccccctaagttgttctgcctgtttttatcagttgttgcattttttttatttgggtttttcttgaatggacattctattgatggattgtagtacctaggtttcatttagtctacatttatctactatagggatgaatttggtgtgctgtaaggaattgcacaatttttttgttcgaagaaacaaaattttgatttgggacttactagattttgtgctcttcctgttggacctaaagggtttcccgtattttcttgcagtggcacctcta

SEQ ID NO: 99442 - DNA, 813 bp, Vitis vinifera
  Intron number 1 from transcript GSVIVT01037656001 (locus G SVIVG01037656001) derived from phytozome v7.0 (chr-ID chr1 9; pos 6593862 to 6594674)
gccttccgtcatccctccgacttttcaatcctccagttacctttctctccatgtctaaatttcccgtttacgtactgattggttgctgagaaactagaggaaaagaaaaggaaatggaaattttaagcttttgtgtgttttcttttcttggttgttttggtttcaagaaaataaaatgatcagctggattaagtgtctttgtatgattatttggcttacttggtagcttgtttacggtttggtttcttagcaataaaatagaatcgtgttagggtttctgttaggattggattttgagtttgcagacatatagagttgatgagtcggtgctactgttcctgttaaatagcttatttttcctttcgaattttttaactcaatgtcgattttatcatgtagaacaattgtttttttttttcttttcttttttgggcttacaaactagaagaaaagagagacgaggaggaaaaaaaagattgaaacttgaagcttgtgcgtttttttttcctttggcttgttgcttgtttggaaaggaaacataattgaccagctgaattaggtctctacgtataactattttgctcacgttggtgttttaattttaatttttttgctgcggtgggaggatggggattgcggtttcgattagtttcaatttttttcccggttattttcttcaggtttctaagcaaccaaacagcatcttgttagggtttctcttatgatagactttgagtagggacggttatgagcttaatattgagtttgtttgttgcaggatcacctattgagaagacaaagcctccaagtttg

SEQ ID NO: 99443 - DNA, 644 bp, Vitis vinifera
  Intron number 2 from transcript GSVIVT01037656001 (locus G SVIVG01037656001) derived from phytozome v7.0 (chr-ID chr1 9; pos 6594733 to 6595376)
gtgagattgcggtgaactttccagcagatactaaggtcatttgatgaataatcatggaaagattcttaatttggtgttttgttatatgtttgaccttaaaaatatgcatgtctcaatgaaaggggtcctaagacaatattcaataatacatgttacataattctacaaatatgtcaatttgcatgactattcattagagaaaccaatgaaattaagatatatatgtttagcatgtttatgcacctaaccattcatatttattaaacactatttgtaagaacatcaatttggctccaagaaaacccaaagatacttgggcatgtagttgtgggactaactaataaaaactgcgcttgacttatattccaagatatatgttcgaagtgcactttgctatggtctattcccggaggttctcacttagttgaattcattagttgcaatgacatgcaggtcagatcaaactgaggaattgatgcaaactggtaggaatttaaaaaataataataataataataataatagaacaccaaaggctttgtggtggtgcaatttacaagtttcactctttacataagttcttctttaagagatccttttattattttattcttattttttaagtttgtgtcattgaactacag

SEQ ID NO: 99444 - DNA, 952 bp, Vitis vinifera
  Intron number 1 from transcript GSVIVT01038561001 (locus G SVIVG01038561001) derived from phytozome v7.0 (chr-ID chr1 6; pos 21825907 to 21826858 reverse strand)
aaaaggtaaatgactttataattcaacacgtattattccatgattcttgcaatggattcattatactcaaatttgaactaggtctttatagccaagttgttggtctcatttttgcttgattctccatgtgtttgattctggtcttaaactgcttgaatttcttcgcacttttagtagcaaccgaatttggtcgtgtcagtttctcatctaccatactttaagagctactgaagtagcatttgatattgtttttgttattgattgaactgctttgaagtgactattaataggctctggtgctgagatttttttagctagtctacacattgggttacatgatacaggactattgagtgctgattgccccctcttttcaaaacttagtgttccttttgctttttcttaacaaatgtgaaggaaaagcagaggagggagcaactagaatcattttcgattcacccatgtgactggcctaaatttcatcagccattaagtggctatcactccgttggaacaagcttctggttctaaattcatgttactgtcaagcttctaatggtacaactagatgctataataaaagcatacatgtcgtcaccatcactatgaccccctattagcactgccacgatggccagagccatgatctcctccatgtcttcaaccccaacactgatctttgccatttccaccaccagtatgcttgtttcttagtgtagaaaagactttccatctgcttagttctgaacccagggtcatgttggttatggaatcaagagtcaaatcttcctcaccggttcatttcaaagtcgaagagcgtgcttgagctctctcgcttttttttctcctttgttaacaattcaacagtttacattgatgactttctatttcctgacgaagtcaaacatcaaaccaattaaatggcccgactttgaagtgtcacagctggttg

SEQ ID NO: 99445 - DNA, 733 bp, Vitis vinifera
  Intron number 1 from transcript GSVIVT01032166001 (locus G SVIVG01032166001) derived from phytozome v7.0 (chr-ID chr1 3; pos 21897986 to 21898718 reverse strand)
agctgcaacaaatcgtaaacaagcttctcaacaatgtgagttttcacgaatttggtgtttagattagttagtacattctatgatttttctcaggtggtcacatttgaacatacacttcacatatgttagatttcttttttttggactgtatttatttgactttttagctggattgctacagtctggaatgagacatttttctttgtgaaattcttgatcaaatttttggtggagcgttggctgaattcctgaatttttgagtcgacttatttatttatttattttttggcctggacttattctcaattggtttcgtttatggataattgaaacctaatagggatgtctggttgcgactgctggtaggcaaataacttgcaaattttgtattcgatttaggtagtttttgtttttctttttgttagtatttgtcaaagtttttaagctgaatacaggaaaaaattcttatttttttgtatcaaaatttacctgattttatggttattttcacatgtgatttgcaattcaattcatctggggtttcttttttagtgtaccggtatccaataattaaaattatgcttggaagatgttcaagaagttgttaatttggaaaaatggtttaggaaccatacctgtggaaaatatatagttggttgtgtttgctattttatgaactagttgggtgttgaactctgcattttttggggtcttcaggaggagaagctacctt

SEQ ID NO: 99446 - DNA, 726 bp, Vitis vinifera
  Intron number 3 from transcript GSVIVT01033095001 (locus G SVIVG01033095001) derived from phytozome v7.0 (chr-ID chr1 4; pos 25677699 to 25678424)
gtatttttgaggtttgtacttccatacactttactactacaattcttattggtttattctgcagtgtttgaagctttagtatcaggaaacttgaaaatggttatttcctctttcttttgtttgataaccttgcttatggaagccctgattttgttgaaccaggtccaggatccagtaacttgaaaattctttttttcctcactcatctatgtgaatttggggcaaaagatttatcattttaaagtttctttcttggtttacaagtttgggaagatgggctcccttcccatttgactgattgaatctctggaagatgggccctgattttgttgaaccaggatccagttacttgaaaattccttttttcctcacgcatctatgtgaatttggggtaaaagatttatcattttaaaatttctttcttggtttacaagtttgggaagatgggcttccttcccatttgactgattgaatcttctggaagagatttttttctttttagctgttttaaaactgagcttatgtcagtagatctaggacgtgaatgggcatgaggacttgtcgaaattgatggagtgttttgtcattaataaaatcttaaggttttatacatttatggttagttttgcgcatgaaagatattattattattttgaattcttaatagttctataatttgtttcttttacaggcagctagttttgggggctctaacattgatccaac

SEQ ID NO: 99447 - DNA, 238 bp, Vitis vinifera
  Intron number 2 from transcript GSVIVT01031671001 (locus G SVIVG01031671001) derived from phytozome v7.0 (chr-ID chr5 ; pos 19950786 to 19951023 reverse strand)
agttcgcaggtatgctctattgaaaatttacacccactttggcattgatttatttgtggattaccgttaccttccatttggtggctgtggagaagaaaagaaaaatgaaaatttgatttgttttataaaagattttctcattaaccaaacagaggattttattgatttgtaattaaaaatttctttgctgtttgatgtttcagttgcaccgcctgctggttttccggatcatccacac

SEQ ID NO: 99448 - DNA, 662 bp, Vitis vinifera
  Intron number 2 from transcript GSVIVT01034165001 (locus G SVIVG01034165001) derived from phytozome v7.0 (chr-ID chr8 ; pos 14724944 to 14725605)
caatcgaatcaaggctgagagtccagttcatacaggttcttttccttatttatttgttcatttaatgttcatttgatcattaatggttaaatttaattttccgataatcttctatcttcagagcttagctggatttcattttgatttggcatttttttttgggctttttagatataatatgatcatcttccctgtttggagttttatgactgcccttgtgagagtttgagcacaattttttggaaccgaacttttattggtagttttgattacttgcaagacagtatacctctggtagatattattgcctttttgtaccaattcaggcattttttttctgtcctattgtaatttgatttggtgaaatttaccttttgaggttctgggttcttaggaaaacttctgtaaatccgaagaaaggttttgtgggatattttatgcaatatcccctcaaatgttagctaaacagtaacttttatgagcattgatgtgatattgcaatagtatatttgtttggaaatataattggatcattttgaggctgtagacattttgtatttgaattgagcttagttatgaaccattggaagtcctccaaacaaaagatattcaaattaattagaaatgtcctggattggtttgtgtaggggcgagctcgaaaa

SEQ ID NO: 99449 - DNA, 967 bp, Vitis vinifera
  Intron number 2 from transcript GSVIVT01035322001 (locus G SVIVG01035322001) derived from phytozome v7.0 (chr-ID chr4 ; pos 458719 to 459685)
attacatccaagggcttcccgtattttctcttcctcaaatctctttctcgctctacttatttatgttttttacgtgtttgtgtttgattggttttgtttggggatgaatttgatttttgtgatttgtctgttgttaattgagtgattggatgagtactgagatgaacttcatcttgtttttgttgattgatttgatccatttttttgcgtggttttgctactgtttggtgaattttagctattgcaagtttgctggtttgttttttgaagttttagaatctgatgctgttgcgttgtgaaattaaattattaaagcatctgttttcaggctttagaatattagacagtaggggagatgtcgtttgaatacactttcatttttctcttctttattctcgagaggacaaataattttattttatttgaaaagtttatattttttactttttgaaaattgaaaatatttttacaaggaaatgcacaaattatttcctattatgcttttgcttccaaaaattataaatggaatgcatcctgatgatatcttctctcaattaagtatcaatagaaaattttgtatttttttaaaaatttactaggcttccagtgttgcacgaacactcgggtcaactgcacgaatctttgcctatctattagctctatttaagcttttgtctccgttagattaaagaccgtcagatttttatttttattttttattttactgcattgagttgtacattttgatttctggtgatatttctcatgtttttaaatcttatttatttattatttttgactcaaagactattctgattttggaaaatggttctacctgaagtagtttagtgcatatgaacaaggaattgattgtaatgtacattgtgaataaaatcttagttacttacttttggtgcttggtcgtgttgcagacttatcccaatcagttgcagacgaaccccgcata

SEQ ID NO: 99450 - DNA, 469 bp, Vitis vinifera
  Intron number 3 from transcript GSVIVT01036565001 (locus G SVIVG01036565001) derived from phytozome v7.0 (chr-ID chr1 4; pos 23526186 to 23526654)
cacacctgaccgccgccgcaaaactcaggcacttagtgagttctgttctctcatgagatccaactgttccacagtctcttcctgttcaattatttttgtttgattgttttcctatccatttgattggtaagaaaattcaggaaaaggaaaaggcttcattctttccccactgacacgataggactccaggctatgtttgttttatttgtcatagagatatcgataagggaaacataaatggcatagctgaaaaattagttgctgaagatctaatgttagtctacttttgggatggctgaattttgttgtttaccgcagcaatcctgagttttatctacccaattttagaaccataatgctctttcctttctctttggttttaagatacggaatcatctttggctaaataattttcaggaccttgctaacatttttccttcatgtctacccttgtaatgtatgcagtgac

SEQ ID NO: 99451 - DNA, 319 bp, Vitis vinifera
  Intron number 3 from transcript GSVIVT01032045001 (locus G SVIVG01032045001) derived from phytozome v7.0 (chr-ID chr1 3; pos 23253447 to 23253765 reverse strand)
gaactggtattgattccttctttcccttgtttgtttcaatggaaaacttccttggatatggtagaaaatttattaatcatctgcaatttgtaaatgggaacaaatttcacttacacagtaatttttttattttattagaaaaatagattctgatgaatttttttttctcttgaaagacatgatccattgtttatgttttattatttctggtacttctttgagcagtttgttaatttcttttttggtttcttattagacatgaagaaaaccttggaataagatttctgattttctgtttgctttgtttgaatcagcgtat

SEQ ID NO: 99452 - DNA, 382 bp, Vitis vinifera
  Intron number 2 from transcript GSVIVT01032045001 (locus G SVIVG01032045001) derived from phytozome v7.0 (chr-ID chr1 3; pos 23253800 to 23254181 reverse strand)
ttctagggttattggaattcccaattcgacatcaggtatttcaaatttcggggtgtatttcggttgtttggttggtgagaaaatgcaggaagatgtaggaaatttgagttttgatttttttctttttttcattataagacacgggttgtggtttgtttggccggctgatgaaatgcgagaaatgaaaaaatagtgctgtttgaattacagtttgaatgaaagggatttaatgactctagtctacttaaaattgtgttttctgttattttcgttcttttttgaatggaagataatgggacactctactctttcctttttttcattcattgatgtggttgaaaatgcagttaatcatagaaaccgtttgctgttcggagttcta

SEQ ID NO: 99453 - DNA, 775 bp, Vitis vinifera
  Intron number 2 from transcript GSVIVT01036515001 (locus G SVIVG01036515001) derived from phytozome v7.0 (chr-ID chr1 4; pos 22952420 to 22953194 reverse strand)
tggcttcagctctcgtggccgttcgtgattttcaggtattttttttttctcaatcaggctttaatttcatgtttcaattgtcatccgtttggttccttgtaaattggtacggagcagtcaactcattccggcgaaatagaagatctaaatgaccaaattttcctgttcaaagaagatccctcttcttcttcattctcaaacaggaatgcataaacaaaactgccacttcatatagatcgttgtggcatgaactcatttatgcgtttccccaacttctgtgaccttctcttgaattctcaaaacttctgtcgttccatccccgcaagggcagggaacccggctgtctcggtgggaaaataggaaaattgaagtgcaaaaaaaaagaaaaaaaaagaaaaaaggcgggaatttgatttatttattcatttatttttatgtttaaaatcataggaacaaaccctcgactgtactttgccaataggttttttgctccttttgattgctaggaaaaagtaggaaaatttggaatcttagaattttcattaatggggatagggtataataaaaacattagccgacttgggcctaatgatatagctgttcggctttgtatcttttttcagcaaccaaatgggaggatgtcggggattttttttcccttttcatttcctatgggttcttggcaaccagcgtgttaaggtttattgaaatcgatgaaactgttatgttaacccccaattttggtaattttttttggtaattaggtggaaagtga

SEQ ID NO: 99454 - DNA, 830 bp, Vitis vinifera
  Intron number 1 from transcript GSVIVT01036515001 (locus G SVIVG01036515001) derived from phytozome v7.0 (chr-ID chr1 4; pos 22953196 to 22954025 reverse strand)
ttgaaaaaaataatataactaatttcttaaattttgtcaaatacatttttttttcaaaaatatattttaagttaaaaatattttttaaaattattattaaacagactataaaaatgtgtttgttgtgtttttatttcaattttaataaaaataatttttctataaatatttttagaaaaatcacttattaattatttatcaagaaaatactataaactatattttagatttttaaaaatattttctaaattttactaaatatctaatttatttcaaaaacactttttaaacttaaaccatttcgggtcaaatatattttaagttttaaatatattttaaaaataatttttatatgtagtattttatttttaatcattttttatatttatataatttttttaaaaataataataaaaaaagtgaaaatagctaataataataataattttttaaatatttttttttgtttttaaaaataaaaaattgtttttattttctgactattaatcaataattttttgtttttttatttattatggaaaacagaagccatatcaaaagacagctatctaattgctaaaccttactcataagcagagcatcggattagcaaacgacgccgtttcaatactttctcttttgattctgagaataacgatattcccgaagtgcaggctcgtttagtattttctgatgttcttagaagaaaaggactacgccatcacgaaattcaccgttttgccacttctataaattttcatttattgttttgataatttccaatggattaattctgtgtttcctgctgagatcctccgaagctgtttgcc

SEQ ID NO: 99455 - DNA, 586 bp, Vitis vinifera
  Intron number 1 from transcript GSVIVT01035564001 (locus G SVIVG01035564001) derived from phytozome v7.0 (chr-ID chr4 ; pos 2333453 to 2334038 reverse strand)
agtatggaaaatattaaattttgaattagtttgtgatggtaatttcgggaatggttttcatcacgttaagtaattaaaaacctaattaaatgaaaaaattaaatttatatttaagttgattattagtattgaaaagattaaattttgaattacttttgtttggtataatgattttaggaatgacttttgttacgttaattaaaaataaaaaagattaaattatcatttaaatcgataattaatattgatagggatatttctgaaaataaaaaaaatgaaaaacaactcgtaagtacagatatagatatagatattttccaaaactatctatggccattgatcacagaacactagcttcccatctttcatacacaaaccttcctcagcaatggaattaaccaccttcccataaccataccttaatggcattcttctcaaaatcctatgaaaatcccctatgcacccccctctcctcttcctgtgttcccctctcctactactcaaccccacctccctctccttcaatcccagcccttcatcattcctcccgtctccccagtctctcaccttctccgctcccaccagc

SEQ ID NO: 99456 - DNA, 590 bp, Vitis vinifera
  Intron number 1 from transcript GSVIVT01033755001 (locus G SVIVG01033755001) derived from phytozome v7.0 (chr-ID chr8 ; pos 18078497 to 18079086 reverse strand)
aaatttcagataaggacttgaacatcatcattctggtaagtcgtcaactcacattcttcttgttactacctggaattaataaaaatagtaatttcatatatattttaaatacctcaaaatatcaaaagttgttattattattattattttactttatataattaaaatttcagatattttaagatactaaaatatattttatttactctagaattaggagagaaaatggtaataataataataataatattttatttttccaaacaattttgtagattgattgtgagtattattcttagattatgctaaattgtgactctagttgaaatgctttaactatgaaatacttttgttaatagtttttccattaaatttttttttagataaatttttaaaaataaataaataaataaataaaggggtagagagaagaagcaaagaagacaaaaggttaaaaatttgtaactttgtttattaagacaccatcgttcagaaaaaataataacttacaaaaccaaaatttgaaaaaccgtttgatgcaaataaaaaataaagaatgacataaagggctattggtgcaggaaatattc

SEQ ID NO: 99457 - DNA, 688 bp, Vitis vinifera
  Intron number 1 from transcript GSVIVT01035496001 (locus G SVIVG01035496001) derived from phytozome v7.0 (chr-ID chr4 ; pos 1789957 to 1790644 reverse strand)
cgtcacaggtctctccaaaggtgggaaaatcagtaatgttttctaattgttagcttttgttttcaaggttttagttttgatctttcatggagtcgcttttgttttgtttttttgttttctgttttttgtgtttttttcgtatttgcttttctgcttttacttggcctgccaataaagaaggcaatggtgagaatcttcagatacttgaacaaaagctgtgaaaatggattttcttcttctttcttcttcttttttcattattaccatgaataattccaagcaagttcttttcttttcagatgggtgttaatcattattacagaagcatgatagtactgcttatttgaatgcaccgataacatgtggacccatttgctaacaatttaatttcattttctactgttttccttggagaggcatgagaaaaactttaatggagaaaaagaattcaaataaggttgagggatcttggatctttaggcgacagtgttaaagggattgcttcttgtgttctacctcgttattttctgttatgcagaatacttacaagttttcactacatagtctgctgggtgcagatgattgtcggtttccccatcgagcaatggatggattgtttttgtcattattattcaagtactgaatcatgtttgtgttttttggtgaaacagaagcaaggaaacaagtg

SEQ ID NO: 99458 - DNA, 640 bp, Vitis vinifera
  Intron number 1 from transcript GSVIVT01036932001 (locus G SVIVG01036932001) derived from phytozome v7.0 (chr-ID chr2 ; pos 17432124 to 17432763 reverse strand)
gtaattcaaactaacaacactggtgtttagttccaaaaaaattgagagagaatacaaagaaaaaactaaaagtaaagaataagtaaaagaaaaaaacatatatttcaagttaaatctatactatatgctacatcaaacttatttaatttattataattctcacatatataaagattaaataatttgaaaaaacataaagttctaattaattttgattttcttttatatttttcatagtacaacaacatatgatttttttttttttttttaacattgcttttctttccttaatactttcagagaatcaaatataaccgaagacactaaaagagaaaaaaataaagggacaaatgagctagcttttatggattaaagaattttattttatggcttttattttcttataaagtttttttttaaataaaaatttagactttgaaatcattgaaataatttttttttaaatgttttcttttaataaaaaaacatgcatagacatgacacttcatacttttttttagatgaatatatgaaacggaatttcttatttggtagagaaattttcccattttatgtcctgcatggttgtctttcttatagaagagaatcaattgtacctagtgaaacaaattaggataat

SEQ ID NO: 99459 - DNA, 981 bp, Vitis vinifera
  Intron number 2 from transcript GSVIVT01035557001 (locus G SVIVG01035557001) derived from phytozome v7.0 (chr-ID chr4 ; pos 2285463 to 2286443 reverse strand)
gggtcagtttcttaatttataatatgatttttagagtactgagaagtaaagttgaaccaataatcacccaccacttggcaaaaattctcagtgacgtgtcaacccaggtgaagtggcaaactctgtgcggagcgtggcaactctgccgccgtaaacccttgccacgtgcgtgacacgtgacttgcggtgatgtatgggagatagacacgtcaccagaatttgtctcctggtcgcatgaccacaacagtaacgccgcaccaaaattctctgctatttttatttttggccctacttccataatttgagtgtccggtgtcccaaatttccataaatttcttcaattattttttaaaaaaattaaaattattttgaatgatcacaaaacgggtcaaacaaaagatttgatttttgtacttattatgacggttcatatacaaaaacataatctgaattttgaggtcaaaacttgtgtggctagatatttataacattaaattatatcaaatgaataatttaaatgggatgatatctccacgttttcacgttttgacgtatggttttatggcattactgttgggaaaaatgtcaaaataattttggaaaactttcccgtcacaatcatttgtagaaaaatgaatgaggttgatttcacataaattattggacttaggcactttaggacctatgctgtgggaagcccaccattgggctacatgtgaagagttcattgggttaaggttatgtgaggtgtctcatccagaaaagtgaaaagattcttggtggtagggagaccacagacaaggacttatacacactgaattgatcatagaaaggggagagggggtaaaaggaagaaccaccaccaccaccaccaccactaggaggaaaagtgcatctctggtccacttttgtgttgatggattggcacatgggttggccaataatttaacttcctgttcttgactgtgaaaacaggacgca

SEQ ID NO: 99460 - DNA, 871 bp, Vitis vinifera
  Intron number 1 from transcript GSVIVT01033878001 (locus G SVIVG01033878001) derived from phytozome v7.0 (chr-ID chr8 ; pos 17069386 to 17070256)
cgctgccacgctctctaattcctcttcctcatctggtatttcaattttgtttttgtttttttgttatttatttatttattttttcatttggttgctcaggaaatagaaagaaaatgaaactgaaaattttatggcttaattttacaaattacgatcctattagttgtttgttgagagcatcaccttttccctaggcggggttcgtttttcatttttgtatcaaaaagtctgctttcatggaaatttggagagggaggtaagatgctgaaaagaggactccaaatttgaacattttcttttgcttcgttccgagaatcgagagtgccctttggttgttgagaactagtatgaaacggagggagagtaaattttgaattgtagattttcattatttagcactagaataaataaataaaaacgtcctctactattgtagtcattttagacatttttccccttctctttttcttttttccagaatcaaaaggagatttttggtagaatcggtacttagctaatacaggaaaaggaaaaaattttaaaaattgaattgtaaattttaaattatttgctagacccttttcttttaagatcagtgatcattccacacccgacttgcctatacagccagtcgatgtggttgagctaaactttatgttttttcctcttttatttttttgttcttaaatcaatatgaaatatgatgaacatggagttttcttatctttacattcatttgtcttggcagtcggagttaaaatttggatttgaaagttttctgggaatatagaatgtgtgttaaattgtgtattcacttatatcttcttacttttctgtgagattgaacaaatttttgtatgtagattggagg

SEQ ID NO: 99461 - DNA, 877 bp, Vitis vinifera
  Intron number 2 from transcript GSVIVT01034196001 (locus G SVIVG01034196001) derived from phytozome v7.0 (chr-ID chr8 ; pos 14516291 to 14517167 reverse strand)
agcgtctccattattggacctcctgataccctttagtgagtctgctttccgatttggttttaaagtttggatctttttctaacatcttgtatgcatgatgattctgcgttgggattcatttactcttttctgtctttgagattgcgttggtcccgattgctgttccttctctttggttttgatttactgggtctgtgtttgttgttggcttggggttttgtagcttttatcatgattcatatgtgtgcttgtgcgtttctttttgttgggtcgtaggttggttcctctcaagtgatattgctgtctggcctgaccagtacccctctaatctttccatgtctgctctaagaagagatgaataacaatagtcccatgtgaccttcaataatctagatttggatgattttaatcatttgattttgctcaaatctttgaaataattgcacactaaccgggctcatttcaacttgatattctagatgaaaatcattatatgatgggctgtgatcatttcttgctgccaaggtggtaaggaggcagtgggcatccacaattacgagactattgttttgtcaaagccgagtgcgtgcatgtgtctttggtgtgtttattttgttcattttctgtcacagtcactgccttttcctttcatttgcttaatgcagggatgatttctgaatctatgttttcctcaattccatgatttatctgttaaattcttcagcagtgttggataagaagctgtatctgatttgtagatactggggtgatttacattttacatgagattgctgttttcacaaaattgatgctcctattaatgccaaatgtgccattgttgctctcttttgtactgacaaattgtctacttgcagcg

SEQ ID NO: 99462 - DNA, 802 bp, Vitis vinifera
  Intron number 1 from transcript GSVIVT01030855001 (locus G SVIVG01030855001) derived from phytozome v7.0 (chr-ID chr1 4; pos 17668641 to 17669442 reverse strand)
ttagccgcctagccgccggcctagtacctggtccagtcaatcagtctgaccaacaaatttggacacccctccatttttctcccagaatgggagaaaagaaaaaatggttggggagcgaacaagctaacatccattgggccattcatcaaacagaatgatgttgacccaccccattggataatcaatcttcaactccaactggacattgacagaacgtaggagggggagtcacagtcaattcgtggaacaagccgggccacaaaataaaactcaaatcactttcctccaattcaactccatcgttaggggacgaaagccacaacacatcacctttttccagaagacaccaaagagagaataattcagaatctcaaagcaattgcatttaacagtaagctcctgctttggcctccacagtaactttttttctgatttcagataatacaacagtttctttataaaccaactatataactacactctcaacctcatacagcttccagtttattgacacttaccagtcacccggtaccatcacaatggcctggactggcattcttctatatcttattgtttttctctaacatggaaaatttgatctcacaaaccccgaatgcagaaagacagctgacaacccaaaaccatcattttgaagaaacttctgaagtacaattgttaataggaagatcagtcggtgtgcacactacagctctttgctgtaaatgtctcaagctttgttccatgctaacttgcaccatctctgctagcatcttcttagccttgcgagattgatcctcgctgt

SEQ ID NO: 99463 - DNA, 835 bp, Vitis vinifera
  Intron number 1 from transcript GSVIVT01036969001 (locus G SVIVG01036969001) derived from phytozome v7.0 (chr-ID chr3 ; pos 9408862 to 9409696)
ccccgacgaccgttactggttctgcttgcgcgtcggtcagtttttccttctccattttttggttttgcttcgtttcttttcgattcgggttgtgatgtgatgtttgcttttcttggttgattgttgatttttgttcagaatttggtgctgtggtactgtgtttaattttgattttcgaggttgctggtttctattctacattcggattcagtttcgtttcttttcaatttggatttcttcattattttttttggtttttactgatttgtttacacaaatccgcaaatccggacgttttgttagatgtgttgtccgctctgatgtttgcgttgtttgatagctctgatttagaagaactgtttgttaggtgggaaaagaaaaactttcagattttagttggtctggtaactttaggaagatagactaaggcaaaaggaaaaagggaaataaggtagaaaatgtgacggctcggtgttttctaaaatcgtttccagtgtataattcatggaaatatttctgaaattttttgcctttgctttattagttactcaagtaatggaaatttgagatctcaatttgaatttcttcgttttgttgttcttggtttcatatgaatgcttcaactgaagaacatggcttttcccataggatattatcctctgtatatacagtatgtgttaatcggctctctgtgtttgtccaaagtccacaatgtcttcttgtagttagattatctgtctgatttttgtttcagtggcttgcattacctaattttgtttaaatgagcttaattcaattacatctcggctgattgttacagggtgtgaccagaagc

SEQ ID NO: 99464 - DNA, 703 bp, Vitis vinifera
  Intron number 1 from transcript GSVIVT01036865001 (locus G SVIVG01036865001) derived from phytozome v7.0 (chr-ID chr2 ; pos 18515860 to 18516562)
tccgcgaaaagtgcgttcttttctctctctgtctctccagtagattcagatcctttgtattgattgtttcttcttatgctatcgctattcacctttctgagtcaatgggaaattgtgttgggttttttgagtccgctaacccatgctttcaattttgaacctttcctaccctgttcaaatttcgacataatttctagccccttgctcaatttttgaacaaaaattctgttcattttcccagggaaccatgacttgtgggctgctttagggttggaatttggtaactgttcataaattgaaaatagtgggttggattccaactggatggacccattttgggtgcacagaaacagccccttacatacttgaactgatctaaatctattatttcgtagggaccctttctataaaatttaattttctgttcaactgttccatctgctgctcaaaattgatctatgtcaatctaacagtcagtttgtcactcttgcagccttggttgtttttattgttattcacataatgcatttgactttgattcttaatataaaatcttccaatcattcaggattagtggcgggatatgcctcagaaaagtatttctcattcttttagcattttctttcagtttagcgtacaaattagtaagtgcagcatgatcaaatgtttcttgtttcatgtttgcagaaggattcgaccacct

SEQ ID NO: 99465 - DNA, 938 bp, Vitis vinifera
  Intron number 1 from transcript GSVIVT01038525001 (locus G SVIVG01038525001) derived from phytozome v7.0 (chr-ID chr3 ; pos 11001091 to 11002028 reverse strand)
catcccctacgaagaaatccaccgcgaagctctcagtcagtaccctcacattctcatcactactcgattttttattttctaattttttttctggtccatttcttctatgtccgtctgtcttttttgttgttcgtttcatatatattcatgtgtctgttttgagttttctccgttggtctgatttcttgatctgtaactttgccataatgcgtttttattttttatttttcattatttatttatttattttttgcagtagggtttttagctaaatcttggcgtttgaaaccctagtgcatattggtatttggatgattatagcatgggttggacttgtaacagtgagattgtgatatcatcaatcaattgaaagcaaaagtggtttactgatttagattctaatgtttttcttgttccctgctgagagcggctttacgagaggagtgttccaatggtaaaagcagaataaacagtggtttcagcttaagtgtaatttggattttggcagttattcatagattcaaggagtaagggcatttccataggtttatgaatgggccctcctctaatatgaaattaggatttgatgatcatatttatgaattttgaatagattttttccaagttctctgaaataattcagttaatttcatggttgtataatattcagttcagtgattgcttgtactttttcttttagttgtgcaattctacgccacccatttttatgaagacagaaacttttatgtttatgtgcatttgttgcattatgctcatggatagtgatatcttaaaattctagaagtaaaaaatcaggtgagcacagaaggttttggggtgagtcagagaggggcattcttttattaagttgttaatgttgactgcctttattaatattttgtgttgcagtgtctttaaagccagagctttttgagggg

SEQ ID NO: 99466 - DNA, 632 bp, Vitis vinifera
  Intron number 1 from transcript GSVIVT01033707001 (locus G SVIVG01033707001) derived from phytozome v7.0 (chr-ID chr8 ; pos 18456798 to 18457429 reverse strand)
cgggttttgccattgcggaaggcgagctttggacggtattcccctgctgcttcgcttggttttttttttttgtgtataaagttgttataatttattacggtgatgtataagggcttatgatcaacagcctctatgctccattggcttctgaaaattgtaggagaaaagaagggatccgattttttttatcttttgtttgtcacattatttgtaacgaagaaaacaaatgcttccattcaactgagttgggtatacaatttggattatttaatgtgaatcattattattttttttttttatgttttggaagccataacaatataaaaagcataagaatctttgatatcttctccttgtgctttcagctctttactatctcttaattcattcccatgtcaatttagtttttatcgacttaaagaatcaatggagcccaaatttcattttcctgtcaagttaaatcagctcctaaaataatgtttgatgttactttgaatttttagtttagaagctttcaataattgtgaatgaatatttaagggttgttcttgcttctttagtgttgctctgtcagaataaaaatctgatttctgataggtgaggcgcagggctgtggttccttctcttcacaa

SEQ ID NO: 99467 - DNA, 537 bp, Vitis vinifera
  Intron number 1 from transcript GSVIVT01035552001 (locus G SVIVG01035552001) derived from phytozome v7.0 (chr-ID chr4 ; pos 2243293 to 2243829 reverse strand)
tcctcgtcgtcgtcatcgtcgaccattggcacaaggtacagagcaagcatgaggctgaaaatctctggttttgaatgttccgttttctttaattatgcgtctctgcttctgctcttcaacttcaataacaatgcgaattgagatgtaaaaggccactataactcttgcgctctgaaactactagagaacaagaacatgccaatcagaatattattgttttcggagtcacagcggaaaagatcacaagatatcaaatgcatgttactctctctacggagagtttctgaatgttttttggttataaagggaaggaatttattattttttccaatatgattgggcagaatgattttttttttttttcattcaagttctttgacatttgcctctcagaattttcattgctgaatcattttgtgttctttttttggattttttgggacgaaattttcactttgtttctaacttgaatgcattacatatttctccttcccatttttagggcattacgtcctgaactgtttcagaaaaaggaat

SEQ ID NO: 99468 - DNA, 426 bp, Vitis vinifera
  Intron number 2 from transcript GSVIVT01032837001 (locus G SVIVG01032837001) derived from phytozome v7.0 (chr-ID chr1 3; pos 361253 to 361678)
ctctcttctccgccacctaccgcagagccatccaagtaaaactttctctttctctttctcttctccaaattatcattatttttcatacttgtttgcctatttccgacatactcagtaaacgatgtgaaaaggaaacttaaaaagatagagagttttgatcacattttagtcattataaaagtctgttttcaaattacaataaattgtttttgttttttgttttttcttttatttcatttcccattttctctttccttttcgcttcacttgctattcatcctttacttttcctattttcacttctatatttgcctccatgttattttatttcatcatgctagataaaggaaattgattttattttatttttctctttcctctttccatgaaggcaaggacgaaggtagcagaggcactgaacttggt

SEQ ID NO: 99469 - DNA, 647 bp, Vitis vinifera
  Intron number 2 from transcript GSVIVT01031547001 (locus G SVIVG01031547001) derived from phytozome v7.0 (chr-ID chr6 ; pos 17271708 to 17272354 reverse strand)
gccctagtaagaattttgaatgtaccttttcttttcttttctttttaatttatttattttttggtttttgttgtaaattccaaagcccctttttttcctgggaaaacagaggaaaagacctggaaaatcttgtttcctaatgtttttgtttctaaaaaggtgaaaaactcccaagtcatccatattcagctcagccgatgggagaaggattaattatttttccaagattttccctcgtgttattttcttccatgttcataccaaccaaacaggatccgaattttctttgacaatgccggagtagtaacccttttttccttttcttttttttctatcaatcttgaaaaccctaatcaacaaagccaagtatacccatttgcggcacgcctggatggagaaagtaatattaacccttttttccttttctttttttttctatcaatcttgaaaaaccctaatcaagaaagccaagtatacccatttggatggagaaagtaatattatcccagattttcactggtgttctttttcttccattttctaaccaaccaaacagcacctttaaatttttcttgagaaattcgcaatcatgttgatatacggttgctcaatactgctttctgcaattatgggatgttgaaatacag

SEQ ID NO: 99470 - DNA, 623 bp, Vitis vinifera
  Intron number 1 from transcript GSVIVT01033886001 (locus G SVIVG01033886001) derived from phytozome v7.0 (chr-ID chr8 ; pos 17021475 to 17022097 reverse strand)
atcacaatccctgggatcttccacgttagattctcctccttcctccatttccctcattcttcttcttcttcttcttcttcttccttttcttctccatgtctgtttgcttaaatgggtacttcatgaaatggatatctgtttaatttctaaagggtctggattaatcttgtcaataacggttgccatgtatgttttttgaatactttttgtttcatacaatattcagtcattactttttactttcttacgggttactatggtttcgttctcccattttgttacttaaaatcaaacaaaatttataacggacaatatctacacgattaaatgtaagtgattatagtttttaatttgaagataacatggaaggaagaaattttttgtttaaattaggaatgattctcacttgaaatggatgtaggtttctgaattttctgtctttaatttccttcatttgtccaaaaacaaacctagcatgaattaaacattagaaaaaggaggaaatctgcaatatgaatattgataagggtttagagaatactttgtcatggaaaatgacttataattacattttctttttcctgaatcacatgtgggtgcagagatttcgggagatttgtgtc

SEQ ID NO: 99471 - DNA, 992 bp, Vitis vinifera
  Intron number 4 from transcript GSVIVT01033605001 (locus G SVIVG01033605001) derived from phytozome v7.0 (chr-ID chr8 ; pos 19383109 to 19384100 reverse strand)
ggaacactgcaggtaccccaagctctcctgcccaagttttaggactacatgtttgttacagatgttttcaaacttgtcactttaaaattcagaacttaatttcttatcagtatgttcactatgttgcaggctaggcaattgcttagtgtaagaggagttcatcccattttgagcagtcctaatgtggtgagcattttgtcgcctttttttctgcatattttgtgctatgagactgtagggttattggatctagatttcaagaaactaagctaatttctaagtgactcagcctgcaaattgtttatctgatgttccctcgtggaccatacggtcactaaaggggacatggatgattgttttcaactcatgctttattagtaactagaaaagaaagctcaatatccaattatttgcattcaattgcatgaactaagtctgacattcagatccacatagggccatgtcctcgtgtgttttcttactgactcaaccgaaattcttttctactcacattgggctattttctccttgttttgctcaaaattttgttggctggagatatatttgaattttgatatcatgtgtaatcaatttttttctggaaatagggaatggcggttttggtcagttgcatgacactatattactgatgtacacataaatgtcttaaaagagataatcgccctcatgtaggattgcattacaagatcttcactgactgataaagaaattaatcttcattttttctcaactccaaatattcaagaaataattgtgctttatggtttagatcagacagactaattgacaccttgtgcatatgttatgaatgggtcaaatatgttttttttttttataacagagaaaccttccatggctaagcccttaggacttgtcatggggatccaaaccttggggtgttaaccatcccccaaaaacaagcaccgggaaaattcaagatagcattagtggtagaattcaaacccaagact

SEQ ID NO: 99472 - DNA, 603 bp, Vitis vinifera
  Intron number 1 from transcript GSVIVT01033129001 (locus G SVIVG01033129001) derived from phytozome v7.0 (chr-ID chr4 ; pos 8106069 to 8106671)
ttgtgggtgcagctgcagcaggtactctcgtttcataaaacttagaatacatttagaaaacaaatgtagagacatatatggaagtaaaaattacattatcttgaaatatgacttgaaaatacatagagaatccattatccatgaagttattttaagcatcctacatcactatattgaacttgattgcttagtgtatttatattcaatttttttttttaaaaaaaataataaccggagatcttataatttcttaccactttatgactagtaattactaaacatgtccataaaaattttgctatttaattataatgttattatggaattattgtaaatagtgttgtttttgatatattttgatttgttttttctctttaactttagctgatgggagttattgtttgataaatataattgtgaagacatcattaaccacgcgttttcaactaagcaacatttcttttcatgactaggaagatattcctttgttaaccacacaatggttcaaatacgcaaaatgtctccataaatttaatttcctccttggtttaaaagtcaactgtaattttgtggccattttagagaagcatgggaagttaccaa

SEQ ID NO: 99473 - DNA, 591 bp, Vitis vinifera
  Intron number 1 from transcript GSVIVT01035404001 (locus G SVIVG01035404001) derived from phytozome v7.0 (chr-ID chr4 ; pos 1045292 to 1045882)
ggcttctccggtaatgagcagctactgctttgatttgtgatttcttgtttttgtttggttggtgggaaagctgaggaaaagggagaaaatgaactaatttcactgcggatctgtggaattgtttttcagctcacccatttcttcttacatactgctcattcatatttactctgtttgcttgctgagaaagatgacgaaaaggaaagaaaataacccactaacgtttttaattttggatcagtagataattttgtactgagcttacccatttcattttacattttacgaattcatattcacttcagtctactgttcggtttctgagaaagctgaggcgaggaaaagaaaataaagtgatactttttccattgctgaccagttgaaaaattgtgatcaattggttttctgcccattcgtttgatttacatacccctaattgatatctacttcattgagctgttagtttcttgagaaaacttctattgtagattgcgccaaattgtttttcagctcactcatttctaattcaaattcacttcattttgggaatttgtagattggaacaagctactggtttagcctttaggttcg

SEQ ID NO: 99474 - DNA, 861 bp, Vitis vinifera
  Intron number 1 from transcript GSVIVT01030538001 (locus G SVIVG01030538001) derived from phytozome v7.0 (chr-ID chr1 2; pos 6576714 to 6577574 reverse strand)
ctcatcttgatcacattgtaagctctttttcatcactgtaaatggggtgattacaaaaaatttggaagcaatgcaactgacaataaaaagtgatacggtgctatttcataagaattatgccttcatttattctaattgctgtgttctacatgatggatttttttgcctgttgaatgtgatggaaaatggaatagtcattcaatttcctaggatatctgctcattccttttgacagtaacatcgttcctacttaatccatacaccatgcttgatggaaccaccttactgaactgtccatgaaattttaatccaaatcactttttctaaactcccaaaagtcccctaaaacatttgaacaagtaattaaactactatctccccgcatgtcttgctttccatcatgcatagagcatatgttcttttcaagattaaagaaaaaccatacccgaagaaaatgttgtaagatgtgtaagcccaatagttaggttttaattaaaaaggcatgagttgaaaccatgttctggcattaatacaagataatttcactttgaaattcagtttttattaggtctgatgtttcaaatttcttgtactaacatcaatttctggttgggtgggttacttgaaccactgtagcctactagagtggaatttaaggcacaaaacaaagttgtgataacctctttttatggattgaagcccaagactggttttgttgaaaactaatatgataagaagcatggtgtatgttattgtttatgttgtcctcctcttattttcttgaagctgtttcgtcaaagtttggatattaaagttataacgagcttttgccattatctactgatgcagggtgggctaccg

SEQ ID NO: 99475 - DNA, 683 bp, Vitis vinifera
  Intron number 2 from transcript GSVIVT01037117001 (locus G SVIVG01037117001) derived from phytozome v7.0 (chr-ID chr1 8; pos 28950411 to 28951093 reverse strand)
gggtataccaggtacctttcttcttactttctgcaattttcaactatgcaaacaattttttagattttttaaagtatttctaaattttatcaaaatacctgaatttttttcgaaaacacttttaatactaaaagcttatttggtagttattttaagaaacatttttaatattcctaataattgaaaatttttatcattcaaatgttagaagtgttataaacaatttctataatcactctcaaacacactttaaaagtactttcaaaaatcattatccgatgatctctaaaacttaaactaaattcaattgacatcccttaatttgagtaatccaatcaaaccccacgagttacgatctatgtttcaaaaagcgtttagtatgattcatagggaaatattctattttgaaaactcaaatatgaactattcttaatgtgattcttttttccaaactgctttataaaaaacacataaaatcaacttaatataatttcaaaaaataatcttatttttaaaacaaattctcaaaactgttttcaacctaaaatttgtgaaacatattttaaagttaaaaaacaatttttttttactctcaaaaaaataatatataaaagtgtttttgataaaagtttgcaaataggccctagaatctaaccatatttaatgtgataaaaccaaaggcc

SEQ ID NO: 99476 - DNA, 545 bp, Vitis vinifera
  Intron number 2 from transcript GSVIVT01033611001 (locus G SVIVG01033611001) derived from phytozome v7.0 (chr-ID chr8 ; pos 19318604 to 19319148 reverse strand)
tatttcactgacaccagcacagatttccacagacggtaactcctgtatctgcaagctcttttgttcctgcttggtagcagataggaacaggatcactgttctctgttttccaatacaataacaataaaagaaaaataacaattgaagtttgatatcattcttttgaatactaatttattccattcattgttcgaaaacattccggaattaaaatactatatttcacattgttaaaattctttagccattaatagcaatgcatgtttttggtttttgagaataaaaatgtttcccaaataattattttgatgttttctccgccaaccacccttggtttccttcttttgatggtatcaagttgcttgaagaagtgattatagggggaaatttaatggcttggtttaaatgacttcttcagggagtttagaattatacttctacttctgatcatctctaaaaatgattgctatttttcatctagtcatgggggatttgaagaaagaaaatgatttcttgtctatctcttcatcatttgcagacaattc

SEQ ID NO: 99477 - DNA, 894 bp, Vitis vinifera
  Intron number 2 from transcript GSVIVT01037139001 (locus G SVIVG01037139001) derived from phytozome v7.0 (chr-ID chr1 8; pos 28731972 to 28732865 reverse strand)
gtgattgatcctaagctcgccaacacacttgtaaggtggtttcttcttttctattgctcatagtttcatggggtctgctgtttgttcacattttcttgaattttgtgtgcttttttatttttaataatcattttctttgatggattgatgggtagttggtgttatttttattttagaggaattaatttttctaatttagacaattatgttgtgaaatgtttatcacatctttgaaaaagtatgccagaaccctttcattccacagtccagaaaaaaacccaaagagattgggtgatatgatcataatactttacattgaattggaacagttgggaaactaaatgcctctttgttgctatatgccaattttttccttgttggaaactcctttattatcggtactaacttgcagtgtttcttcgttttatatacaaaatctgagcttcttgtttttcatgagggtgtcttaccttcctatagtctccttaatagtatctcaaatttgatacacacatctttctattattaaaagaaaataatttaacgtattcaacagaacaaattgcatgttacattcatgtcattaatgtcataaaaaatgtaaaaaaaaaaaaaagttatggcatgttcttagtgggcatctgtgagtaaatttagcctgtaactcaaaagacaacaatctatgaattagtaaactagtgtatgggtatgtttctgctgttgtttttcttattctttcagaatttcctggaatttataattttttttttctttcgtaaaaaagttgtgacattttcttgatgggttgttaggctgttgctgcttttgaattaatttgaatgattttgtatcttcttaggcgattaaatcaaatagcacccctggaaaatttcc

SEQ ID NO: 99478 - DNA, 871 bp, Vitis vinifera
  Intron number 1 from transcript GSVIVT01033723001 (locus G SVIVG01033723001) derived from phytozome v7.0 (chr-ID chr8 ; pos 18341296 to 18342166 reverse strand)
gtacctccgatccgtacctggttgggtaattttatgagagcccgcaaatcctgtctataattttattttctgattttttttttcagatgattgtttgactgtttataggccttttaattggtggttttgattcgtgttggtctgtcatttatgcaagttttggatgtttatttacggatactttttttttcttcgtgtttaagaatccaaatatgttgcctttgatgaatgagaagatggaaaaggaaaagcagagtaatgagttctgtggttctgttgttttggttttcaaagaaagagaaaaattcaattcaacctggccagtgattctactagtctcagtggggtgtggagatttttgtttttgtcacttcctttggtgtaaaaaattatgggaatatgatagttgggattttaatttcttttaactttctcacattttcttgctaaccaaattgtcgaagagtctcagagttgacggggtttgcctttttttaattttcaacagttctttttatagatttattttggttgatattaaaggctacattgatctttattttttttcaaaatcctttatagttgaaccgttgtttactttggttcctctgttttgggagttcaagcattttgccgcttgtgacgggatccatgaattgatcaatgtttgatgttctgctttcttcccttttccccttgcttctcatttgttctgtttgtcttttcttctgaggatgggactaacagttatttcgtgattttcgtattcaaaatatggttcttatatggcattgattaaactgttttccattattgggttcttgctcttatggtaggctttattttacaaaagtgaaactgggctctcctc

SEQ ID NO: 99479 - DNA, 1037 bp, Vitis vinifera
  Intron number 1 from transcript GSVIVT01034780001 (locus G SVIVG01034780001) derived from phytozome v7.0 (chr-ID chr1 8; pos 21438181 to 21439217 reverse strand)
agtacgactgcgattttgagagccataaggtttgcagatgatgcccctgtttggttcccgatgaaactcttagaaaataagtacactaagttacgacccaatagagacaatggaaaccgcaatttcactgaacctgttgcaactgtttggcttagtttaaatttgacacgagttttgtgagatttatttatttatttatttttggtttcttttcctcgattctctcgggagccaaacggattattgcaagttgggtcgtcaaatgctttatccttcatttggttgcacctggtggactatggaaaaaaaaagtggaaatttaagcttttatttgatttccatgcccctgttcggttaccgagagaattcaaggaaaactaaaccaaagaaattcgcctgatgatctaagccgcatgaatgttttcatttagctggttgaggcggaaatgaaagggacatgagtattctgatattctattcctctttcttttcctcaaaatttttctgcgcctattgagccacaactatttgggacatcgacctcatatttggttgcacagagaaagactacagaagaagaattacattttgagtcttattttttcaaagaaaatgaaaacacagaatacttacgtttggcttgcttgaacataagttttctgtttaatctctgccctggaaaatttaaattttaagacacagaatccctacatttatgtacatattgtttttgatagtttgtgatttcctcactgtggattgatcttgaagacagttatagctcttcattatgctaaagttgttgaatttctgagttttactaatattttggtattgaaacataggcttcatttatataacgaacaaaatttgctttgcaagaccagcatgtaattttctgtaaacctatcaaactagtcccatttacttttcagttgatgtttaacattgattgatgaagttgaaaagaactgggaaatttgtaagttctaaatcaatgtgtttgtggaaggcatcatcctcagtggcgaacattg

SEQ ID NO: 99480 - DNA, 506 bp, Vitis vinifera
  Intron number 1 from transcript GSVIVT01033179001 (locus G SVIVG01033179001) derived from phytozome v7.0 (chr-ID chr4 ; pos 9025439 to 9025944 reverse strand)
ctccgatccaaccgtatcatctctctcatttccaggtatgcttttccctctctttattcccgttctgcaaattaatttctcaatctgcttcgtattaggtttggatgatttggttgctctgagattttccgtaaatctatgccctctgtttgatcgctgagaaagcgtgccaaacgaaattctattttcatttcggattttgggttttttgttttttggtacctggggaggaccaaaaacgtcattggagttgagtttacttgaatgaatgtttggcctagtcgaggcgtgttcttcatttctgagaaaccaaaacgaaatagagaacgagtaagattcaaaattttgaatttccttttctttttcttcgcgacgaagcggaggcttatgctgaattaggttttttatttagttccttttatttttagttttatttcttattttttatcgtatctgacaatgtttttgggttggattttgtgggcatgtttaagagggaggatctg

SEQ ID NO: 99481 - DNA, 376 bp, Vitis vinifera
  Intron number 1 from transcript GSVIVT01034237001 (locus G SVIVG01034237001) derived from phytozome v7.0 (chr-ID chr9 ; pos 13242694 to 13243069)
ccgacaccctcccactccgaagcagcggcacttaggtttgtgaagctctccttctttgctttctttttgggtgttgagaaaatgtgggaaaatgatggaagacttgaatcccaaaatgatagaagacttgaatcttaatgcaggtgtttggtcttggatcgagggttttttttattattttttatttatttacaaaccccaagacaagattaaaatgatttttttttttttcccttttggttcctctgttttcttagcaaccaaacagagcaaaggtttccaatgatgtacaaattgaagtatacacgccgtcacttttgatttgaagtttttttcattctttcatctggataggtagagaaggaggttggccata

SEQ ID NO: 99482 - DNA, 693 bp, Vitis vinifera
  Intron number 2 from transcript GSVIVT01032527001 (locus G SVIVG01032527001) derived from phytozome v7.0 (chr-ID chr1 4; pos 28105964 to 28106656)
aaacagctattcctacagtgaccaaggctttagaggtaaaccagggcattctcctcaaaattttctttatgtggctgtattgatgtgtgtgcttttattcccatcacattgttcccttcattgccttatgaagatgatcttaccagtaatgcataagataagcctttagaaagaatggaaaggtgtacactttcttattatttaaaattttattctgtagtcatctaactttaaacaaaaagaaatgagaaaaagaagattggcaggagggggaatgagtgagttgaacttagagtgctctgccaggattcaagtttggatcaattggatgtatcaaggatctgagtttgaagtgaagttttgctggtcctatgcagcatctaaatcaaacctttattggacaaagctaggtgctaagttcaaacagattttaatcagattctgacatgtatgattgatttgggtttaaaaagacaaatattagtggttataaaagttgaaagtatagcatgattggatttttatccaaatggacccaaggattggtggctctatgggagtagtaatcactcaaatattgtctgccatattgactaaaagtttgatactgtttatttgtcaacttttgcaattaccaatcattcttatcatattgtaggaaacagaaggcattaccactttgaaggttcaggt

SEQ ID NO: 99483 - DNA, 634 bp, Vitis vinifera
  Intron number 1 from transcript GSVIVT01031845001 (locus G SVIVG01031845001) derived from phytozome v7.0 (chr-ID chr3 ; pos 4827421 to 4828054)
tttgtgtattttcgcaatttcttattttctttctcgtaagtcgtctcattcaattcgttttctttggatgattgacgatgcttttgtatttattttgatttatttctcgcttttgagatgattttcggtcatgtgatgctgtagaattgactttttttttttaccgggattagggtttattttttacgactattgatttgttaacataggcatgtatttctttcttgctatttgcatcctggaattgtaaatgagtcgagtagagttttctgcggttgtgagagaaaatttggtcatgtcaaattttggtttctattattgggaaattttaggaatggagtgcttttggaagtcctttttattgacaagatttaaggtgcaaagctttggtttcttttcttttctatatttttcatctagcatacggtggtaaaaaacgtttgagtgaggaaaatttgctgaatttatcaacctgggtacttttattgggactgttttagttgttttggaggtttctccatcttgagaatgagactctgagttaccttttttacattccttcaattcttccagttcttttcatgtctgatgagtttcaattattttaatgttcattgcagatacaagtaaatca

SEQ ID NO: 99484 - DNA, 364 bp, Vitis vinifera
  Intron number 1 from transcript GSVIVT01031488001 (locus G SVIVG01031488001) derived from phytozome v7.0 (chr-ID chr6 ; pos 17993794 to 17994157 reverse strand)
cgaggtaagttgagtggccttggtattgtaggcaacttcaaatcgtgaagttgattaatgaatcaacttctgattcatgttctttgattaatgaatcagtagtataggtacatgaaaacaaagttttatgtagtattaatgcaatgttgtgattgaataggcatttgacttgtgtggctaattctgggtttttagtttctctatttgaatttggaaatgctgtgttgttgtatatatatatatatatatatatatatttcccactcttgatggatttgttttgattgaatagttgggagtgtaatgtttctatatattttagtgtcatgagtagatgttgcagtttcttctcttggtttatagg

SEQ ID NO: 99485 - DNA, 587 bp, Vitis vinifera
  Intron number 2 from transcript GSVIVT01035504001 (locus G SVIVG01035504001) derived from phytozome v7.0 (chr-ID chr4 ; pos 1855812 to 1856398)
acagaagcttcaggtaccttgtttcttcccttttactcaaaacttttttttttttttccttaaattcgaataaatactattatgaagtataaattaaaacaaaaacaaaaattaaaaagttgagcctgacccattgctgccgtgcaagttgcaacacctactgtcaagtactcataacaataaagctgtcgtaacatccccgaagttttgagaaagacagcagttaaaggctgcaattctggggaaagggtcagagatggaacatttgagtaaatgatatggcacgtgaagaggtttgacctctacttctctgcaactgcacacattaatgggggtggggcactcccagtggtactccatagctgttcttcaatcaatatccaaccacccagggccaccactcataaagatccaatcgagcctccctgaaaatgggctgcccatactgtcaacaaataaatatctgtcctatccttctggttattcttctaattatccttctaattcaaaaactaaggtattgtattatacatcaaatcttgctgtctacaggtgtgtttaccaggaagaagactcagagaggttca

SEQ ID NO: 99486 - DNA, 901 bp, Vitis vinifera
  Intron number 1 from transcript GSVIVT01031718001 (locus G SVIVG01031718001) derived from phytozome v7.0 (chr-ID chr3 ; pos 3786200 to 3787100)
ctttgcttcctcaacttcctccaaaggtaattacaccttcttcaaggttgaggttttgataaatatggtgttttctctctctctctctcaaattactctttatgatagttctaagttgtctcaggttttcaatttgtttccttcatgggcagttggtgagaaaggtgtggtctttttcatttcttttcttctgagtttttttcttttttcttttttttttcctcctcttccttctcttgcatatcaggagaatcttctaatcctacccacaggatatccatacctggttctcaatcaaaattaagaattcatcctagatatagcttttctttctacaaaggtcccaaactatacatacaaagggcagccctatttttccttttccttttggggcttttattgaattactggtgtaagaatgaactaaaataccaaaactttcagtagggtttcatgggtatgacctctatggaggcaccttctccacccatatccctatttctccttttcaatccataatcctcagctgcttccccttgtttctcagtttgaaagtactgaaaattggtggtttgtttcctcaaaagttcttcaacttggatttcaaatggtggctcaaataggtaccttactgtcacatccctgagacatcaagtgggcagatttcatccccatttaaatttgaaacttcaataagatttttataatcccagtggatttccatttttgggtcagtgcaagatctcagaatatcaagaggtaaataagattcacatcgcaccacatcagctctttaccaggacagttcatatgatacttggtatctaaaacaggtagaattttattttcctaattatcctctcattgaattttgtacaggcagacaagtccaccattgttg

SEQ ID NO: 99487 - DNA, 770 bp, Vitis vinifera
  Intron number 1 from transcript GSVIVT01031125001 (locus G SVIVG01031125001) derived from phytozome v7.0 (chr-ID chr1 4; pos 1920647 to 1921416)
attttgcaactgtttgttttgggtaaggaaaattttgagctcttgttaatgggtgtgtttggttgctgagaaaaatggaatgtttaagagttttcattgtttggaggtgaagaaaaatgaacttctttactcttacctaatttgaaattttcttatattttttgcttacttttcatggtgaagagatagatgcatagtttagggatttgatttgttgttgcgttttatgaatcgggtgtctttgtttgtccagaacctatcctttttttttctttctagtttgttttggtttctgttgctcccttcgatatctgacaaaatctggggaaaaggaagttaaaattcaaatgggatcaggaagtttttgaatgggtttttgtttgggattcaagaaaacggaatattcgttgtgttgagcttaacatacaagctgaccagctgacatgagctctctcctagtatttttcccttgcttttcctggctaccaaacagagagttgtgaacttttattttacttcaagaaagaatacggatgcttctcatttaatttgctttcatgtgctctatttcctcgctaacaaaatattggaaaacaaagtacaagaagattttgaatagctttctcattagagaaaatctaatagagttactttgcttgattggggtttcaaattttgagcttttgatttgcagataatccttgaaaccttgtctaataaatttacattctgcagaatttctttttggaacagcattagctgctgaaaat

SEQ ID NO: 99488 - DNA, 737 bp, Vitis vinifera
  Intron number 2 from transcript GSVIVT01031355001 (locus G SVIVG01031355001) derived from phytozome v7.0 (chr-ID chr1 4; pos 97505 to 98241 reverse strand)
acccagtgcgaagtgccttttctcttctcaacaaggtatcatatgttaaaacctccaaattctctctgcactctatttactgtttgctcggtgtacttcaaactccaaaacattgcagcatctttatcagtttctggctattatgtaccgagtcctttggttctacaaaattgtcttctaatggtataaaatgggttgcattagattgtcagtcatcccaaacccagccttttacaccataattcagccgatgacctctaataattggagattaacccagatcaaattcacttcacttagcataatattggcaaccccgggtgggaaaaatcaagttttgaatcatgctgcttggtttgattaggctaggtctgcatttttagattccttcatatggcaaattgataataaaacaaacaaaaagttgatcctttcatgtgaaactttaaaagcaccaactcagagtactgcaaattttgaattttttaccacttgaagaataactttaaaatcagcaacagaaacatactaaaaagtatctgaatagtctttttttggagggcttaaataaaggatgttgacattttttcgttgagaaaaggaccactttcttttctaggaatttgctgaaatctagaaattgttagtatagattgatgactaaacttagtctaacagaaacaaagcaacattttttggcaggtattagaagagtatcagaagaattttggggattc

SEQ ID NO: 99489 - DNA, 647 bp, Vitis vinifera
  Intron number 1 from transcript GSVIVT01033327001 (locus G SVIVG01033327001) derived from phytozome v7.0 (chr-ID chr8 ; pos 21462128 to 21462774 reverse strand)
gcgcacgttatcgaggtggtttattctcccaaaagcactatgttgattatactgattttatgaatgattttccttttttgaatgttgcagttttgtgtgcgatattttagtcgactgagtgtggtgttgttctttctatcccttgaatttgcctttgggtttagttgtttaaaaaacacaagggccttgggaatttattgtttttagtttaaccagattattatgtcgtcatggaattttcttttcctctttctaccttgggcagcgctgcgtcatcttccagccaaatttatataaatatcttatttttctgtagtgtccaacttgtgtttatgtatcattcgttaggtttcccggaaaataaaagaatttgttttagtcactcttattcctgttattgtcgtttttaacaaaatagaagggggagggaaagataagcgacctgaatttagccagatagttcacgagatgagtggaatggagggttttttttttttttttggttatataattggctacctatgattcaaatatcttgaacatacatatattccccttatttagattcgatttataaattatagcatagttctaaatggaggtttattgcagggcaccacggaatttgttgaagctgttaaattcag

SEQ ID NO: 99490 - DNA, 869 bp, Vitis vinifera
  Intron number 1 from transcript GSVIVT01031900001 (locus G SVIVG01031900001) derived from phytozome v7.0 (chr-ID chr3 ; pos 5260762 to 5261630 reverse strand)
tatcaagtgttgtcaatagtaatggacagaagaaaatgttgatctcaggatcttgtactaagagatcttgatcctataaggagaaatgagacaaaaagattccttatttgaatgccttttgttgagaagaaaccagcgattgggtaaagtcttgtttgggataacttcttatcttttgctctagttggaagctaaagttgaaggaagagacgtaatttttaaagaactatattgatattgtaaaagttttattaaacatgaaagaacttcttatgtagtcaaaataatggatcaataagtaccattgcaaatataatttataaccctagaacttggattaagcctatttcaaacctaccattctgcatatactgtgaatactataataaagaattaactaacctttttgaatgttctcatggcctaaaattttgctgctctaaccatgtaaatggattgggacaagaaaaattttgtttatgaggtgaattcttaactcattcaaagagggtggtgggcttgagacctctggtagttggtccaagaaagaaatttgttctaatttggattcttctgcatggtagtttattttattgggactgtacatttggcaaatgtccaaatgaattggatgtggcactcaatgaatacataaatgttgaagcaatccaaaaccatgttccattactaaaactgcccctagttttgggacaggtgtgactttccacatggataatgtcaatcttcaggaaaaatagaccccaagaactggctccccaatgccatcaagggttaatttcatcttcctatatatgttaaatctccacccaagagagaacccatctttcaaaatcatcagcttttcccat

SEQ ID NO: 99491 - DNA, 300 bp, Vitis vinifera
  Intron number 1 from transcript GSVIVT01035576001 (locus G SVIVG01035576001) derived from phytozome v7.0 (chr-ID chr4 ; pos 2461284 to 2461583 reverse strand)
actcatcttaagagtattaaggttgccctaggcgggtatgatcttttctttccttttgattgctaccaatttatctaaaccagctgtatccatgaggcaataaaagtattttggagatcaagtggaacaagtttatatgtattactccaatgttgagctattagatactgggtgttaagctatcattacatcttatatggttctatgtgatctgtttctaattgtgtttctgcattttcttatcttgttctgccttgttcctcagagcagaaaatcttattcttgcatcagatcctgatc

SEQ ID NO: 99492 - DNA, 665 bp, Vitis vinifera
  Intron number 2 from transcript GSVIVT01036747001 (locus G SVIVG01036747001) derived from phytozome v7.0 (chr-ID chr1 9; pos 23054467 to 23055131 reverse strand)
atattcggtttccttctccaaattcacaaaaagtaatttcattatccgcctttttttttttcttggttttttcttctatttgtttgtggagttcatccatgggttcttcatatctgtgaattatggtgattgttgtacgggagagctctaatcatttgtaggttcagctctgttttgtctttgattcaatctgaaaccttctgtttggctgctgagaaaattttggaaaagaaagaatatggtcgaatcttgtcttgcatgcagttttgttttgtggaatgaataaaagcatgacgccgattgagccaattagttatattaaggttaattaggtaaacgaagaatatcagattcaatatttctcagcaatcaaaggttggtgaaaattaggatccaaatgattcgatatcaccactcactttttccttatgggagaatatttttcaggatataacctggataaagaatttttttgggttttttttaatggaatagtttttttcttccttttttgttttctttttaaatcttctggtgcacgtgagcttggtgatgttaaatcatgtgtgttcaaatctattttattatttcttgtggtttccgtgaattcactttgatgtcttttgacagcacaaattgggtagaggtcaccgggacaaagtcca

SEQ ID NO: 99493 - DNA, 880 bp, Vitis vinifera
  Intron number 2 from transcript GSVIVT01031267001 (locus G SVIVG01031267001) derived from phytozome v7.0 (chr-ID chr1 4; pos 682325 to 683204)
tgaggaacttcctccttcataccttgcaattgcaggtgattcacatgctcttctgttttaaggttttgtatctgttgtagtaattgtgaaattccattattatttatgaagtttcatcaaatgatgttgttttaatgtcgaattatgcttttgccattcaattcggagagatgatgattttggtgattggctcaaatttcgcatcaagcttgtgaattcaaatgccatgggaattataatttagtagtttcattatgaggtggtttctaaatgcccatgttagaaaatctctgttgctagttttggtcccccattgaccattaaattgagacgaaaggggggtggagtgttgctttaggaaaaactctcattatatcatatcatcatgttccacatcagataggagaagaagtttctagaactttgtgtggtggagacatgtttttaagccatgaggacttactgggccaaagtggacaatatccacacaagatgaagcaggtcatcatgtataaatacatccaggggaatcatgcacatttagtctcccttttcaccaccaaagaaattgcagttgctttcatacataatattaacagggggattatctatagttggaagttgtaaattggtatggatttgtttgtgatgttattgagaaaagtatattgcttcttcctcgagtaatgcaattaacattttccataaaatttgaaggtgtctattcattctatgtttacattattttagccaatcattagcattgggtgtaatgcatgtaaagtgtggccgtttattgtatgatggttctgtaggcactgaatattttctcttttgctccttagagttgggagaaaacagtggactgctacagcccagg

SEQ ID NO: 99494 - DNA, 738 bp, Vitis vinifera
  Intron number 2 from transcript GSVIVT01035812001 (locus G SVIVG01035812001) derived from phytozome v7.0 (chr-ID chr4 ; pos 4561527 to 4562264)
gatcactggcttggtttgcatcacacctgcagctggtattccactgacctaggccttaatcttttgttgcaaatatgttccatgataaacttcatttacctagacccgtgaccatgtttggatgacatgaaaatgaagacatttttgtaaaaacttactctcaatgtgtagatattgtctgttttgggtccaatatgtctacatgttaagaggagtccatatatacatagtgttagaaattttttatctctattcgatgtgagatatcacaatcaatcctatgcagtcacaatatctttgttatatttcataggattgtgggataaaaaagacgaacatccaactcaagctaaacaaactcttatatggattgaagatcggttctgatactatttataataacccgctcccaattgtgtagatattgtccgtatgaccttaaaatgtattaacaagatcaaaaagaacttacacatatatagcaacataaaacattagactagggaaaaattttcttatgttatatgtgtatgcgctcctcctagtcttgttggcacattataaagtcacgtgagcttattggactcaaaggcagagaatatctacatgggagagagagttagtcattacaattttacattttataggaaatttagctccatatgttgtgcttaaaatgtgaaaattaaagcatacttacaagaagttatttatctttgatttaggggttgtacaagg

SEQ ID NO: 99495 - DNA, 997 bp, Vitis vinifera
  Intron number 2 from transcript GSVIVT01034319001 (locus G SVIVG01034319001) derived from phytozome v7.0 (chr-ID chr9 ; pos 14814872 to 14815868 reverse strand)
tgcagaagaattttcaaaaactgatattgttgaaggtatgtgcattagtcctttgcttcacttgatttgatatgcactttgattctatagtttcttgatctattccttgtgtcttcttgaaaatttattcactttccaagttaggttcaaatatctattttattctcattagtcatttttctaagtaaagatattgacattagttattttgtatattttaaccatttttttttttaggattttaatctttttttcttcttatgcaaatagatgtattatttgatctctcttggaaagagcttttctgtctcgaagagtaagacgtgtttgatcatgtatgttcattaatcaaaggtttctctagtctcactatcttgtaaattaaatcttggggagagtcctaggcccaatctgagcgttcttccaaaggtggattctccatctcaagttacttacgatttgttgataatgtactgatccttgattgggtagcctcacattggattgcttttaaaacctatacttttttgcttcttaatattgtcctcattctggggtctaatattggtttcaacaactccaaggttgcttgaactgcatgcttgaatcagatgcattactcttacaagttttctaaagagcgaaagaaaaacctattgtctaataatgagaccctgatatttggcattctgaaaagcttaatcaccggtttttggctgctacataacttatggtatgcagttactgataatgttattgattttatttatacaattcatccaactattgaaaccttagttgttgacttgaggaaaatgtctcttagttgcaaaattacattgaaagtggtatcatgcgtcctttcaactgttcttgtaacaaaacttagtagatatttattcattatgttccatgttgctattaaccaattgatgcatatggtgtcatgtatccaaatagaaatcttaattgatggttttggctgccaggaaacata

SEQ ID NO: 99496 - DNA, 846 bp, Vitis vinifera
  Intron number 1 from transcript GSVIVT01031807001 (locus G SVIVG01031807001) derived from phytozome v7.0 (chr-ID chr3 ; pos 4587992 to 4588837 reverse strand)
ttggaacccattctccttttctttccaaattcgaggtatgttttttgttttttgatctaaatctgatttataaatgcctgtaaatttttctttcgaatatcttggttatctccaatttggaacttttgttgattttgaagttttattttctttttatttttctcgcctgcttttgttatatgaagccttgtttggttgctgagaaatgagaagaaaaccaaagatttgtgggtcttatttggggattttattgatttgaagagtatatcttctttatgtgtgttcattgtgtttatgtatttttctgtttggttgctcagaaagggtagcaaaagtagagaattaaactcttgaaccttttatttttgtcttgttgggttcggggtaaatgaaaaccgcggctagatgaatctaattataaccatattaggcttagtttaggtgagttctgacattctgaattttcaattgcctgggaggtaggttggattttttttcttttttttttccttggtagaattcattgcatattgtgctatatggcatttgtaaggtattatggtttatgttcttccaaagagtgttaatacatccatcttctggtcaaatcaatggggcatggtgctttggtccttcaataaccattctgtagttcaatgattctcttcataagtatggtcttttgtttggatagaaatatgttgcattactgttgaaacatttataatgtttgtcatgtgttagtgaggaacaaaataatctattttcaacttttcattttaatttctttctatactgaagtatctcttttagttgacaagattctctgttgtaccagggattgtc

SEQ ID NO: 99497 - DNA, 964 bp, Vitis vinifera
  Intron number 1 from transcript GSVIVT01030630001 (locus G SVIVG01030630001) derived from phytozome v7.0 (chr-ID chr1 2; pos 7303475 to 7304438)
agccaggatttcatcaggtgaaatcttgggttcctccattttcagtttgattaatttcttctatatacaacctgaattgtgaattgattgatgtgtttttaatgattaaatattaggaataatcagaacagacaatgattttattgaaagcaatcttaaagttagtgcattaagaatcaattgaaaatggtagtatacttttagtgaattcatattcagacgtatttccttccgcgaaccgagggtactgtttgaatcgtagtaatgttttttttagaattttcagtcggcatggttggcattgttattagaaagccactttaatacctgcaagttccattaaatttgttcagtggaattgaaattgatgagctacttctaaaaggctctatcattagaatttaataaagttaggattattatagttgtctaagatagttgagaaacccgaaatatgcttttcttcatgtgacgatatcacaagtgtattgcaccctggtggcgtttgaatatcaaatactgttgctatatgttgcttgtgttatgtctagacttttgcatcactcaagagatatgctgccttgcatgtctgtattgacaaggaagcactgagctcaggagctagtgacttttgtgaatgagtcaattgggtgtttctttgtctctttcctcttttgcctcctgcctgaacttgatgctatgatatctctggcttcttaaattgatcatcactgatcagcttatacaagcaagcagcaagtagaatggaaaattcttttggattggttcttcaagtaacattttttattagctgaatggcttgttttggattttgattggttgaatagcccgatcaaatgttctaatcatgatatgtattacatgtcaattttgtccagttaatggatgttatttctgtttctctttttgttaccaggttgatattcgcggaaatttgtttggg

SEQ ID NO: 99498 - DNA, 787 bp, Vitis vinifera
  Intron number 1 from transcript GSVIVT01037973001 (locus G SVIVG01037973001) derived from phytozome v7.0 (chr-ID chr1 0; pos 11917364 to 11918150 reverse strand)
aacatcttcaggaagaaaacctcacctaaaggtgaatgcttttctatgctctagggttttttcttttccactcatcaacattcatttctacaatttttctgatattttttcttcaattctcacacctgttttctctaccaaaacaaacggagctactgttgtttcactagggttttacttacagggtgagtttgtgtcttcaggagtttctaggttgctacttttcttctttttttccttttttttgagatttcgtggctctttatttttaaaattaaatttatttgttctcttttgttttttctcgggaaatttttatgctttccttagaaacgaagaaatgaaaatgggcgttttttggaacataggaatttccttctggattcttcgttgtttcacttacctgtgaattgtgattttgcctctcagcccgaaacgttttgttttgttttctttttctgacccgaatttgggtccagtttggagaaaggttttcttttcatgtcattttgtttttccatctcttgcctgtttgctgggaaaatttggggagatgaaggaaattgaaagtgtgagttagttcctctgttatttcgggcctgagaaaaagatacttcactcaattggacttatttacaaccatttgattctttgaagttaatgctgaattttttttctcgctatctgggcaatgaaaatgagagcatgattttttttttttcctttttgggcatctttggaaatttgatttgggctgaaaaataaatgatcgtgtttaccttaacag

SEQ ID NO: 99499 - DNA, 716 bp, Vitis vinifera
  Intron number 1 from transcript GSVIVT01034127001 (locus G SVIVG01034127001) derived from phytozome v7.0 (chr-ID chr8 ; pos 14989731 to 14990446 reverse strand)
agtggtggagaactctgcaccttcccaggtttcaggtacccgctctattcggatcctttttctcttgtttgctttttcacaaattatatcatctgtattctcaattgttgccttgcggcatctccctgattttgggtctttgatggcgaaccctagtttttagagtatgttttcgtgctgaattagaaccaatgttattgctatggttagggttaaaagtttttgtgtgcgaaatcagaaactgggtttaggggcatcagaacgcggttctcagaaatcagcattgatgtgatcattttctgggacaaaagggctgggcattctactggtaggggtctagactaagaataagagaccaaggacagaagctatggaaattttacacttcacacgctcaccaaacaaacaaatggcaattttgcttccatgatgcgtgtagggttgaatatgctaatcacaaggtttcatgcttagtaaattcaaactgttttttttttttttttttccttttccatatttctttgggttcttgtggtgccttatgttgatttttattgaattcagatcaaatttctagatcatagagagctttatctacatttatgtttttgaagataggctagtttggcttctagttcatgtgatttgaacatatgagtatcttctctcttaaatgtgaaggtgcaaatcttggacacacttcacccccggcttgt

SEQ ID NO: 99500 - DNA, 997 bp, Vitis vinifera
  Intron number 1 from transcript GSVIVT01031732001 (locus G SVIVG01031732001) derived from phytozome v7.0 (chr-ID chr3 ; pos 3890523 to 3891519 reverse strand)
actgcgccacctacagcccaaatttattaaaaaaggtgaacgggtctctctctacactctccaccagagtgttctttttttttctttttcccttttcttttttctttttagggtttagggtatttggttttggtttttaattaatgggttgaatgagttttttcgttttttgaaaggttttattgatttttttttttcatcgacatgggggaattttcaattttcagttggggtgattttttctttctttctatttttgttcttcgttgatgggtttatgtttttggaattatgggtttagtatggctgaggattatgggtagggatctatgttaatttttgattgatctttcatgtgcaattggatcagaagttggagagtaaaggcaaacagaatagtgttcgtcgcaaagatgtgagattgaaagacatgatttgtttgtcatttttgtgtttggtgggtggttggatctaaagttgaagacaagaaagcaaagatgtttgggttttcgattgatctgtgtaattcaatgcatgcataggacaattttgcttgcttttgtcagtgtttttgtcctattcttgaatatgggttctagagtgatgttttactcttcatgttttcattctttcaggctggatttgggattgttttgactgcttgacttctcaattgtgtgtttgttttctaaatatagtagtgatgattatacatgatgttctatgtttatggcttttggttttgagtttgagtttgttaagttataggggttttctagttttgaatattttggtggtggttgggtttagttttgggataatgatgaaccaagtaccttaatttcgatgggtccttagagcttattcatagatagctttgaatgttctgtctcatcttgcatatctttcattgatttgatgaattttgggtctacatttgaagaaagagagcaaaaagaaattggggttttcttgcagatctgcttcaattggttgg

SEQ ID NO: 99501 - DNA, 716 bp, Vitis vinifera
  Intron number 1 from transcript GSVIVT01037637001 (locus G SVIVG01037637001) derived from phytozome v7.0 (chr-ID chr1 9; pos 6436521 to 6437236)
aatcctccacacggcttgtctcgggaaggactacggtgctttttcagatccaatctcgtcttttttctgtctcttaatttgttgagttttctgaaaccttttctgggttttgattctcgcccgaaaatgtgtatgggttttgattttcttgagaaattagggtggttctggttgggtttgatgggatcgggtagggatgtgatctgggtttggttgttggagtattagtattttttgttttgatgattgtcgagaatgtttataaaggagaggagaatttgggatctgaaaattcctagctttctcttattttccaattctcagcaaccaaacaaagtgtaattctctggttggttgcggagaaaaaggtgagaaaacttctaaaggaattgaatttttaaatcttaaaattttcgctctctggcttcccattcaagtaactgtaatacaattgctttggtttagtggggatgaggttttcgtattatggaacaaaaaaataaaaacagaaagccttttctttttctataccttttttttcccagagtctccaacctgatgaccaatgtatttaagcttcaaattcaacctccctctttagaaaattagtgtagaatgttggggaagattcattgaactgatttctcttgcgtgttaagagagatttattgaattggtttgagttttgtctaggaataattttgaagaaagcaagg

SEQ ID NO: 99502 - DNA, 675 bp, Vitis vinifera
  Intron number 2 from transcript GSVIVT01030624001 (locus G SVIVG01030624001) derived from phytozome v7.0 (chr-ID chr1 2; pos 7257014 to 7257688 reverse strand)
gagaattcggaaagggtatgttgtgattatatatgaagatgtaatttacttggaaaaaatgtggattttgactgttttgattgaaactcatatgtattttttgcaagaactgtgttgaattacttgggttgtcagtttgcaaacaatggattgcactattcgatgtttgatgtgtttctgcaaatatttccctatagagaagtccccatatagcccagatggtaccaggagggcaaccaaaaagaccttagtcttgagttcgaatcctggggaggccactctgggtcgctttggcaccagagccaaaaatctcgggcgccgcattggctcttcagcctaggcaccgagatacaaatgtacaacacccatcatcaatttgatagataaaaatgaattttattggacacaagacagattttgtgtaaggatttggagaacaatatagggacttgacttaaccaattgtatttaatatgtgaagagaatgttgtggcaactacacattcagaagaattaggaacaatgccaccagcaatggatgttcatttgtctggtgctaatgatggtgaagctagcttagcattagctgacttgtacattgttttaattgttctctttattgatttatctgcattctgggatgagccattatgaatggggtgaactcaggtgtct

SEQ ID NO: 99503 - DNA, 966 bp, Vitis vinifera
  Intron number 1 from transcript GSVIVT01030511001 (locus G SVIVG01030511001) derived from phytozome v7.0 (chr-ID chr1 2; pos 6350564 to 6351529 reverse strand)
ataatcagcttttccctaatcgtcttctcgataaggtcggtgagtttttgttgatttggcaacggattctgtttggttgctgagaaaactgataaaaagaatagaaaattattgaaaatgaaagtaggaaaaatactatgttctgtgttattccataagttacttctgttgtttattgctggttatttgttcatattgaaatcttgagtttaatttcgattttggcttcagttttgtttttagagaaatggaaactatcaccttagttgagtcaaatagttgaattggcctcagttttgttgcagttgttattaaagaaaaaagtaagattttaatttcttttgtttgccttggttgtcaggaatcgaacagagcattctgattcaataaaaattcacatctaaaatcagattttgtgatttatataccataagaattggtggtttttgtagcatgcatttgagcttgatggatgaaaatgtcatggacttgggctggatttaatctatttaattgactcaactaacaccttcgattatttaatgcaagcgtccattgctacttaatttggggcttcatttcaattcattatattctagcataagtttggaaaaaagaaggggggattcttttcataatttggccagctgatttgttggtcaactgactctaaattcaactcttaaacctcaaattcagtagcttccttgcatgcgtttcaatcattctgcttatttattttctttttggttcaacattgcttgtagaaggctgcaagtactagttatatttttacttctgtttgtagcatgggaaattattaagctatttgtaaatttgataatattatctaaacatgatttatatctcgaggtgttttacttgaaaatgcagcttattgttatacggtttctctgtaccacatttgtagctattgaagaaaacttctgctcagcaaatatcaaa

SEQ ID NO: 99504 - DNA, 654 bp, Vitis vinifera
  Intron number 1 from transcript GSVIVT01037632001 (locus G SVIVG01037632001) derived from phytozome v7.0 (chr-ID chr1 9; pos 6405690 to 6406343 reverse strand)
aaggtgggctacggtttctaatatgtaatgttccgtttggctccccataaaatagaacctaatggaaagaaaaggaattaaacggttgttgggctgggtttgagttacaaacaacagagacaaaaggttgatcttttgtcttctgttttttgtttttggttttatgtgccaattgtttccccggaaacatctctatatgattgcttggaatgaatatcgaagttgaaagacacgactttattgcttggaatggatattgaagttgaaagacacgactttttaacgagtatttttaattttttcttggctttgttgtgtgatcagaagtaggctatgaaaaaattgtgtagggggggaaaggtttcttcataccccgtttgctgctaagaaagctaacgaaaagaaaataaaaaaaaattaaattctgaattatatatatattttctgggttccacaattcagttaagccaaatggtggtattagactcgtatagcaataatttggcatgtttagcccagagtatggatatgtctttagtcccgtgtctgtcttgttatttttgatgaataaattatatgaaaaaaatgtgagttttataatttgaaatcaatggacacgtaaaattcattttgttatttgtttaattgcagttg

SEQ ID NO: 99505 - DNA, 671 bp, Vitis vinifera
  Intron number 1 from transcript GSVIVT01035000001 (locus G SVIVG01035000001) derived from phytozome v7.0 (chr-ID chr5 ; pos 803403 to 804073)
ggtagcaggacagtcacggcacgatctaatcacaggtgagttgaagcagatcaagtattttctctaattcgtggtttctagggtttggtgtatgagtatttgtttgttttgattcttcacgaactgctagggtttcggatctgtatgaatatgtgaattaagttttaaattgaatttgactgcacatctgtatttgtgtgaattattggatattggaactgtgaattgtgtggtgaagagtttgtgaaatttgtggatctggaggcgttgcgttgctttgatttctacaattggtcgatgttttgattaagattttttatttctgatttatattagcgaaatattaggttccttagaaattgccataactagacgatattgagaaattcttttgtattcagtagcaatttatcctagtttcttccatatttcattttctcttttagagttttcttttggttattctgtggtgaaatgaagtatatgagcaattggatagttattgaagtaatagaattggatgtccacactgctgatgctgtctgtaattcattggcaagattttctgtgctgaaattgagaaggaaactacagcatgtttgctttcagttatttattttggtagcctatttgcaggtttcaggtggttgactgaggagttttcagctatt

SEQ ID NO: 99506 - DNA, 541 bp, Vitis vinifera
  Intron number 5 from transcript GSVIVT01035000001 (locus G SVIVG01035000001) derived from phytozome v7.0 (chr-ID chr5 ; pos 805221 to 805761)
ctgtaagtttcttcaaacattggttggattgatctgcttcccttgttatgtggcatgaatgtatatctttctggagctagatgttgcatattatagttggttgtatggaggtaatggtgatggcaagaaaatgaagttatttgcttttatacagtgacaaattctagaactatatgtatttacatcatgagtggtggtagatctttcttgtttgactgtataaataatggatctattatgacttcaatataattaatcactctgttaaataaacaatgaaaaatttggtgcccacattggatttgtaaggattctattctctttgaagtcaatctaagctttagagactttatactgttaagcttggttctggaattatgatgatggatccctgttctccaagaaacttatacaattgattgattaatcttctcttgatcatttcaccctgatctagttggtagttcatagttggtaaaacagatatctccttggtttttgtgtagatcctaaatacatcaaaaggttatataactgtgga

SEQ ID NO: 99507 - DNA, 918 bp, Vitis vinifera
  Intron number 3 from transcript GSVIVT01035239001 (locus G SVIVG01035239001) derived from phytozome v7.0 (chr-ID chr4 ; pos 11090203 to 11091120)
gaactccaagggtgcagtaccttcaggtacctttcttgaacatggtttttctttctcaattgaaacataagatttttattgattttataatatccctgttagagacattactgcggattatccaaaatgcaatttatatcaagtgatacagaagctctttagcatttggtatctccctgtatcactctatctggattgatcactactagatgatgaagggtacaaagctttaacagcatgtacctttgttcatagttttcagtttggacgtcagagtatgacaacaattttgatttctacgtcaaataaatcaacctctggcattcttattcattaaactttttctggatacattgatcatatgctattaattatggcttatacaaaaatgctgacttaattatggttccatgagtgtgcacccatattgaggaaactaattttcgtatgtttgggtaatatggaagaagataaggaaaaatactaaagaaaagattttcctccctactttccttaaaaaagtgaaaagtataggaaaatgcattactcaataatttttatttttcttttatatctatattccttctatttttccactcttaactttccaggactaaacctgacctttaatttctttgttaatgacatgccttctcttggatttaaccctattcttagggtcttctaagaccattaacttttgatgggaaagatagacaagatatacctaagatcattaacttttgatgagaaagatagacaagatatacctaagatcattaacttttgatcagaaagatagacaggatatatcaggctaagtaagtgaatattaatactttatgattggcttctaatgtattacaccaacattcagtttaccactcttgttccaggaattggtgagtcaatttcaga

SEQ ID NO: 99508 - DNA, 894 bp, Vitis vinifera
  Intron number 2 from transcript GSVIVT01037847001 (locus G SVIVG01037847001) derived from phytozome v7.0 (chr-ID chr3 ; pos 7169401 to 7170294)
cgtggtacggatattggatttttgcttgtttgacttgtgttttatgtgctgcggattttcggaagaatttgtttggattatgttttatgtctctttccatcatataccaccatttgaattttgtgcgtgttgcaaaaatttgtagtttggttaatctattgttttggagtttgctaagaagagtttttggtctcagaatgaaatactacactgggattttttgttgagattatgggaactgttgtttgttattttgagaaagagtacatgatcatgaggatggatgaacagtggttggctcagtttgattgcatgcctcttattattctattgaatggtatttgccttttttgatgatgtaagttggttttatattctagtgggctccttgaacaaccttgatttcttttttgggctaataaatttgtagaaactcaactaatttcacctgagaaattctcatcccaatgtttttaatgatttttttaatgaatttcattcaccttagatatgatttaatagggtattaggaagacttttttggtcttgctttattttacatatttatttatttttgggtattaaattaaactgcttagatagattgacttgaagctgtaactgtttctgtcaagtgttaattaacataatagagaataggtttataagggtaataatttgtggaaaactctgagttgcattcacctgcatctggatccatgtagcagtgttaatacatgactgctattttcccttttgtgtgtctgtgcatctgctgcatccatatattcatgcaaccaaaatagttcttgttgtccatatggtggtcgcagcaatttcaggcaccatgctgaatttatcttgacatttatcctaggtccgtacgtactcaga

SEQ ID NO: 99509 - DNA, 991 bp, Vitis vinifera
  Intron number 1 from transcript GSVIVT01031785001 (locus G SVIVG01031785001) derived from phytozome v7.0 (chr-ID chr3 ; pos 4346620 to 4347610)
aaactggatttagagtaaatttcgttactttattgaacttagtttgaatttggattgaagtgcatatgttgaatgtctggtaccccctgaataattatctcatgtacatcttttacgaggctctaattggttatggagatgaatgagaaaaagaaaagaaaagaaaagaaaaaaaatgcacagaaggttgaaactggaacaagtagttaattgaaaacacgggaatatctacctctcatgttgtattttataattatcatcacattggaatgtttctctttgaattatgtgtattgttgattcttgaattgtacacttgtaactaggatgtgagtctatcgttgatgtttatgattaatgtgaagtttgtaagaacatatgggtcaatttttttttttttttttgcatgatggtagttattctttggattagcctgggaaggatttggatgtgatacttctctacaaggtttaggctttggaagacttgaattagaggttaattcagacaggggtccaagagaactaaaatgattaatgtttggtttttgcttatataaaatgtttttgtgtgataaaggtgtcatgtgcatttgaagttgatttcctttttctaactcacacccattcattctgtcacactttcatatagaataaggataaaagatattgcatttaagggtggggggtgggggactttggagatggttaatgcacaagtcccgcaagtaatggctttttattatatattagcttgattgttctgtgttttcttaatatttgtagtgttgcctgttagggtgggagttgggaatcagttagctttttgaaatgcatcactcctgcaaatttgtggtttcttatgtgataccctgtttgttctttgatttattattgaagtcttggaattaatgaactcatttctgttctagttgttctggggtgttagatttcctcattgaaaaagtttttgttatattttaggtgtacaa

SEQ ID NO: 99510 - DNA, 508 bp, Vitis vinifera
  Intron number 2 from transcript GSVIVT01032112001 (locus G SVIVG01032112001) derived from phytozome v7.0 (chr-ID chr1 3; pos 22571207 to 22571714)
caatcatccacccacgggaatattttaggttcgctattcaaaaccacctcctgcttctgatggctttatttcttattgttttcaagtcatttctctggagcatgtgaaatttaagaggtcttaatcatgtgataccctaatctatggagattcataaactacaaatgtccacacttattggaaaaatgacaaaaggaaaatatgaagattagccttagatttgtgtgttcccgaaactgattttgactagaaaaatattaatcctcggctctttaatttaagcatgccacccacaagaaaaaaaaaaaaaacatattggatgcttttttttgctacatgtgagtgtaaccatgaatacaacttttgttctatgctgtgtggacaatgtacatcctgtggttccaagtttattcaaagcccaatgaatattgatggcaatcaaatgaagcatttaagaatattgtaatgaggtttgttttgctcatccgttcaacatgatggtgcagag

SEQ ID NO: 99511 - DNA, 666 bp, Vitis vinifera
  Intron number 3 from transcript GSVIVT01032112001 (locus G SVIVG01032112001) derived from phytozome v7.0 (chr-ID chr1 3; pos 22572135 to 22572800)
gcaaccccattactgcaatttgaagaggtactctgtttctgctaggctaagcctagtgaatattatttcttttgcagggttcggtttttgttattttacaatccatcttttaggaacctatgtcctctatttgcagttatgtttttctaattttgatatgtattaacacatgtgaagaaaaaagtttttccatttgtgttcttgttgttttttcagaatatgacttgtgttgtgcatataaaagtcatacaatactttcatattatgcaagttttctccttggttatgaattatgatttgattttatatttttggatcaaatatgttagtaattttttccaccaatttctattggaaaatttcatgaagaattattctataaatccaatacaattgcatattgttgaaaaaaattattgacgggttcaagataactagtgcatatggaacgagttagctcacttgcatcacacttccaacccatgctcttgttagcatgttgttcatactttgtcttcactattcaggtttaggattgatttttctccttttgcccttaattgtttacccctttcatttatttactaaaaattgttgtactttgtctaatgttttgaattctcattttcagtagaagaacaacataccacttgagcaaggagcaca

SEQ ID NO: 99512 - DNA, 720 bp, Vitis vinifera
  Intron number 4 from transcript GSVIVT01032112001 (locus G SVIVG01032112001) derived from phytozome v7.0 (chr-ID chr1 3; pos 22573164 to 22573883)
aagaggagtctcaggagcttacttatcttaatttggtaagtatgtcactctatgttttgtttgtataattctagatatcaaattttaaatgatggtagaaatttatgtctttgtctctctttttctcataattgatatggaatagatgaccaattcatagaaaattcctaagctctttaattctagcatggcatactacatattttaggtttgtaaatctacctatattccttttctatgggattcatttttcataattttacaatctatcttctaaaaattttatatcaattactagattctttgatacattttcaaaacactttcatattatgcaaatccttttcatggttataagtcatgtttataattcttttgactagtttctattggattaatttttttgcatattattctatatcagaccaataccaaaggggaaatgtcaaggattggatgactgcttcttaatatgccaatatatatatatatatatgttatgagtaaccaatgcatatggaaagagtcagccaaccaattttatattaaggctttgcatattgtctatatataacatgtcttcattattcaggtttaggatttattcctctttttagttttttttttttttgtgtttattttctcttctttaattagctaaaaatagttatactttgttttaaaggaagggtgacataaggagcattagcaaggcgattc

SEQ ID NO: 99513 - DNA, 758 bp, Vitis vinifera
  Intron number 8 from transcript GSVIVT01032112001 (locus G SVIVG01032112001) derived from phytozome v7.0 (chr-ID chr1 3; pos 22574735 to 22575492)
gtcagctcgctcacatcattgtgtatattattcaagtatgttgatctaacctctcttcccacctctaaattctttatagcttagttcttcacaaccactttcttaagaactggtaaagtctaaatttcgattcttgtatttcagttgtttaaggcaatagaacaacaagaagttgagcaagtggctcatactacaaaattgaagtgtgtcatacaatttattctcaaatgccctagacctaagcctttgtatatagttcttaactcaaaacaagtaatatgatgttcaatatggatgttctcttctatgacatgagagtaataatcccttgatcttttgttcttcttctcttaggaggaattatattgtctaccactagaggaagaatttgctagaatgcaatattgtgagaatataaaattttgtttagagtttctttgtaatttcattgtaggatcatctcatctccaaagtgaaaaaactcttgattgtaattgaagcattccattgtgtacttaatgttgttatcttgattgatttgataggtttatttcccaattttttagttccaacatagcagaacattcatgacttatagatcttctaatttggaatctcctatgacgtctgtcaaactcatcaatgatttgtttgtatcttaaaaattgttatagattttacttgttatgcagtggatttgtttgtatcttaaaaattaattcttgtatgattatttgtaggaaaaaaaattgagctac

SEQ ID NO: 99514 - DNA, 333 bp, Vitis vinifera
  Intron number 2 from transcript GSVIVT01030829001 (locus G SVIVG01030829001) derived from phytozome v7.0 (chr-ID chr1 4; pos 17076942 to 17077274)
aggctgttgggcaacaggcaagctccgaaacatcagtaaatcaattactagggatgtatcctcacattacgacttgaaagctgtcattgtttaacataggaaaaaaagaaagaaaagaaaaggttttccgtgtagttcttaaattattttaatctcaatttacgactatattatttattttgttttgttttatttctgcagccttggagccttctgaaattgtatctatcaaaattcgtttttgatatctatcggcttaatttctatttttatttcctctcttctggagatgggcattgattgctggtaggcttccgggaagaacttcaaacg

SEQ ID NO: 99515 - DNA, 695 bp, Vitis vinifera
  Intron number 1 from transcript GSVIVT01033080001 (locus G SVIVG01033080001) derived from phytozome v7.0 (chr-ID chr1 4; pos 25586767 to 25587461 reverse strand)
actgctttgttgaggtatagcgggcagtaactatctgttctatttctgtgttgcattttgctgtgatgaaaacatctcaggctggtgtcttttcctatattcaaagtcctttggattgtgattggggtgcccaaatgagcaagcaggacatgaggggggaaaagagagagatgctctttttactaagaatctgagataaaaacaaagataggacactagtttttctgcaatggaagatacggtcacacagaaaacccgcctctaagtataaagaacaaacacacttgggtttctagcatgaaagctcttgattatataaagaggggagtttccatgcaaattgattactcctttgaattggacaagatggctgcagttagctgttttacatctcaaaccctctattttcacttttcaggcacaatccacttaattattatagaaactaagggaaatttatccattttcataattttttatttaagagagtaagaaagttggtgttcaaacaaggaaggaagattcatggaaggagatatttgggggatcggatttgtatctttttacgtttctattttaccttctgttatctgttttcttgtcattcttagaaacaaacatgacttgattgattatttatttgattgttttggaacaaacattgcaaacagatttctgtgcttatctttgcaggg

SEQ ID NO: 99516 - DNA, 916 bp, Vitis vinifera
  Intron number 1 from transcript GSVIVT01031331001 (locus G SVIVG01031331001) derived from phytozome v7.0 (chr-ID chr1 4; pos 321275 to 322190)
tggttggtttcctcagaagccaaacactctttctggtaatctttatttcctgaatttctacttaactatttccttttctctcatagactcggtgtcaatttagtgatagtccttctagggtttctgatttgattctatatctctttcattgatctatatattgattctttgattggcatattgttaggattggattttttttattttttttttctgagtatttgctgcatatgcttgatcactatcaaaaagtcttttttgcccgggcgctgaaaaatcgtgcctgattgctgcgtttggttacctaaaaaactgagggaaacggaataaaagttggaagcttgtttgcgttttggttttagggggacaaaaattgaaaagcgcagcagctcagttgaggtttttttttttttttttcgtctatggtccaaaacaaggaaaaacttcgatttgtttttattttaattgggcatatatgcaatttcttgaaatgaaaggactgcttttcaatgattctcttttttgccgattttgctaagtatttgtaaagcagcagtttgttttagattcaagtttgttatctatcttgtagccgtaacagtttatcgcatgagtttaaacttcagaaaaccttgtaaaattgtgtttcatgctacaagattttaatctattttgtttttgaatctaagtgtaatgttttgttctatttgttgctaagttttggtaaaagggtttctttttagatttatatttgttctagcatgttgaattgataatggttttccacatgtttaagctaggaaagatttctcaaaattgtgtttcattctacaaaattttaaactactttgttagtatatctaagtgaagctttttcttctatttgttgttttatttattgttcaggggttagaaa

SEQ ID NO: 99517 - DNA, 974 bp, Vitis vinifera
  Intron number 1 from transcript GSVIVT01032905001 (locus G SVIVG01032905001) derived from phytozome v7.0 (chr-ID chr1 4; pos 23974203 to 23975176 reverse strand)
gaggttagcccactttctccatcactctcatccccatgatattctacctgtacatgtttgcatgtatcatgcatacatgagtttcatgagttggaatgatttattggggagttaagtctttgttactgttatattgcttacattatttgtgataatcctttgtttctatatctcatttatatgcattttgtccttcaaccgacacgtacaggtcatatttctgccgacaagatcaaaaattaaagatgttgaaattttcaagagatgatgtttacattttagatatttagacacaaatcttcagagtctaaatccagctgtgttgtgagctatattttttggaccgtacgcattttggaatttagacacattgtgaaaggtcttacagttacatttccaaataaaaaggagttatacatgtgaaaaaatgaggagaaaccaaaggaaaagttatagagcattactgtttttttgtcttttgggtgtagttaggtttgttagatatatcatatgcatggccttggacttgggacttgggaatgtcccaatcactgacttgtcatcgctgagacgaatcatgagtgacctaaccagcccattacaattaacacttctccccctcatttaaaatgcatggaggaagcagaggcagagagccattcaatgcttgaaagcaactaaaaacagtccccatttattgactctcacccattgcttacccctatcttagccccaaactttttgtcagtatgtgtaggtgcacaattaattcactgttaacacacctaaattcagcacttctactgtgtatatcagtacacaaccactcttcagtcttctcttgctagatgctttttaaaaatcaagttggattaatatataggacccgtctcataatgtatatatatatagtatctgatggtgagacttgttttgttgtaacttgtaaggtcctggttgctcttctgtggcgt

SEQ ID NO: 99518 - DNA, 679 bp, Vitis vinifera
  Intron number 1 from transcript GSVIVT01031529001 (locus G SVIVG01031529001) derived from phytozome v7.0 (chr-ID chr6 ; pos 17493412 to 17494090)
ctctgggaaatccactcttcttgactctctagcaggtttggaattatctccctttccgtttggttgccaagaaaggtttttcttgggttttattttcaaatggaatggcatatccctgtaccctacatcacagcaaattgtttgggtgcgtagtcaagggcacctgttttggcctttttagaaaatacagtagcttcttttttagtcttggtgaaattgaggtgaccattttttcctttcctttccttttccaggaaaaccgaattctttccttttggttattgagagctgataaatcaggaaggaaaattttcttgaaccagaaaaatctagggtcttttgttaccctaggaataccattcctcaattatgatcaactgagaaaattctcttaccaggttaatagaaaaaggtgtttcttttgttactatttaagtatcacctaatattttttctaagagaacttacaaatttttttgaggcctctctctaatttgtccccctaaaagacgaaacagatgttgctagttgtgtgggtgtgtctgcttttagatttgtacatcaaattagtcttgattggaagatatggattcttgtaagttgtaattcacttaaaatacttggattaattcaagggtttattgatgtttgaatcttctcacaggtagactctcaagaa

SEQ ID NO: 99519 - DNA, 733 bp, Vitis vinifera
  Intron number 2 from transcript GSVIVT01032699001 (locus G SVIVG01032699001) derived from phytozome v7.0 (chr-ID chr1 3; pos 1423982 to 1424714)
agacagttatcaaagaaaccggtaaattcttcattggcctcattgttgattcgcattctcaggtcctttaggcatatatgttctcaaattttcccatggtgatgtagttttttcttttttgggacgagaattagttgggtgttggaagactttgtagagtacggtgtggacgaagtttactcatgcatggtttcatgataggatttttagtattaatttcgggttgttttgttttcttcaaaaatcctatgcggatttgaacttaatagttatacaaaaactcatgtatattcacgatatattgatgcctgcatatgtgttggtgcatttaggtggatgcatgcatacatacaccttgctttggtttgcatatacagatcgataaatgtacctttgtggaaaaatcttgtaattttctgggtgttacaattggaccgtttcctctatgatcagatgttaacttaagatatatgaacattacgagggctccgatcagctttttattcttcttcttccctttttccatgtgagtggattaccgttcctttatcctggtttgtacatccaaggaaagtggatccactgtgattattattttttttgtttgatcaaatcaaggaaaaaaaaccatcaaagaggtctagttaagaacatgtttttctgatgctctcatccttttacttgatctaacttccacataactactaacatcttttcttttcattgacagctg

SEQ ID NO: 99520 - DNA, 915 bp, Vitis vinifera
  Intron number 5 from transcript GSVIVT01036187001 (locus G SVIVG01036187001) derived from phytozome v7.0 (chr-ID chr6 ; pos 19688524 to 19689438 reverse strand)
gctcagcttgaatcagaagtcacatcattggagaggtattttgtgaaagcatgcaacttaaatatttattggctggtaaaatcattaaataactggcataatcacaagatcgcgttgaacgctagagacactgtttaattttttattctctcctatgctaaaattgactccataggatgattgctagtgatttgttacaatattcttccgatttggcaaattcatcctgaaaatttcctttgtttgactccttgagttcaaaagggaatagcttttatttacatgttcagtgagattatactctgtcatagatgaggtaattttaatcattaatgccatgtattattttttttcaatgtgccaaaccttgtttgcaaacaaggtcacaatggaaaggtatcccaaatgtatctactatttagatacgtggtcatgcagtagcactctattgtcatttgaattttgaatgcctaacagtcatccaaactattggtggtcatccacatgaatccttttcgtcattgtggactacttagagcaacatagaacccatctggatttgtactggagtgtttgaccacagatccttcactagctattaacctaacataattcacctttctctgggtttggagccagatgtgtgaatggataaagccctacattgaacacaagctgataccgtaccatttatatatattatcattgtataatttatattacaggactattgagtaacaatatcatggtcacctgtcatacaggtggcagattttattatcctcgcttgtgttttattcttgccagaaactttgcttctcgtttttttagtgtaccgtcatatgatgtagaatttacttaatcaactccaccaatcagaatctcatttgctattaatcctataattttaggcgc

SEQ ID NO: 99521 - DNA, 1033 bp, Vitis vinifera
  Intron number 1 from transcript GSVIVT01033258001 (locus G SVIVG01033258001) derived from phytozome v7.0 (chr-ID chr8 ; pos 22099966 to 22100998)
tgaaaattcgtcacccgtttgttacttgtgccgaggtcggtggcttatctttcggttccatttggttgccgggaaattgccggaaaaggaatcttgtttttgacttcttgtttattttccagttaataaccgggaaccgaacgggacttactttttctttgattttgtcgtttttaagtttatggacgatccgtctgtgatcttcgttacctttctttaaagaccgatgagagaaagtaagaacagaagtgaaatcttggactcttaaagagaagccagggctgagaggatttggttttcttagtcaaaataggacttgaatttgcaacgaacgggatattgatttgttttacttttcttgaaaaaagagatttgaattatcggtgctactctttattgttcactgagaaaatataagaaaagaaatgaaatctttgaatttcatttttcttagttgtgacggcgttgtgatttctgtcatatttctttaaagccggttaggtcggtgagaaattataagaaacaaagtgaaacgtttaaacacagcttcttcaccaagaacatataaaaattgaggagaaatctttaatatttttttagtgtatcgatgatcagtttgtgatctatgtatctttccttaaattctgtttggttggtgagaaaatatacgactcttcaaatttaaatcgaggttaagaaaaatctgttatactagttagaatgtgaatttgaatttaattgagctgaactttaaattatttttttccctttttttgaaaaagaatttttaatattcgttttttttttttttgtaattaaagtggttggataaaatttagcaattaatgcctagtatttgtttaaattttggggtggttggtaaaggaaaatcgattattggatgttcagttctcttcaattgaaatttgctgggaaatgagatacaatagttgcaaaaattgagattgtttctttgtttgtttattttcttatttgttttattatttggcagattttgcttcctactgttgta

SEQ ID NO: 99522 - DNA, 317 bp, Vitis vinifera
  Intron number 1 from transcript GSVIVT01032574001 (locus G SVIVG01032574001) derived from phytozome v7.0 (chr-ID chr1 4; pos 28490408 to 28490724 reverse strand)
aattcgggacttcgctgctgaaaaatctcaaggaggtgaaaataatttctgtagtgttgtttttggtgagaaaatgtaggaaaaagaaagaaataaaaactccattgagttttaatttttttggaaacaaaacaagagaagaatcggaatcaaaattttattttcttttatttttcttacagtttctcagcaaccaaacagcagtgtttttccaccgaaaacggagagtagttgttatttttatatttgacatcaaacccttcctggctgcgagatatgcagaacggagagtggagagcctgaagaagcgaatccag

SEQ ID NO: 99523 - DNA, 408 bp, Vitis vinifera
  Intron number 1 from transcript GSVIVT01038403001 (locus G SVIVG01038403001) derived from phytozome v7.0 (chr-ID chr9 ; pos 11821795 to 11822202)
ggtatgtaatggtttcttccattaaattctttgaatattcgtaacttaacaagtcctggataacaccttgagttctcattgtgatcttatttgtcattcaactattagtacttggcctgttgattactagaactccctggctattccaaatcagtctgaaatgactgcaattgctcttttatctacccttaatgagatgcattggttccttcactctgttttacttttattttctttttgctgggtttatgtcccaaaaagcttgcatggttggcatttgaactccattagaagcatcacataacaatcataaggaatgtttcattaccaaaagctcttgtcatccagaactatcctcacatgcatacatcttttattttagcaggcaatctgaaacacaaagatttg

SEQ ID NO: 99524 - DNA, 580 bp, Vitis vinifera
  Intron number 2 from transcript GSVIVT01032952001 (locus G SVIVG01032952001) derived from phytozome v7.0 (chr-ID chr1 4; pos 24553675 to 24554254 reverse strand)
aggtatgtcattttctttgagctgtccaagaaatttgtttgcttccgctattatttattagctcagctttgcaacatttggtttgatgatgtatggctcattcattgcaaatcatggatacttgaaaggaaattttcagttggtaaatgatggttttttcatgtcaaaaactttaactgctaatagtaatcactttggccatatttccaccttggatctgcgtcctcagaaaagacttctgttcccttgtaccctatggaaaagagtttgttgtactgtagaccactttgaaactagaattcggtcttctgcgttccaggttcatgatgcttgaattgtttaaatttcagttctgaccttcagtaatccacattgctcggtttgattgttttgttagtttctgctcccttttctgcagtgggttattattgttgtatgtttgaagctcagatcattgagagaaaaattgtatactgccactgcattatgatttgcccttcacaacttgttgtaagctttgacattatcagcttaattattttcagagagggaggagtttgttgctagacaataacggagc

SEQ ID NO: 99525 - DNA, 847 bp, Vitis vinifera
  Intron number 1 from transcript GSVIVT01033251001 (locus G SVIVG01033251001) derived from phytozome v7.0 (chr-ID chr8 ; pos 22183363 to 22184209)
cccctgttttcctctgccactctcaatcctcgcaggtactaatctaattatttttttggcaacccccatttgattcccaagaaaatccatcccccattcaacctttgcctgcaaatcatgatcagattaccaaataacatcgtttgtttttttttttttataaaatggatagattttgtatcctgtgcgcgggctgaactggtaggaaatatcctagtcctttaatttatgcaagatgctaaactggacagattttgtataaaattaaagtactttaattttctcttttttctttttcatctgaaagattgtttaattgtttgatttagttgttttttttccccaccttttttaaggctccgctggaatttgctttttattttgagcattgttagaaattgatacgtttcattatgaatcatcgtttcacagacaagaaaaaatgtaatttttttattcactattttaaccataattctgtttggttcccaagaaaaaactaggcaaatgaaagaaaatgttgaaatttactttgaagaaaaatggaatttaatactggaattcgaactgttcgtggcttttgaaaacataaaagaagaaaatagggcaaaaatatgtttggtgacacaaaaaggtttctaaaaaatatttcttggaagatcattttttaggaactttgaaatatcgtattcggtgttttcaaaatagcaagcactgtataccttgaaatcggtccttttcaggaatcccttccagcattcttgctgagatctgaacaggtgttaaaattatcatatcttcatttgtttttgttcttattctttgccctattgttcagttgtcagac

SEQ ID NO: 99526 - DNA, 497 bp, Vitis vinifera
  Intron number 1 from transcript GSVIVT01035611001 (locus G SVIVG01035611001) derived from phytozome v7.0 (chr-ID chr4 ; pos 2681454 to 2681950)
attgtttttaggtaagttttttccgacattttacctacacttagtatcattaatgtttctggttatcattagtattctttgtattgatgaagagtggatgccatacatgttttgatttttttcaaactctggatgagaacataatctatattgttgaattcttgatcaaatgaacgattgcatgaattaactgtgtttgattactgagaaaatgtaagaaaaataaaataaactgatatctcttagaatttgacccgaaaaacatccattttcatttgtttggaaaccaaacaaacatgaaataattcttttctctttttcccagctttggcttctaaccaaacgaacagtttttgtaattatagctgtatttcttcttgttccaatattgaaatatgtgcttatatttccttctccttttgcttcttttctcatgacttatcatcagctttggatccgaggtatgataacaagatctttattggtgcagacggaga

SEQ ID NO: 99527 - DNA, 990 bp, Vitis vinifera
  Intron number 4 from transcript GSVIVT01035454001 (locus G SVIVG01035454001) derived from phytozome v7.0 (chr-ID chr4 ; pos 1383411 to 1384400)
aagcaaaaactcccacagaggagcctcctgctcaggtatggccaaaatcaattccttctctaccttcttatttatttatttatttattttaattactattatatttctttttaattagatagccctagatttgattttaaatttaagagaggaatgatgtttaggtaatttctaagtcgtttttttggttcatgtcctgtcaatttttctcttcaaatgtttttcatacaatcaggttagaaaaattggaagttttaacttttttcgttcttaaacttttatgcatgtctcacattttaatgaaaggaaatttaattggtaatttaaaatttgaccttaaagaaatagtgttttatggtctatttgacaatatcttcatccgcaattttcttaaaaataaatttcaacaaaaaaagaatggcctaaaaaaaaacatgttttaagaataattataaaaaagttcttatttattttcaaaaataatatttttttataaaaataagttttctcaacttattttttcacaaaaattttattcacttacagaaaattctaaaactcgtagtatacgcaatattttcaatgattccttgaaacattgtataaaaaccagctaaaagtacattaaatttgccctcataacaaatttttaaaatttaatttttatcaaaaatttgtcaaacctattttccaatttaaaaactatctttctgcttaaaataaaataaaataaaatattgttttcaaaaacaatttttatattagatatgttatataacgttccactggtgaaaagttatgttatattagatatatatttttctacaaaacacaatttcccttgcatttatcacaaatccagtcatccaaaattagggaaatcgaaattgaatattaatttatactcaatggaaaaatggaaaaatagaaaacacagtagaaatcgaaattctcaaaacctttaatacatttcattgcaggaaccggaag

SEQ ID NO: 99528 - DNA, 561 bp, Vitis vinifera
  Intron number 2 from transcript GSVIVT01033286001 (locus G SVIVG01033286001) derived from phytozome v7.0 (chr-ID chr8 ; pos 21822976 to 21823536)
ccacctctcaagcttaccagaggtttgttttagagtgttgtgtttctaatatttgaaaatttttagttcagaatatagtaaaaatgtttttttaaaagcatttttcagacatgaaacaccatagaaaaaatattataaataattttttaatattttacaagtgttttaaaattttattacatatctaatatttttaaaaaatatatttttttatgcaaaataataaaataatttcaatttataaatctagtcttctaatttctttttttttttaaatcccaaaaaaatccattttgataaagataaaaataacaacatatcctttaaaacttatatgtaaataatcaaaatattaaaaaaacttatattaaagatgaattatttttcaattttatacatgttgagattagatgagagatgttgatttataaatttgacattatttcatcctattaattaattaattctgattaaaagcacttttaaacaggcttttcacttgctaatcaataattttagagtattgattctcttgttgctatgcaggtagtctagctaaaa

SEQ ID NO: 99529 - DNA, 735 bp, Vitis vinifera
  Intron number 4 from transcript GSVIVT01037731001 (locus G SVIVG01037731001) derived from phytozome v7.0 (chr-ID chr1 9; pos 7326513 to 7327247 reverse strand)
aggtgaatagtttttgtgataaatttttgttttttttcccttgtgtttatgcatataatggaagtgtgatgtggactatctgtcatgtagatgaacggttggcatagtgtcaacactataaaaccatctatcttcccaaatttctaagggcctgtttggaaattgttttcgaaaacaattttctagcttaaaaaacacatttagcaaacttttgacagaacaactttttaaaatctgttctaaaagcaggttgtttttaataacaaattttagatgttttcagttattctttgtagagtattttgtgtaataattaaaaatatgtagaatgctttgaaaatttttgtattgtgcataagtgtgtagtatcttcttggtgaacaagccaagaaaattgttttttgtatgtaagatcccaaacagaattttgtacctgaaagcaattgagtagtgttcttcaaaaactgttctttgggaactattttcgaaaacgttctcaaacaggccttaagattttatcatataaccatgcaaagggaattcaaactaggatgtgcattggactgataaacacacagatactgcttgaagcattgcactccctttgttcacatgtcatttagtgaacattgttgatgtagtggaattttgtccctgtggattggcattttagcagagagtttgtgttgtccacattaaagttcatgtgaattccttgttcctttggttaggtct

SEQ ID NO: 99530 - DNA, 831 bp, Vitis vinifera
  Intron number 2 from transcript GSVIVT01032633001 (locus G SVIVG01032633001) derived from phytozome v7.0 (chr-ID chr1 3; pos 2008660 to 2009490 reverse strand)
aacaaatctagggttttatctgcctccgctttcgggtacgctgtcaattctcttgtatttccattggttttgatgattttttgatgacttgcttgaatctgtcttttatgtttcatgaatttgtaggatctgagaagtttttgtttttgtaagttcgtaggatctgaaaatccttttgtttttgaaaatttgtggataatttgtgtatgaatttggtgataccacttgtctttcgttagtaatcactttctcggagttttgattaggttagcttttgtttttgaggattcctggataatttgtctatgaatctgtctataatcgtttgcctttgattctgaaaactctttcttggagattgaataggttagttttgtaatccctttccattcctcgctctcttggtgcgcttgtgcatgcattttctctttttccctcgttcccccgcccccaccacctccccccccccctttttactttaagctggtatgcaggttctgcttggtcaccgggttaatttgaggaaagggaaaatttgaaatccgagtcataaacttaacattacttgaaagaagaagcacgatgtgtcaaggaaaaaagacaggaaacatgagttttatttctattcttattgttgttaatcctctcagcaacaaaacatgagctcgctgatctattgatctttataggaattgtggatgcgttttaaaattgttgacattgttggccttccttttttgggttttctcctccatgtaagagatatgtatgagatcgatgctgtcctttttattattaacaataaaaaaaccacatttgggtgcagataaa

SEQ ID NO: 99531 - DNA, 723 bp, Vitis vinifera
  Intron number 2 from transcript GSVIVT01036070001 (locus G SVIVG01036070001) derived from phytozome v7.0 (chr-ID chr6 ; pos 21055157 to 21055879)
gccatattttcctctgccactctcaatcctcgcaggtactaatctaatcatggtattaatttttaatttttttgcaacccccgtttgattcccaataaattccatcccccagttgatcaccgggaaaattcatcctcgtttgatttccgagaaaatccatgcaaaaaccccaaggaagataaaaaaaattgctttttttttttttttttttctccctgtgttttctggatctgttctaggggtttctttgcttttatgccactgtatttaaatttcaccaaccctaaatccacgatttttgagctaggctgaagaacacaacctttgcctgcaaatcatgatcagattaccaaatagcatcttatttgtttttttttatttataaaaaattggacagattttgtatcccgtgggctggactagtaggaaatatcgggaaatttccagaaatatcggtaaaaataccgataaataccgaaatatcggtgatatttccgaaaatttaccgaaatttctgtcgaccgttaatcggtgacgaatatcgtgtcggggccggccgataagcgaaatttccgagaaatatcgccgaaaattttcgatatttcaaacactgcaccattcaaatatggcttatccttggaatattactcttccaatgaaaaagaagtctcaccatcattccaaaattgcttttctcaaagattctatcctgagggggaagcc

SEQ ID NO: 99532 - DNA, 1019 bp, Vitis vinifera
  Intron number 2 from transcript GSVIVT01036127001 (locus G SVIVG01036127001) derived from phytozome v7.0 (chr-ID chr6 ; pos 20380743 to 20381761)
gctgaatctccgatccacatcctcttcactcttcggtaagatctccttctccatcgctttatttacttctctcttgtattattgtcttgcttctgctcatttttctatgctttcattcccatttccttatctttctgagggcgaccatgactgtaatacccagattgggtgatctcggaaaactcgagcggtgaatgcagaaaaacctaattcttttgttgactaaaattttacgcttaaataccagggtctggatgcaatcttatgaaagttgttgaacgaattttcagaaaaaggctgtttttctgaaataagtttcaacaccttgtggttataaccgttttgggaatttgaaaacccagttcgaaacttgcaggaaagcccctctgttattcttattatcatcattatagaaaatgattttccctgcaacgcaagggattctcactacatttgattttctttcgaattttctgggtaaatcaaataagagatgagagatttcagattcatttttgtttgtttttctttgcccagtattctttctgaaaatgaataccagaaacgtgtttgaaaacgcttactgaatacaaaaaaatcccagcttttgttccagagcaacagcttctacaataaaagttgttactaaagtaatgagatactgggaaatttttttatagagtcgacttcctctagagcgatgttgttaagatcggatcacactctgccccatgtcttctcctttattttccccagattttctaaagttcaccacctttttggcctatttcaaatactgttcaaagataatgaaaatactgggatgaacaaactttctgaccttttccttgaaattgaatgtagcatgacctgagcacccctcttccatttagatttccatcatcaagctgaatacatgccttttcttgccagaagttggatttttatggaacatgttgtcaactagctttattgctattgtagaagtcccagattcctacaacctccttcgggcttgc

SEQ ID NO: 99533 - DNA, 759 bp, Vitis vinifera
  Intron number 2 from transcript GSVIVT01037232001 (locus G SVIVG01037232001) derived from phytozome v7.0 (chr-ID chr6 ; pos 17114776 to 17115534 reverse strand)
aatctaggccattgctgggtgcctgactcaaggaggtactgaaataattaacatttctcaggtcctacaaagaggtcacagagggcagggcaggtgtgtgttgttttttgtactagagacttctgttggtcctaccttcatcaaggctagagggtttatgggtatcagtaaaggctagtgatactacaactataaaaacaaggaaaagaagttctagaggaacaccaattggatagagaaaaatcaccatccttaggccccaatatgactttgaactcactactgtatagaatcaacccaagtgataagagtttagagaacaaaagctacttgcatagtaattctgcccagattcatgctagttttgtcccaaaaagtatctcaaaatctggtgctgctctcccatgaagctcgggaaatatttgtaagaatttaaagctgcttctgttctgggctctgagccagatgtagggacacttctgtggcaactaccacctatttgtatcaacctatgctttctttaaaccaaaaatggttctgtaattttaaggagtacaacttgatttactttccaagatcaattgggttgggagagactaagttctatgtttgcagttgtggtagctccagctccaacaactcaaagcgtatttatgtttaataagattctgtataattgttgtcattttttgttctttggtgtcaatttcctgcaatgacagatttctcttttttgttgtaacaaacagcaacattgaa

SEQ ID NO: 99534 - DNA, 841 bp, Vitis vinifera
  Intron number 1 from transcript GSVIVT01036547001 (locus G SVIVG01036547001) derived from phytozome v7.0 (chr-ID chr1 4; pos 23297948 to 23298788 reverse strand)
tctctccacaaattatcaacctccacaagtttcaggtaaaccaaagcccaatttcaactttatttttcttgccaaatttctttcattttctcttattttcccttccagtttacattcctcaatgaccttgttttttttttttcttgtttttttttttttttttttgtggaaattgtatggagcttatgttttgattaatttcatgttatatttgatgaggtttttggttgtttgttgaattattatgcattgctttccaaaaaattaaatgaaatcaaagctcatttatcattttttttttctatgtgggtatgggattaaagggaacagaatggaaatccttccaagttgtgattttggtgagactgatttaaaagaactgaaaagaaaactactgggtgagctatagttgtctccattctgcaaattgcttgaaaataatggacatttgatgaagattcaacaatatatcttggaacctgttttttgtgctgattaaagtaaataaaatcagatgagggtagtttgatttttttattttctttccatcttgtcaaattagaaatttgggttatgatctgacagagactatagtttctgacactgtatcatagccagctttaattgaatgggatgagtttcattttttatttttttttccagtagaatatggtgattgttgaaaattattcttccggatcctaggtgaaagcagatcatgttgattgttgagagctatgaatattttaagggaaaaaaagtctatatccttattcttctggattgtgagacaaaatttgtaagaactgcatttcacaaaatttgcagatacacaaagttc

SEQ ID NO: 99535 - DNA, 915 bp, Vitis vinifera
  Intron number 1 from transcript GSVIVT01036009001 (locus G SVIVG01036009001) derived from phytozome v7.0 (chr-ID chr4 ; pos 7134756 to 7135670)
gtagaggtgagtcttgctttcatatactagttgtttagttctccacagtaccttagcatgctgggtgtgtcttgatgcaacttcttttccctctttaaatgaaagcacatatttcttctggaaaaaactatagagctatcggtatttgaatttccgcctttttttttttctggatacatacaaacaagtgattattagtggatgcaatgaatttgtaagtagagataacgcatccataaacttaattatttgggatccctttactattgaggaagtaatttctttttgaatgaggttgtgttaggaatgaagcttcctagaagaataatttctaattaaactctattcatcaaaaattacttttcaagtccgtgcatggatcagtgttccctcttttaatggtatgaagcaattaattatgttttgatgtgattctgcaagaaagcgggcacccctttcttttccatgcttttccatgtgaagttgagttatgatattgggcatagatgatgaggctgacttcatgaagaaacgtgtggccccccaccaggatgggcaagcatgaaacagccttatctgtagaagggaaagtctccagcgttgaagaaaattttgttctgactttaattttttataaaactagttttatttgctatttggaagtcattcttgcttgaagataatagaaaagacaccatactttaggtcgcttcaaaagaattaatctaatagctttaatttgagaagaaaaatggttcttctattaaacaggtcctttcctgcagctcctgctaggaatcacttcgatattattctctaagaattacaggcaaagcctttgcaagggtaaatcatttgtctaatttttctcctcttgaacctgctagaactattacttgtggttgcagggttgtg

SEQ ID NO: 99536 - DNA, 385 bp, Vitis vinifera
  Intron number 1 from transcript GSVIVT01037718001 (locus G SVIVG01037718001) derived from phytozome v7.0 (chr-ID chr1 9; pos 7228173 to 7228557)
agctttgtggaaccaccccgttggccccaaaaccagtgagttctctctaagcaaatcaaccctctgttgtttcatcactactcttcttttcccaggttttcttgtcgatcaaacatgggacctctttgatattgttagaattcatattcaaagttgtttgattcctatgaaggggcttttggtttcacttccatgggcagaatctgaaaatcttgattctgttgagaaatttgtttttggggatttggggttgaagggtttcctctgtaaatccaaacagctgaataggttgtatttttgcataatattttcttgtcaataataatgtttggtgtgtggtgaatccactaataatttcagttcacttctgggccccgacatttaa

SEQ ID NO: 99537 - DNA, 746 bp, Vitis vinifera
  Intron number 3 from transcript GSVIVT01033459001 (locus G SVIVG01033459001) derived from phytozome v7.0 (chr-ID chr8 ; pos 20507623 to 20508368 reverse strand)
cactcaagcgcattttagtcaattgtgcatctcaggtttgttgaactttaatttagtgagtttggaaacattactgtttctttcgtaatttcagacacttgaagttcttcattgacacctatataatgattcagttatttttctccatttcaattagttggaaaaaggccccaatcaaaatagcctcagtattcccaaggactgaaatcaacaagtagcatttgcatatcagctgtaatggcagtatatgctagtaacaattatctgacggttgtcctaagggtaaacctaaatctctatgtgaaattttctgcgcttaaaaaaattatactatttctgtttatttctaaatttagatataaaaaactggaatacaagaagaaaagtggtgtgtggaattccctaagaaaaaactaccatgtgattataatacagggaaaatggatgattctttttatgtgcatttgatttttgggtgtggcaagtaaggttggaaaattttagttctcacaacattgcaccttcattgaaggttaactatgacattctgttgacaaaataaaattggagaatatgaagcaacattagctaaattactaaataggacttttttagttgatttatggttggtttctgggttcttacttcttactaaaattacctatcatgagctgctttttgaaagtgattcaacttggcccggcattctattttaattatagcttcactgacacaggcaaaagact

SEQ ID NO: 99538 - DNA, 889 bp, Vitis vinifera
  Intron number 1 from transcript GSVIVT01030921001 (locus G SVIVG01030921001) derived from phytozome v7.0 (chr-ID chr1 4; pos 19015956 to 19016844 reverse strand)
gcctccggaaacttccgtgccgcttcagattacaggttaccatttgttagattggtgtaaatgttttttttttttttttttgtttttctgccgagaaaatgtagtagaaggaaatgagaggaaaaaaaaataccgaatcttaggttttcttatgcactctcatgctctggtttttcgaaaaggagaaaaaatgctcttcaagtgaggaaatagtttattaggttcgtagttgagtggagattttattggttcggaaaaaaatgatataagggtgaaactttggctttttttccctacttttctcagtaaccaaacggattggtcaaattgtttgattggggaagttttttttagtatgtgattgtgagatcgaattacattgacctagatttagtgatgagttctaattgcttgtctttctgtttactagtttaaatttatcagaagctatgattgattaattctgtattaaacagaatcatgctctgaaaatatttgtggatttttatgttgtgaagatcatagattatgaagtggaatgtgaaaatgagatggtgtctgtggctcttgaaaaaattcttactggaaatgtggatttttttaataagatttttgaaattaatgagcattcaattggaagtgggatggttttattaggtttgcttaatttttatttgattgttggagaaacggattagaagtaaattatctagaaccagaaaaattgctcataatttgaaacatgaacatgggtccactgactaggagggaacatttgtttaaatcataatgttggcagaagatctaaaatattggtattcatgtattgatattttaaattttaactctggtttctaaagcacatattgtgtgagcagttctgacaagg

SEQ ID NO: 99539 - DNA, 702 bp, Vitis vinifera
  Intron number 1 from transcript GSVIVT01031921001 (locus G SVIVG01031921001) derived from phytozome v7.0 (chr-ID chr3 ; pos 5420629 to 5421330 reverse strand)
ggcaggccttggtgtcttccactctggtgtggaaggtcagctgccctctctattttgatgcttctgcttcatctttgaatatatagaaattaccttagtaatagcctaccataacatgtctagaagattattacactgttgatgtgtaactgttctaatcatgtttctccacacccatttattttcatttgaaagaaaatattacaataacaaaatcaaacatataaggtttatgatttaattgaaatggtggcactataaggagtaaaatgtctccatatagcttttgcaatcatttttcatatgttatcatataagacctatattggtattattttttctcaaatttattttggttgtcaagtctttttgttagttagtgaatggattaggcatgcctcattttagcatgtgtaggtaaatgaattacaaaatacatatggctctaatagaatcacctcaagtagttgagatgaaggctctgtgaattagttgagatttacatgtatagatgcaggacgctaccccatacatatattaaatgcagacatcaactatctgcaagactgacagttaggacactgtctaggtttagatgtgagggcagtttttgattttggcaattttactgtcttttttttttttttttttaatctctatgttggaatagatatctgatttgcatgtgcatattgacagttc

SEQ ID NO: 99540 - DNA, 592 bp, Vitis vinifera
  Intron number 3 from transcript GSVIVT01034750001 (locus G SVIVG01034750001) derived from phytozome v7.0 (chr-ID chr1 3; pos 8955833 to 8956424 reverse strand)
gcgttcgattcttgcgggtgagtggtggttgttatcttataatggaatcttctgattttgttttccagtgagtctatctctttccactgatgatggagattaaatcgttttgctctagtgcattctgtttgtggaaaatacaaatccatatcatttatagtaaggcctcgaaagataaatgggagtgatggaatttgggttctatggaatggtgccagttttgatggacagctttcatttttttttcccctaacaaacaaagggttctattatttattttctaatgacccattatttgtgatgaatttccatggatgccaaaactcaaattagatggttttgcttttatggtgttttcaatgccttagacagtattttattcgatcatgagttatgacaataaatggctttatttttatgggtttttaagagcctttgtcgtatcctacttgattatgatattagatggttttatttttatggtctttttctgtgcattagatagtatccttttttattgtgtcattaatttttatctttctttattttgccttcaggatcctccttgtgctagaagctttggaatttgcaa

SEQ ID NO: 99541 - DNA, 723 bp, Vitis vinifera
  Intron number 2 from transcript GSVIVT01032970001 (locus G SVIVG01032970001) derived from phytozome v7.0 (chr-ID chr1 4; pos 24706965 to 24707687)
aggtaataatcacttttcttacttggactaaaagttatatgatgcttacatataagcacttattcaaatgcattttttggggctaattgttttaatttcccactgcatcacccttttgatttccttacttgcttggatgcagaacatctgtatttggagtctgaaatttcttcgatgccattcattctttactttttcaattttcaaattgctgctatttttttttattggcttgaaaaagtttcaaatgaaagacttggaagtctaaatttttattggtgcaagtatccttcctttgttttattgtacaaatttttaatatgccatccaatatgaacattttacaggcagccttctttaccttgttatctttacaattttttcaatcaatggtacactactcaactcagttgcacaaagattaacctagtcattgggtcagtatgatgagaattcgatttttcccccaaatcttctcaatctatgccttctgttaaatcacaggcaacagtgtcgtctttcactcgctactaaattgtaacctactccaaaagactaatttaagtccacctgactcaacaaagactagttcaactttattttatttgtgatatttccatgtttcccatagttattgttttttcattttattgtcaattggatccattataactgaacttcctatcaggtacgctatctctcagctattgagcatcggaatct

SEQ ID NO: 99542 - DNA, 210 bp, Vitis vinifera
  Intron number 3 from transcript GSVIVT01033662001 (locus G SVIVG01033662001) derived from phytozome v7.0 (chr-ID chr8 ; pos 18841761 to 18841970 reverse strand)
tcaacttattgcccttactcttcaatctcatcgtgagataatcctctccccttataatccctctttgcgatatagatttcccttctttcatatttaattttctcgatttattatttttgtgggtttgttcttatcgtgttttgccattttctttaattatcgaaagtgggtttgatttttaataattttcccttttgcaggcaaaggttt

SEQ ID NO: 99543 - DNA, 824 bp, Vitis vinifera
  Intron number 2 from transcript GSVIVT01031746001 (locus G SVIVG01031746001) derived from phytozome v7.0 (chr-ID chr3 ; pos 4012781 to 4013604)
gcttcctccaccctctcagtctgtttcacctgaaggtaaaccactgtcaaattctcaagttggcataaattttacatccagattcattgggttgttttgctaaacttctattaataattagaactctttgatgttcagtcagtttcgatcagatgtagtggacataggttctttatataagtaatattatagtgattcaatgatctggttttctcaagtctgtttttggtgatcaaattgtatgaatcgatgattaagtcttgtgggcgtgttcttttgtttcaataatgatgtgagaaattggaagaattatttaacctgtgagttttcttttcaatcaactctgtggaaaacaaaaggaaacttacatgagaaggcttggattggtcaaaacatagaaaagaacttgatattaaaagagattactaaaaaaattaatcttgctctcgaaaacctttacgactttaaaatgtgtttacaagccacatagatacagcatttttgttgtgtttgataggattgtaggactttgttgtgtctcatgagattgtgaggagtcaaacaaaccctcggagttttgtaatgatttgttctctatcatgtagatattgtcttatttaggtttaaaagagtccttatcactttaaaatctgtgtataaaataaaaaagattcatagagtgaaggatatcacatcattcaagaaaagctttgatgttgagttatcaccgggtttggtcttaagtcaaataagagaggctacttgtttactagcacttgaagataatcttatgataatgtgtattactttcacttgaagggtac

SEQ ID NO: 99544 - DNA, 820 bp, Vitis vinifera
  Intron number 1 from transcript GSVIVT01032919001 (locus G SVIVG01032919001) derived from phytozome v7.0 (chr-ID chr1 4; pos 24127397 to 24128216)
ctttggctcagaggatccagaggcttcccgtgcaggttaccctcacccaactctgtttttgttttcatgccggcaatccattaatgtgaggtggggtagagaaaattttactgttctgtagtagcatgcagaggtgttgtgttgtgttgtggtgtgggttggagtgggattgccgggattgattttgtttgtgtactgtgatgtatttggaatcttggagggaatgttgaaaatctttttgcaaggaaaatgacaagtttcaaggcgtaatctgcaattgtttcttggcttgtctttctagagaagcagttgggcaattattgctttactctttttgcaaaattaggagggagtgtctttgtgggcagtcaaatctgaggaaattattgactaggagattgtattagctagcaatagttttttcttgatgggtatggctgtagttgaacttgagttgtcatctggggttggggttgtatctttatttatttgtttattttttcaattttaaaattttcattttttgttagtttggtgaataattgtgattccttccttgttttggatagaaaaaaattcaagaattttgattcaagaattttggtattcaggatcttcccatgcaaatggtgaagatagggagatttctcttgggctatatgcctgtaacctagagaagaaatttcacttgtgttgactgtctatgatatgatttacactattcttgaaaaccacgggcattttgactttcctgttacattgcgacactaatctggtgtacctgtgattttgacagattgggtcatctggaagttgcata

SEQ ID NO: 99545 - DNA, 710 bp, Vitis vinifera
  Intron number 1 from transcript GSVIVT01032845001 (locus G SVIVG01032845001) derived from phytozome v7.0 (chr-ID chr1 3; pos 305484 to 306193)
tcggaggagggttttgctctcagagagtggagaaggtaggtggatcttgattctgtttttcatttcagatctgtgtggcaattttgagaattcactagatatttcgccgctttatttattttggcaattagtttgaactgatttttaggtatagggtctgtttggttgatgaggtaacagaagagcaaaggaaaataggttcgaactttagatttttttttttccttctaagaaaacgaaattttcgatcattcaaataattgcaaaaagattagttcaattggttgtttgctttttggcaaatcaaaacaggggatattataagctttcattttgctttcttttttttcgtcccactgcaaccactcggccaatagtattagcgttttatgaaataggattcgaatctctgttggctcaacaggcccagttagttgaaattaaccgtggacgtttatagatctatccaactttaatactgtctaaatttctgtttgctaggtttagtgaagaagtgattgtgtagcagtgattttctgaatcaagtttcaattttcatttctaatttatttgtctatatgcatttcacacgtgagtgattccttttacatagaattaactaggattatcaccttattcctactccagcggcttcaactttgtgagttaagcattgataaaagatattgccattgtggcatgcagacaga

SEQ ID NO: 99546 - DNA, 993 bp, Vitis vinifera
  Intron number 2 from transcript GSVIVT01035738001 (locus G SVIVG01035738001) derived from phytozome v7.0 (chr-ID chr4 ; pos 3819594 to 3820586)
aaacaactcaagttcaagccccagtggtacgcacatttggactgctttttcttactcaagtcaatggttccttttcccccttacctgagtgtatcttaaatttgtgagcagtataagctacaggtttgtacatatccttgtattattgagtgtctgcaataggtcaggagtgatgtcaaaattttactttgatttttgaataaaataatgaggattgtagattgatgaagtgtacacttgtagtcacatgcctgtagtgagatattctcatgagttgattatcatgatcatagaatgctcatttgtgttcaagacccaacagtaaggaaaattttaaatttctttaaaataattctggttcaatttgttgctggctgttttcgcccagtatcatgctgaatagcaaaacatgctattcaggtatgggagaatgttattgaatctttattcactagaatgagtagagatgaagaaacaataaagtgcagcaggaagattggtttaatagagtatgagacatgatgcgcgggtatttggtatgatagttgcatgatttgtacttcattataaactcatacatgaagaacaagctagatgttgcaataatatctgatttgtccttacagttttagaaatttaaggagatatcttgagcaaaaaacttgagcattgttcatgtactaattcagatggagcctctggaatagaagcttctattctcagcatacttagattgggaatattgatatgttactcctgcttgcatatataaattaaacatgactacacaaacttaaatgaattatttatgtctaaattgatgggatggagacatgttgagttgagttgattctcatctaatcattcatttatatggtctgcttaagttaaatgttcctaaacttgtattttattattattcttgtggggattttattccttgtaaattagaaaaagcatcaaaattttgtttcattgatgtagttcccttcc

SEQ ID NO: 99547 - DNA, 611 bp, Vitis vinifera
  Intron number 1 from transcript GSVIVT01032095001 (locus G SVIVG01032095001) derived from phytozome v7.0 (chr-ID chr1 3; pos 22758123 to 22758733)
tcaagaaggtgagtaaactcctctgcaaacatcctattttttacaaaattgaatattatgtggatttttatgattcttgtgcatgcaaattaccaattttcttgtgtggaagaccagcatattgtccctaaatgttctgcatttctcagactagaagctcctttctcttagaatcaattgaaagagacccatattgagtttggtatttgtccattaacacactgaccatcatgtttctctcagaatgatgaattcttcacagtgagttcttttcaaataagcttaatgtagactattattttgttgttgatgttcttgagtttgtatcagaaattgccttgacagtagcgctccctgcatattagcctcttgagtagttttggaatctgtgtttgttggcatttctcaatgctagactctttgtttttggaaaatctaaagccttttgaattgttcatgtttagttccatgagaatttgataatcttcaggtgtcagttgattattctcattcttaggctcgttgttccattactgtcatggagtttagcttcactgaaaataatctgctttgcagcaaatacaaaactacttcacattcaaggctgtaag

SEQ ID NO: 99548 - DNA, 492 bp, Vitis vinifera
  Intron number 2 from transcript GSVIVT01032095001 (locus G SVIVG01032095001) derived from phytozome v7.0 (chr-ID chr1 3; pos 22758782 to 22759273)
gttctacaagtaagtggatcgttgtctttgcattttctgttcctgagaaatgttagaatccatttggtagtgattctatgaaacacttttaatatttataatacttaaaaaaatttattattaaagtgttagaaatgttaaaaacgctttttagaatcactcccaaacgcactgttctatttaataattgttttttaaaacacttttctatttttcattgaaatgggtgttgttagattccaattctcggtctttctcgtctgttttctcaccaacaatatgaacatccaaggctagaaaattttccggagaagaacatgagaatttagaactataattctagctgcttttacaatcatcttgatatcaaaatcaaaactcaagtttccaattatgggaaaatcaatcatttgacacttgactgtattaactctttcgggtcttgctttgttccctgtcatggcagcttcgtcgcagcaaataagcctggag

SEQ ID NO: 99549 - DNA, 433 bp, Vitis vinifera
  Intron number 2 from transcript GSVIVT01031742001 (locus G SVIVG01031742001) derived from phytozome v7.0 (chr-ID chr3 ; pos 3990490 to 3990922)
tctatattctcacccatcccgggattccatccatagtaatttcttacaccctatttcaactgcataaacaaaatcaacatagaaacatagatcagggcagtggaagtttagactgaatttgataagtgtttttgaaaataattctaaaaataaaaacaatttttgaaaccattttttgatatatatatatatatatatatatatatatatatatatatatatatatatatatatattaacaaatagtgtttttctcttttttgatcgtccgatatattttactttttttgtttgagaaataaaaaactgttttaaaaaatagacatgggtcttaatttttgtgtatctgcactcgaatactaataccaattgctaagaagttcaatgatgccactttttaaaatagttcaatgatttttcttgtggcagttct

SEQ ID NO: 99550 - DNA, 670 bp, Vitis vinifera
  Intron number 3 from transcript GSVIVT01032854001 (locus G SVIVG01032854001) derived from phytozome v7.0 (chr-ID chr1 3; pos 229875 to 230544)
tttttagttctcagactcagactcattcctggaaggtgagtttgccttttaccattctcaggatcatgtttggtcgctgaggaaactgaggttaatggaagaacaatgaaatgttgaaaatattatttgttatttcacgaaaaatttagtgaatgttttgtttgtttgagtcttaaacaatgaaatagctacctttggatcactgaaaagtgagggaaaagaccagggaaatgaaaaggaaagggaagaaaaagtaggggaaaataaaagttttaagtccaattttattttcattttacggaaacaaagacaaaaatttaatacctaaagtttaattttcagtatatttttgtttctattgacatcaaacgttaaaatcttaagacatttttctatatcttttgctctttccctataacttttcaagatttaaatggagtgtaagggaaccaaggtgataattgggccagaatggggtgaaacaccaaccccgatgaaggcataattcaatacaaagtctttggtgcaactcctgaagggtggagactttttcaacaggccagttgctaattacccttttctcgcatttttgaggcagccaaatggttgatgaatatctatttgtggtttgtgttttgtttgaccattaatggggcttccttttaggttt

SEQ ID NO: 99551 - DNA, 483 bp, Vitis vinifera
  Intron number 1 from transcript GSVIVT01033565001 (locus G SVIVG01033565001) derived from phytozome v7.0 (chr-ID chr8 ; pos 19718980 to 19719462)
aagggtttaacaagaatgtctagtttgagatcaaagaggtctttaatgaagaaaaactctggaggtgctgagatgaagaggaaactgaagaagtcgagatcaatcaagctcgcaggctttgagagcttgagactgccaacaggaagagcaaagaaccagtacgatcgaccttctattatttcagccggcgatgcagcaaccccgcgaaacctgtcttcaacaaactcttctgatttgaggaaggtgcattgtcaggcaagtcctcgtaattctggatctggttttagtagcaatggtcagaataggaagaattgggttattttgaacccaaattcgggctctggtcagaaaactttcatgaggaaatctagtttgagacctgtgaggattttaacaaaaatgtcgagtttgaaacccaggaggcctactgtgaggaaacacgatagagctacttgttcttccactcttaagaattccaatttc

SEQ ID NO: 99552 - DNA, 475 bp, Vitis vinifera
  Intron number 1 from transcript GSVIVT01033304001 (locus G SVIVG01033304001) derived from phytozome v7.0 (chr-ID chr8 ; pos 21669856 to 21670330 reverse strand)
cttattgggccggctttgtgagtccagaagaagtagtatgatgggcactcacttgcatcaaaaaacattggaacattttcgaaaatagttcccaaaaaaacaactttttagtaggggtttttaatatatttttaaattatttttaataataattaaaaatagaaaataaatattatttgtggattagaaatatatatatatatttttttcccaaatgaatcataatattatttatattattagaaaaaaaaaggaaaagaaaaaataatacaatttcccaaaaatattcttaaatacaaaaataaataggctcgtagcagtaagttgattcaaccaaattaatttttaaaatgaattaaacttgttaaattgtggataccaataggttattggtggtataattcaaacaaaaatttcaacggtaacaataagaagaagagctggaggaagaagagagaattgctctgctgattcg

SEQ ID NO: 99553 - DNA, 968 bp, Vitis vinifera
  Intron number 2 from transcript GSVIVT01032390001 (locus G SVIVG01032390001) derived from phytozome v7.0 (chr-ID chr1 4; pos 26905416 to 26906383)
atctctcatacctggtgctgctgctggtatctcttgtgagtagacatccactagctttcatcattgaaagtgtcagtttgaacttcataggacaattttctatcttaagacacaatgttcctatttctgcttctagagtggctccttatgccatagttttaggatttctaacctttttatgtttggcaggcaagtgttttgaccagatattttctgaatagaacattaaagaaacacttgaaatttctttttctaatcagaatagttttcatctaatgtggtgagaaaccaaagatatgcacatgtgtgaaatcctttatgaaatatcatttctttgggtaattctacaaagacaaaaaaaaaagtggagccaaagataatgtgtatttgcctcctgtgtgcatttattttgtattacttgttacatcatgatgtgagtagtatggaccttataatgctgatcataggccctactgaaaactcctatctgggtctcatgttttgcataccgacagcaatataatggagctttccttattgtccttgtttctctgatgtgaatgtggaaatgtagatattgcatcattggactggcttagttttgaattgtacatacattgccatgtgctcatattgtggtccaagaatgttgtggttagtaattctaaacaccgcgggtcacaaagaaaggaaaaaaagattggcaatgtcaaacttcttgttaggacaagcaaggaagaattgtacctatttttattggaagggggcataaggaatctagccaactgctctaaaaccatatacgtgtcagcgtgtgtgtttcccatttgtaattgaaatactttattattattcaacatctataaatacgaggataaacttgaattgtttttactctgttatttttctgtattcttttcttcatttaaaactttgtttctgctacactgacataattgcattcttag

SEQ ID NO: 99554 - DNA, 1040 bp, Vitis vinifera
  Intron number 1 from transcript GSVIVT01033934001 (locus G SVIVG01033934001) derived from phytozome v7.0 (chr-ID chr8 ; pos 16603791 to 16604830)
accaggaggctgcggttgagttggggaaggaactggtaacaatgggcttcttcttcttctttttattttttatttttttcttggttttttgttttcctttcgttccagtcttgaattagatggttggatgagcaatgggattgatgcttttcccttttttattaccctctttggtttggaaaatccggtgttgtttttgaagatatggattcaaaactaccctccaaacaggctcgtatgggtagccattgacgatttctgggactccatcacatcgttctttctttggtgtctaggaatagattcaatgagaagtattttcggagaaaaatgtcggttctgaattgggtgcaaattgacttcttctctctttcttccttaccttctcctcttaaaaagtaaggaaaaaatttggtttactgtaaacttttcttctcttctgcgtattcttcatgtggtttttctttgaaatgatcttgtatagtgttttgtcttccttctcaagtgggtgtggtggtggtgtgttgcaacaaaccagctttgaacgtgggcttatgattgttggggaattagggggaaggtttagggtttatgtttggcatgagagattgctagctgtaacctggctgtcagttgagcagccttcttgcatgatctttgttttggtttttaactcttttttttttttcttcttttttttttttgcccctcatgcttttccctagggaaccaaacgtgcttccttggtataatgactcactaagcgtgttctaaccttgggcacttccacaagccaccatcaccctaaaacctccatgatttttgtttatggggttccatgaaatatttttataccaaccattcactcacccactgcccccctctatcactgctagccttctaatcttatctcactccttattgtcatcattttcattttcattttcatttccttgtttcagtgatgaggtctctgacacgtgtgttgctttttcaatgtgtgtgtttttttaaggtggagagaaggattgatttggtct

SEQ ID NO: 99555 - DNA, 666 bp, Vitis vinifera
  Intron number 1 from transcript GSVIVT01035476001 (locus G SVIVG01035476001) derived from phytozome v7.0 (chr-ID chr4 ; pos 1578839 to 1579504)
ctgtttggcgttcggttctgtggtttccgacgacggtgagtgcttgcttggttgctgagaaagtgtaggaaacacggaaataatcttatgcttttgttttttgcaaatgttagattcttcataactataactattttttcttctgttttccttggttttctaggaaaccaggcagactatagccttctaatcctctgcgtcttctatttcggtctccattctttatagaatgttttgcggagttcgatatttttctaaaatatttcacttattatttattgattttccatttttttaatgtataaatctcaagcttctgcatgctacaagtaacaagcatgattaaagtactttttttttttttttgctttgaagtgagattcaaagtattttttatgcttttaaaagcagaagtacttaaatgcagaatctgaatcaccattggtggggtggatatctgtttctgctttgggttttagagtgtggttgagtttttgagactgaagtttagggtattgggtgagtaatgaagtagtagggtttttgaatcatatatagggtttgattttgggtgatttgatggtgtgttcacagtaacctaactattatttttttgttttgtttgtcaaaggggcgacactgttggagataaagaagtcatttagg

SEQ ID NO: 99556 - DNA, 209 bp, Vitis vinifera
  Intron number 2 from transcript GSVIVT01035476001 (locus G SVIVG01035476001) derived from phytozome v7.0 (chr-ID chr4 ; pos 1579599 to 1579807)
ttattgcactgtaagccatgtcctcctgctctcttttcttttcttttctttttttgtctttcttgtttgtattttaaaatgccatttaattttgtaagttttgtaatccatgtatgtgattaaattcttgtaagtttattgatattcaggttttgattttttattttttatttgcaaacattttagtaatctctcagggttgaatcttg

SEQ ID NO: 99557 - DNA, 615 bp, Vitis vinifera
  Intron number 2 from transcript GSVIVT01035302001 (locus G SVIVG01035302001) derived from phytozome v7.0 (chr-ID chr4 ; pos 192087 to 192701)
gcagacccagaagaactggtatgcttttggttgcttgtacattaagcagggtttctttccccccctttttttcttaatccaagctgtatttctcttcttctcaacaatgggcaaacttctttctcgttctaggtgtgttactggtttggattgataggatctcattaattgacttttattcatctttcttttctctctcctgtaattaatttgatactgctaatttttttggaacaaaaaatagcgaagtatgtcactgtgtggatcatagatgaagttaatttcaattaataacacaccctcttcgagcatgattttgattagagtacttttacctgataacacttttgtttagtagtagtttcattaaaaatgctttcagtgagaattgctagtacttgatcatataaacccaaaaagtgtttactaatgtttttggtgaggttttctaaaacaaaaaaaaaaaaagaagtaatttttggaagaatcagctgtctataagtgctttcaaaaatttgaaaacgcttaaaccctctcaaaataactcctaaatatgctctaagcacgcctgataattatcattttgatgcatatattagggtctctgtggacagc

SEQ ID NO: 99558 - DNA, 962 bp, Vitis vinifera
  Intron number 2 from transcript GSVIVT01031463001 (locus G SVIVG01031463001) derived from phytozome v7.0 (chr-ID chr6 ; pos 18272820 to 18273781 reverse strand)
ttcgctgtgagttgtagcttttcatttgattgttgtcttttttttcttttatgtgggatatgtttattgtgtttaatgtcgtatctggatatgcaatttggtgttgtgatatagattgaattgagcgcagatgggttgttgattgccatcctagattaccgttatgttttatttggttgctgagaaatcagggaaaagaaaagaaaaagggaaattggaactaatctatccatcgtttagatcagggaaatttttaataactaaataaaaacccaaacagttatttgtttagataggttcaggagtttgcattcatagggatagcacaaatttccattcctttttatgttatcccttgttcttggtggccaaatggaggatatttaagaaaagaaaatgacactcatttgaatgtgaatactgaggactcttacactttccccacaacaccaaatccattaatttatgggcgttttggaaaaatgaagtgtttaacataagctagaaattaagaaatcaatcaggttatctaaatgctcaagtttgtttattaggcaataagctctttttgatgcatctgactaggccacaaacgcatgcattgtatggtaacatcaaatttgtgaagttataggcagtcatctagagttgctggtacaaagtgtaaatattcttgaacctgcatatcataaattatctatagttgttttattattaatactacttacctttcattaaaatatcatgtcaaaagagggaaaataacttcatatgaaattaacttatcaatgggacaaggagtacattggtatataggggccagtgcaacagcatgagaccctaaagcaaagcattttagttcattgatttttgctgcagtccaaagtcttcatagtcttgaatgaaaattctgttacttgataagatttagtaaataactgaactagcaatgcaggtttgcc

SEQ ID NO: 99559 - DNA, 249 bp, Vitis vinifera
  Intron number 1 from transcript GSVIVT01037791001 (locus G SVIVG01037791001) derived from phytozome v7.0 (chr-ID chr3 ; pos 7955259 to 7955507 reverse strand)
tttcctggaaagcttcccttcaaacttgaaactgggtgagttcaaatcattttcactcttctatgcctcatttgtttgtccacttttatgcttggtaaattttgaagagttacaacaaattaattgatatgatagcttaaaaatataaataaataaataaaaaattgctcccagattttcagtttttatttttttgtccaatttgatgttgggtttctgtatgcagatacattagtgtgggagacgtgg

SEQ ID NO: 99560 - DNA, 533 bp, Vitis vinifera
  Intron number 1 from transcript GSVIVT01035976001 (locus G SVIVG01035976001) derived from phytozome v7.0 (chr-ID chr4 ; pos 6686945 to 6687477)
aaagtctattgcaggattacttggaattacaaaaggtgagggcttttatttatttatttttttttgtgggtttgcttttcttctcttttaatcgaagatctagggtttcgaatttcgtgtttgttgattttttcttggattgttttttttttttttgtttaatgtttctgtgaaaccccatttagctaatctttctttgatttgattttatgcccttggcatgtattgattttatagtagttaaaggttttctgacaaaaaaactcagaaaattaccttctgtttggctggtgagaaaacttgggaaaaaaatgaaactagaaaatggaattccgtttacgttttgaaattcaaaattatactttatttttctgtatttttcctactttctcacgaccaataaaaagaatataaggtttttgatatttgatgaggttttgattaatttgatcatcctccattggtcttcaattgggttttatgccaatcttcttataggaatttgtggcaaagaagaggaaactactggcagc

SEQ ID NO: 99561 - DNA, 830 bp, Vitis vinifera
  Intron number 1 from transcript GSVIVT01037258001 (locus G SVIVG01037258001) derived from phytozome v7.0 (chr-ID chr6 ; pos 16865154 to 16865983)
gagtgacggccggcagcgcgttggaggaactgttggtaatatcaacttctttcaaacctttcataatctccactattttctctattgtaattttttttaatgctgtgtttggtctccgggaaatcttaggaatggggaaaaagtgttattttttcctcttccaagttttcgtttcttttcctcaaccgttgtcagcaaccaaacaaactgttaggtttaaatatgtgtatgtgaactgaacgaaccttaaacgtagatgatcgttcggttggtcatgtggagccttttttttaattttttcaatctttttttatgggttttgagagattaaaatctatgcaaaattgtcttcaaaagcaatgaaactagttttggaggctaatttggactttccaaggaatgctgttagttttctactcttaaagtcactgacaagatgtaatgtggagcatttttcagtaaaatatgacatctgagctttaataaatgaagaaatattgctaattgatgatgaaatcctgctgtgtcctctgtgagattatcaattggtgtagtttgtgaggtcttaagtccaggtattgcctcatccaggagtttatgctagttaaggtgttgatgagctgacattttggttgtggggtcttgctttgatgtctgtctccttaagaacattgtgttgatttgtggtacatatacaagttataccgcctcttctaattggtggtgtttacaaaagtagttgtgcaaaaatggaattggtaaaatcatatgttcttatatcatctatttttgtagggaacttggtgtgagtgaacactgtgtttggaagt

SEQ ID NO: 99562 - DNA, 1026 bp, Vitis vinifera
  Intron number 1 from transcript GSVIVT01032197001 (locus G SVIVG01032197001) derived from phytozome v7.0 (chr-ID chr1 3; pos 21622102 to 21623127 reverse strand)
gagtgtggtgttgggatcttcactaaggtttgcgctttttgaattcagaatcagatcataatctatgtaaaagttattgttcttagattcaattgcttttttggagtttgcatttcaagaagcttttcttcagaaattgaaaaagatagtctgttgtgcaggaagtaaaaaaagttgggtgattgattgaaatagaacctttgcttcactgtttttccatatatctctttttttgggtcaattttgtttctggagaaaatgaggaatttttcattttccgtcacattttttaatagaaaatgaggagtttgaaaattatgaattttcagaatattcttcgtttttttttttttttttttttctgttttcattttacaatgcgtccaaacaagaatttttttcccctgtttttccttgtttctgacatcgaaatggaatcttaaaaagattaatagaaagcaaagctgggagaattgtttgaaaaacagaggagaagagaatcttccttgaaggggatgagaatagggaacagagtttctgagagaattgcttaataaacttaactttcatcccacaaaaacttttcttcttagaaatgcatatcatttttttatttttacgtagaatgcattggaacttagggtgattactgtcaggatgcataagactttgggctcttgaatgcacttaaactctatggttattttgaatctcatttttggaaacaaaaataagaaacatgtcaatttttaggtagtttactattgaaaaaccacaaattttgaaatatggaaaacaaaaggtttctcattgtttaccatagttaaacaacacaaagtttgactactttaatgactcagaacttcttaagccattcacaaccatgagcagagttttgtactgttttgagtattcatgtagcacaaaatttgttgctttccttgtattttatgatgaatgtgttactcatggatataattttactttctagactgctgcagagttggaacggcgaagagaaaagtt

SEQ ID NO: 99563 - DNA, 781 bp, Vitis vinifera
  Intron number 1 from transcript GSVIVT01031686001 (locus G SVIVG01031686001) derived from phytozome v7.0 (chr-ID chr5 ; pos 20191287 to 20192067)
gaagaaacagagggaagacgaagaagaagatagaggttggtttttcgcagccgaccttcagtatttctatatttttctcatatcagattcagactaagtggaaacaaagtgtgtgcactttgtttttcctaaaaccttttttttttttcagaattaatttatgcctctttactcgattattctctcttactcagttttcatcgggatgtaatttttcttcgttttaaggattttgggtctgtttggtttctgagaaagtctttaggaagtgagtttctttttattagcaattttgggtattttgtttctgtggtttgaaatttggaatgtggagatacgaaaattcaaaatatctttagttgtatgaatctcattttgattttatttaggagaaatgcccttctttgataatgtatgtcatgtcctgtgcattcagtttggtcttacgaagtgaaaaagaaaaaaaataaattatgaaattgacttcaccattgaattgaatgctatgaataatcgtagatggatcatgctctttatctactgtgattatggagttgtgatttttattttttttttggaaatgttttgttactataatcaacaatttgtggggtgtactttatttgtaatatctgggttcttcagttaacgaggaaaaacagcctcagacatacaagagattgaagaggactgaggtaatcaaatgcctaaaactgaattgcttaaatgtttttggtgttttgcagtgtactaaggtgcgcttgtgaaacagcaaaggtat

SEQ ID NO: 99564 - DNA, 746 bp, Vitis vinifera
  Intron number 1 from transcript GSVIVT01033396001 (locus G SVIVG01033396001) derived from phytozome v7.0 (chr-ID chr8 ; pos 20973869 to 20974614 reverse strand)
ctggtgcacattcaattggtacgctttaatggaacgtgggttctcttttatctcttctttctcggtccgtttcttgacgtgttagcccattttcattgatgggttttagttttttgtggctcttctgtggtgtgttctccgggaaactggatttatcctccgagttgggtgtgttttattgatgatcagggttttaggggttttggtaagtttgatggggttgtcgaatttgagttcggatttcgttgaaaccgtcggatttggtatttcatttatcgtcttgactgtgaaattgagaattgaatgataatgacgatctggatcgccaaataaagggttgtcatttgtttgtggttttgaggggttttggacttgactgtaaaatctgattgcgaacagggtggatttcattgaattatcagcggaattatcttcccaccgtcatcaatgaaatgggattttgttttaatatcgcagtttgggaatagacatttatctttcggatgtttgttgcatagaaatagaatttggctatctaaggaagagaattctagtcatacggttttatataaattttttgtttttataaattctgaaagctccattgttttatagaaatcctcagtttttataaattctgattgatggtttgtattggctcagaccaaaatttgcattttatatttgcttgaatgatgcttacatttgttgtggacattgattacagagactagattatctcttaa

SEQ ID NO: 99565 - DNA, 559 bp, Vitis vinifera
  Intron number 2 from transcript GSVIVT01036936001 (locus G SVIVG01036936001) derived from phytozome v7.0 (chr-ID chr2 ; pos 17334817 to 17335375)
aatcaaagcaaagctctaagtcctggtatggtggcatcttttgtttgtcttaatttctcatttttgttttcctggtcattaatagattgaagtattgaaaaagattatgaacccatgtcttatcctgatatttcaagatgaggcctggttcttccaagtttgaaaccttatgtcaagtttggttggaagtcactattctactaatccaaagtttccattgcaaggatttgattttttcaaacttggttagaagtcatctttcaactaatctttcttaaaagatcttatattttggtgctcaaccttatgatatacgtctacttgtcttatggtttccttctattttgaaccattcttcattttcttgttgtttaaaaataagtagctccagatggcattgcttgcttagcctgatggaaatcaagcaagaggatttgacatgactattatttggatattgtgtgtttgtgtgtgtgctattttaagaaatgatgatatgtaaaattttgcttaatggcatgcaggtgaggcgcttttaagctttaggaattcaattgtt

SEQ ID NO: 99566 - DNA, 983 bp, Vitis vinifera
  Intron number 1 from transcript GSVIVT01032777001 (locus G SVIVG01032777001) derived from phytozome v7.0 (chr-ID chr1 3; pos 832847 to 833829 reverse strand)
actgcattggaggaatcattgggtgagctgttatttttaaatttaaattaattttttaattgaattgttgttttgagtcttggaatagtcgttgcactcttcaaaagtaattcactaactatagaagcataataagaaaattgaattggtcttttgttgacaatttggtggttctatatactctgtcttcagtcttgatgaatgtgtagcatcgccaatggaatggaaaatgaactgcataaaaattttgaactccattgctaggaatgggcagaattgtcatggaaaggaatcatagtgatggaatttggatgaactaaaatttaacacacaagacctgttttactgtcctatcttgcctaggtttgctggtggaccatctgtcctattgtaattttttgccaatgctgattggagaatgacctggattatctaaactgctcttgacaggaaagaacgacggggattatatgtaattggaaactcaaaacttaggggcctgagcacattacaaatgcttgcatagcattttagttgccttttaaaaatggtgaaaattgtgctattgtaatcattgtccagtaatttattacactatatcattctattattatcacttctattccatctattgtttaggtccttacattgttctgaaagtaagaattcactgtatggtaggggattcattatagttcttgtcttagagcatctggtttgacatgagaacaaggactgaagcgtggcgccaatagtagcctaagcatcattaaaatttaaagaactatctggtttgttgtgcaaacttgttttgttttcattgaatttgttggaagactctgaaactatttcaattattagaggtctagcttttcgaatttctgatagcatatgaagatgaaaatgtaataaatgttcatagtagctcaaagaaaatgttggttgcagatatcagattgtggtattagagcttcttacccaat

SEQ ID NO: 99567 - DNA, 305 bp, Vitis vinifera
  Intron number 4 from transcript GSVIVT01032766001 (locus G SVIVG01032766001) derived from phytozome v7.0 (chr-ID chr1 3; pos 934702 to 935006 reverse strand)
actcaggtggagtagtgatcatctacgagcgaaaagtgaagctcctctatggcaagctttgattcctttcattattttttcattcattaattttcttctgttttcctgttcaaaatcttaattacagtccaaatcactgcatctgatcgtcgtttttgctactctgctcttgttatcagatgatgttacgcgccttatggtagttacacttacatcaactcttcatcaaccacaagccactctcgatcccctctgtttctcctactttcaatttcacttttataaatagcgttattatatagttg

SEQ ID NO: 99568 - DNA, 653 bp, Vitis vinifera
  Intron number 1 from transcript GSVIVT01031416001 (locus G SVIVG01031416001) derived from phytozome v7.0 (chr-ID chr6 ; pos 18844511 to 18845163)
actggtaatctctctcttcctctctctctctctctcgctcttttctctgttttttgttggggtaggatgattttagtttacttttgatcttcggccttcagatcacaagttttgccccctgactgatacgtggatggggtctcaaattttgatcttttgttgaaccatttggattggagaattgggtttcatttggaatttcacttttgtgtggagttcaaaattcctgcctttactgtggaattgttttctgcggtccatggtttttaaattgagttctaaatccattgttatatagagcaatccatttggaattgacgcctccaattccagcaacaaaacacactgttataatcttctaatgaacctgcaacaaaagtgtatagttattggaattatgttcttctgtttgttcagtttcatgaaacaatatgcatgctctgtaatttgaaaaacttggaagaagaagaagaagatatttttagttaattaaatggtctttaatttggcaagtatatccagatgatgttcttaattatttttatggtttttaatttttatggctatattatttattttggattcaagaagatttggttgatctgattttctttatgggtgtgacaggttttgtactgcaagtttgccaagtg

SEQ ID NO: 99569 - DNA, 873 bp, Vitis vinifera
  Intron number 2 from transcript GSVIVT01034110001 (locus G SVIVG01034110001) derived from phytozome v7.0 (chr-ID chr8 ; pos 15092465 to 15093337 reverse strand)
gcagtcttttggagacttaagcaccagaacccaatgtaagttgtttctaactcacttcttaggcatatgtattggaatagcagtgtgttccaacaaattttggcatcttatagcgaacattgttgcatctattattgaatttacgcaatttttctgcatgctcttggagtttaataatgttgtttagtaacactagagattacatccactcatctagtgaggttatattggtattattttttattctcctattgcctgaattcatttcctagatttggaaatgtatttggcttcttcataactggatcatgcaattttggaattgttggtcttgagttatgtgaaacagatgcaagaatctctgtagtctaaatcaaaagaaaaaagagaaaaacatgttgtcagatgaaaattaggatggaatactggcttgagttttccatgtgatatccacttatttagattttggcctttgacttatgcatccacaattttctgcctaagacacataagattgaggttgttggtgatgtggctctcctagcaataagttggaaaaaggaatcattataggcttaaagttatttctctaccagctttggtcattgttacacattgtccgggggcccaaccttttggtggatgggatataggtgtagtaaagagttgtcgtataggagatctttaggtagctttttgtattcaaattccttttaaacaactgcttttcttattatgaatgtgaggaaattagtatgtttgaaatgtggttgtggttactggacactgggacagtattttgaatacaatctgtgctgttgttatgcaggtttgatataaatttctgtgattttgttttttcaggcttttgac

SEQ ID NO: 99570 - DNA, 757 bp, Vitis vinifera
  Intron number 4 from transcript GSVIVT01036804001 (locus G SVIVG01036804001) derived from phytozome v7.0 (chr-ID chr1 9; pos 22323790 to 22324546 reverse strand)
gctgggagaagcggcttgatttgaaggtgagtttgtttgtttttttttgggagaattgtggtttcgttgcttttctcgggaaaattttaggttttctattttaggtatgtttggtgttgggaaattgagagaaaagagaataacagaggaggggaagtttgaagcttgcttcaataagttcttgcgaattttgactggtgtaattttttccaattttcgtttttttccgacgcttttctcaataaagaacggaatatggagacaaaattttccttacaactgataatcttaacttttctcgggcaataattttttaccgggaaacaaacggaaactgtaatccactgaaaaagtgatttttatttttatttttcctatttttgctcatctatatcaactgaattatatgactgctacggatactttgttgatttttcgatttgaaggaacttgtttattattttgaatgattcttctgcttggaaattcggtttcccttaagcctccgtttggttgctgagaaagccgagaggaaaagaaaaaaaaagcatctatttatccaaacagtacctctttttctttttcgtaataattaaaaatttccctttttgatttcatatttcgaaatattaattaattccattatcacacaaatttgcaattttcatggaatttttacttttaattttatttcttttcagattgttaattttatttatttttgctatgtgcagtcagggaaagtctatctccagag

SEQ ID NO: 99571 - DNA, 766 bp, Vitis vinifera
  Intron number 1 from transcript GSVIVT01036258001 (locus G SVIVG01036258001) derived from phytozome v7.0 (chr-ID chr1 4; pos 7934630 to 7935395 reverse strand)
gccgaggaacatcttcgcgaggcttctccggtcaggtcagctcctgatttctagagttttattaatatatattcgttttctttgatttataatctttggaagagctgtatccgtttcgttggtgctttttggtgttagaagaactgctgctgaagcacaaaacatgcatgttccttgttggtttagggttttttttttagttgtgttggaaaatcgacagtgttcgtgcattgagtcagattttttcccttatatgttatgggtatttcctttcaaaaattgggacctccaaaaggcaataggaaaatctagtactactcttaggggttgtttgttttgtttgttttggaaatgatttctgaaatttgatgaatttataatgactgaaaatgggaaatagttcatgaattcctaatttatccacacgatcatgtgctattttctttccctaactttgtcttctcccctctgaaaagagaatggagggaacaaaaagactataaaatgctgaatcttatatcttttattatcttggtttatgaagagttgtaattatcatgttaagacagagagttccaatatgtttaattgaattgaggtttttgtttcctcaggtcccaggtgataattctttccattttatccatcttcaagcaactgaattatgtattagttatttcaatattctcctctgattaaaatgattgattttgattaatttaccttttctgtaatttgtcactgtggcactgtctatctaggagag

SEQ ID NO: 99572 - DNA, 833 bp, Vitis vinifera
  Intron number 1 from transcript GSVIVT01032797001 (locus G SVIVG01032797001) derived from phytozome v7.0 (chr-ID chr1 3; pos 710969 to 711801 reverse strand)
aactgttcatcagagggaatcggtaattctttctacaatttcagacgttggattggttggtaataaaatcgaggaaaggaaagaaatttttgagtttgatgtctgcatttttttgattttaaggttaattgagtaacagattcttgtttttggattgtgagggaaatgatccttctccaattttaagaatttgaaaatgtatattcattttggtattccttcccccccccttcattttctaggacttatcaaggttcacttgttgtgaaagtgttaccatttgtcataaattgaacagcaaaagaaaggacaattgaagataaaaagaatgggctcaataaatttttttggatccttcttcattttattgtccttttaaatacaaaataaagaatttaaaatgtacgagtttatcatgatcttggttatatattacttttctttgtattttccatggcaccaaaacaagagattttgagatttcccccccctctcaattacttgccgaattccaaacagaaggattgcagccaaaaggagggacacattttttggcagtatattcgagttcaatttacccatttgtataaaataggatgtttttgtttctgatattggaacttcataggatatttaatattggtgatagaatgttcacttcaaaattcaaggattgggttttattatttttctgtgctcatcatgtattcagatctgcattgtgtatttgctaccatgggtcatttagttggctaatgagcaaatcaccagtataatggttcacaaaattcttttatctttcattattcactgtgcatttgcaacaggataat

SEQ ID NO: 99573 - DNA, 916 bp, Vitis vinifera
  Intron number 1 from transcript GSVIVT01033496001 (locus G SVIVG01033496001) derived from phytozome v7.0 (chr-ID chr8 ; pos 20244800 to 20245715)
agtgagcgcttttgaagttttcgttacttttttgttcgcttcttgctttattcaaatgtttattgtagtctatatttgttgtcattgaaacttaatcaattcatatttgagagcttttaggcgagtcctttactttgtggaggtttacacaaattatttctttgtttgttctatatacgttgctttgtgagcatgtgggtttttttatcactcgaatacgattttttaaagaagtgtttgtggtgttctcgattagttgaattgtacgtgtttgtgttcttgattttatttattactgacccttataggattctattgacggagtcattttatcttgtaatcattttgagtaaaagccttttttcccttttgtttaattgagttttttcttagtatatatttgttgctaatttgaattagttctgtcttcttatgacggaaacaagtgaatttgtgtttgttttcttgtcttgttgtgtaatgtataaaatgtaatgctgtgagcctgagattgtgactgaatttattgttggaatagagtggaagggattaattgattggactgtatttgattgtacagacttggacttgattttggaatttcaattatgtggaattagaaaaaagaaaaaacttgcttttggtttgaagttgtattttgtagattcagaatatatagaatttttattcaatttcaaatccataagtaaataagcaaaagaaccatggacgaggacttggggcaacagatttcaattctaaggctccatttttatgtatacactattaaatatttaaagtgcacgacatttgtatttgtttcttatttcctgtttgtgcagtggtggtaatttatgaaagttatggaagttttacataaagcatatttattttcttacagggcttgctcgagaaa

SEQ ID NO: 99574 - DNA, 554 bp, Vitis vinifera
  Intron number 2 from transcript GSVIVT01033430001 (locus G SVIVG01033430001) derived from phytozome v7.0 (chr-ID chr8 ; pos 20754708 to 20755261)
aattacctaggtttgcaaataagatcactttgaaggtttgcgctcttctacttttcaaattaaggctctgctgagttaagtagtgaaaaattgaggagttgatcttcatatgttttatgtttccgagctgctcattttgctttgattcctttgatttcatttatgttaataatttaaatatgggtctataaatacttataatttctgataattgatctaattctaagtcagttttttttttctttactccttttccctgaaaagagagggaatgaaaatagcatagaaatatgtttggtgataagatatatggatttcaagcaccaatttcgtaaatgggaacattttatggattgataatgaacatgtttattattttcattttaaaaatcgtttgtgaaaaaaatcatttttatttctgctaccaaacaaagtcttgttcctctctcacttgctttgtgtagtaattctttacaagttcttctgccatctcagtgttattaatgttctaaaacttcctgttcttttattgtactcagaatatatctcccgga

SEQ ID NO: 99575 - DNA, 789 bp, Vitis vinifera
  Intron number 2 from transcript GSVIVT01036765001 (locus G SVIVG01036765001) derived from phytozome v7.0 (chr-ID chr1 9; pos 22831421 to 22832209)
tttcggtagatctctcagtactgggtactcttcctatctttatccccaattcaatcaatcaatttctagtttcgatgtaatcgtttggatgctgagaaaataacgagaaaatgaaagaaagtttttgaatcgttaaattttcatcatctagggcttcacctagatctcatatgactttggcctagctgatttgagttgtttaatttttaatttgttttttctgtttgtttgctttgatttctggtaacaaagaaagtgctgagagataacatggtaatcaaaaaaaatttttagatactttgttctttcattttctagttaaccaaacacagagtcggatttcttgcttatttgaatcgagtttctttccccttttttatttttatttatttatttatttatttatttttttacctctatttgaatactttcatattcaaaatatcttttcgactccatttcttaactatgctgagcaaccaacctaatgggaatggatcatgtttctggtattttccttaggttgaaatgatttagtctctatgtttgtcaattaaaatacccaaattgtaatgttgtttctcattggatctttgataaatatattttctttgatgtaaaagaacatttttatgatttgtggagacgagtgatagcatcattgtgttgaaatattaagtcatggcatgtggccgggcttcttgatattgtaattgaaattaaatatttatccttattttttctttatatttttcaatttaggttcacttcttacaagtgagaagtaca

SEQ ID NO: 99576 - DNA, 818 bp, Vitis vinifera
  Intron number 3 from transcript GSVIVT01031993001 (locus G SVIVG01031993001) derived from phytozome v7.0 (chr-ID chr1 3; pos 23697380 to 23698197 reverse strand)
aggtaaacatcaataactttatgccaatgtatttttaaatttgggaacatttggaaaactacagttccaaaagcaacatttttatgtgaggtattttatggtattaaatttatagaattttttagtatctaaactctcttctggttcagcatccagcactgattgagggcccctataaaaaaagtcagtctattttgcactaacccagtggacaaccttcaaaaggtgagcagattgacacatttctttgttatgtagttggtacacatgtttctattgttcttgttttggattttcttggtcttgactatgaccaaatgatcatttgcaaatttggcattgccatgcgtacatacacttctgtctgtgactataagcattggttctcatttttcatttgagcaggagccaattgtttattcataaagaacattaaaaagtccaagtctgaatgaaggtctataccgcaaaattcccacgacgaatattgtaattaaattgtcttgactataagacttttgcggttctgttttttattttgatgttgttatcatcttaaagtagttgagtacaattctctcattgaactttttgatattgtatagaaatgatgattttgagcttattccccatcttcatgctttagaaaatttactcttctacattatgagctaattcaccagctcttatgaagaagaagagttcgttgttgactatattaaatattctccggatttattcttctgaactttttatgatacaaggtttgttctcaatctcaagaaagttcgttttgagagtatacttgacttttagtc

SEQ ID NO: 99577 - DNA, 372 bp, Vitis vinifera
  Intron number 1 from transcript GSVIVT01032027001 (locus G SVIVG01032027001) derived from phytozome v7.0 (chr-ID chr1 3; pos 23401453 to 23401824 reverse strand)
aaaggtaaagaagaagaacactgaacagcacatctttcctttgatttttttttctttcaaccataattttaagtttgtttgattcaagcatctattaccattttgattcaatttatcaaacacccgttttcaatgccttcatagttagtaccattttttggtttagtttcatgattgtttgtcattttggctcaatgaatccaattatttcattgtggttcaatccacaaaatgcccatttttgcattatagctaatctcaattaactctgttcagttctttgactgtttcatagatgtgattgcttatttggtttttccccttttgttcttttgttgtttgggttgtagtgaattttctgatatatttgat

SEQ ID NO: 99578 - DNA, 744 bp, Vitis vinifera
  Intron number 2 from transcript GSVIVT01032464001 (locus G SVIVG01032464001) derived from phytozome v7.0 (chr-ID chr1 4; pos 27693713 to 27694456)
gtgatacacagtaaggattttgtttcttttcgaaacttagaatcaatgattgttttgcattttatttgatttataaactgtaagtgattattagtatgtgtcattgcgagatattgtgatgctgattgaagtgatttattctatgtaatgtcattgaagctaaaaaaaaaacatgatttgatatttagttgcccccaaattaatactttgcttaattcttgatttaaattgagctattactgacagatggagaagtggttacaacccaagtaagggtttgataggtggaatttgggtccttcatgacttgcttagcttattatggtttattgaagtggtatcgcggctttactccaaatattgataatgttatctgtactgtctcactgtaatcttactttgtcttttgtttataaatatataacatgctcaatgaaacattctttctaatgcgtttcagctactgctttgtttcctgtgtccttgtggtacacgtagaagtgagtgacagcacgaataggctaggtttggatgatgcattatatgctatatgtgtatttttctgccctttctttttctttagttacagagactttcatgttctgaatcctaacttagaattcttacaatcactttatgtttttttttttcaatcagaaaaatcactttatgttttaactgttgaaagttggttctgttcattactttcatttttattttttagtttttggtttcctcaggaag

SEQ ID NO: 99579 - DNA, 433 bp, Vitis vinifera
  Intron number 2 from transcript GSVIVT01031336001 (locus G SVIVG01031336001) derived from phytozome v7.0 (chr-ID chr1 4; pos 276984 to 277416)
tcatcaccaagtgataatccactctctggtaaatatcatctctcttgcatatttttgcatattacacccacaattcaatttttgtacatgtgccacgtacatcctgccgactaactcgttgaattatttacagaaacgtgtacaattgttttactttgaacttttttttttaatacagaaaatgatatagaaaatttgagtcctacttgatttgaccttcaccatccaatgcttatattcaaatttttgaatcagatctaataattgaggggttcggaccattacaaacagtggcatctgatggccatatataaagatagaagattgaataattttattttaaaatgggttatggctcttttctttgtctgtcacattttattaagatatggcgatgattaccggtattaactttgtggcaggtggtggggga

SEQ ID NO: 99580 - DNA, 1030 bp, Vitis vinifera
  Intron number 1 from transcript GSVIVT01035650001 (locus G SVIVG01035650001) derived from phytozome v7.0 (chr-ID chr4 ; pos 2990067 to 2991096)
gggatattgggcgccatctctaaggtcagtagtactcatgatcctattgatcaattttttggttaatttaatttaattgcgtgaatgaggcttgattattttccggataccctttttgaaatctaatggattcccattttcatttgtgatggagaacccactagccttgatgatatgctaaatggacacttaaaaactgtgatatgatgttctctttctcttgttaaatacgttaactcaagggcacttgagtcctatatttgtatcattgtgtattatagctcttacaacacaatgctcttgagtcttgaaaacaaaagaagttattatttctgatttatcgatatcgatatatttctgtatataacttgcactagaagaaatatataaataaaaatatagctaaaagcctaaaatagacatgtaaaggttactcaatattggattatgaatttttatttactatttttttatatgtttattgtttaatcaagcccttaagagtttctaaaaatattattatctttatgtatttagtgtatttatttgtacatcggcccaaattgggaccatatgatttcattatttaagcaaggttattgattcattaaatatttatttatcaaaattttactaatttccttatgcaaaaagtatcgtcaatcaaattgtactactctatacctaagtattatttatttgtatccttatattatgattctatttgtttgtaaccttaaaactcatcgagcatattcaccggtcaagatgagaagttcaatggatatccattgggttgtaacttaatattttacccctcattatgtcttccataaaattagcttaaagctataaattctcatttcaaggattaattaagacaatggatttctcaattttccatccttaatactttttatttttttggttacaaatttttttcttttgcatacattgaatccaattaaatatgaaaatgaatcactacatactaggtgaaattgtcactggagccaggattcaaaagaag

SEQ ID NO: 99581 - DNA, 858 bp, Vitis vinifera
  Intron number 1 from transcript GSVIVT01034980001 (locus G SVIVG01034980001) derived from phytozome v7.0 (chr-ID chr5 ; pos 659540 to 660397)
tcatccatgtaagttctgcaaccaacactcacatatacattcatatttctatcatacttcattctcctcctcctcctcttcttccattaatcggttcgcatcatattcatatttcaaacaagcatcttgtttttccatcatgatcatcatgatcatggtcatcaacataatctttgttattactaggggagattcatataaaatcacaagtcacatatcaaaggacagagaagagcatgttttgttaatattctgcagagtataatattcaggtaagcactcttttaccttttaatatggcttttacaaatactaaggtgttaaaggtgtcatgtagaatccatggaagttgtaagcagtgggttaagatcctctcccatgagcctatgaattggagaggattctaactcctagacagtaactctcaattgaaatacctgaagatttcctaaaaaatttcccattaaattttttgatctggactttctttcttcatttatatttttttctatcttacctcattatatatgtatatttgatttataagctttgtgtatattcactaaaatcattttgactattttctgtatacaaccattcaaggaaataaattaagggattttcaggacctctcctttatattaaaagttataacaaggttagcatagatttcggggtagtgacatgggcctgggctggcatgcccatatccaattatccatcactagcattttggataatgtaaatgtgaatataaacatattggctgggccctatacaggaccatcacatttacaaaacccacctttttattctctgttttaccttggctcttcatcttgcaacaggctctggagt

SEQ ID NO: 99582 - DNA, 177 bp, Vitis vinifera
  Intron number 2 from transcript GSVIVT01033962001 (locus G SVIVG01033962001) derived from phytozome v7.0 (chr-ID chr8 ; pos 16265286 to 16265462 reverse strand)
accccgcttgctgaacggcttggctttctgaccgagtaagccaatgtttgattttcaattatttagttttatagcttttcgttttctgttcacataaattgatctaacattgttttttctttcttctcgtgacaaattgaaggcaaatagcatattatactggtccaacaggtaaat

SEQ ID NO: 99583 - DNA, 538 bp, Vitis vinifera
  Intron number 3 from transcript GSVIVT01032566001 (locus G SVIVG01032566001) derived from phytozome v7.0 (chr-ID chr1 4; pos 28409001 to 28409538)
caaagccaccgaggacaactcataaattgcttcaggtattgccttttattttttttttatggatattggtgaaaagaaacaacgtttgtgacattaatgcaagaatatcagagctataatggctactgttgatttttgatttctaatgaaagttcaatcacaatgataacaagcaagagaaggattagtgggaatctcaaaatacagggtaggttttgaagctaatgcactagtcatttgacccatagttaacaaaattaacatagtatgatgatccatctagaaagacctagctttaatgtctaattatgagttacttactgttattccaaaatgtgaagatatatgttatacatagtcaactgtatttaggtttacattgcttgaagattcacttgaagaagagaaattcatcatggttctatctcgctccattttttctagataattggtgtttctttctcttaaaaatgccatacctatcatcgtattgaccattgtaggtgcttggaggaaaggctcgaagaaagaagttgct

SEQ ID NO: 99584 - DNA, 801 bp, Vitis vinifera
  Intron number 1 from transcript GSVIVT01036128001 (locus G SVIVG01036128001) derived from phytozome v7.0 (chr-ID chr6 ; pos 20359612 to 20360412)
ctcaacacgtggaagaggtaattgtgctccacttggctgcattaatggcaataaaagaagtgaaagacaagtgtcattgctaattgaagaatatttttcaactatttttttgtttaagttgaaatatacttccattgtgatctcttagcattaacatttcatcttttgcggtccccacattttcttatttgttgagcggagatgtgtcaaagtgaaagcccctgggattattgaatgttatgtgttttactgtatactggggcttatggtaaatactagtgataattaaaggcaaattctattttgggttagttattctgttgtttatattctttgattttgaaatgaaaacacaagtaccctttgttttgatttgaaactgatacagatcctatctggttcctctagaaagcagttccttgtagtcctggtttgaactaggattcttgttgattttggtttaactatggacttctggttgctgatgtttgtcatttgttcttggcaatgtgctttttcttttccttgtattttaatattcttttaagaagaagaaatttaaagcccaatttcacttcactttacaattttaagttttcaacttgatacttgatctaaattaggtgcattttgcaacttaaatgcacttcttaacctatttttcatatagcatgcccgtacctttattccagcttaagattttaattgagtcttatttatttattttttgcattagtttgttctttccttaaggttgtttgttaaattaaattacaggcagaaaagataggcttggaatac

SEQ ID NO: 99585 - DNA, 524 bp, Vitis vinifera
  Intron number 2 from transcript GSVIVT01035808001 (locus G SVIVG01035808001) derived from phytozome v7.0 (chr-ID chr4 ; pos 4549376 to 4549899 reverse strand)
tttatcaacacaatttcggtcaccgcccttgccaggttttcttctctttccacttcaactcctattcgcaatatgcagaaaaaccctttttctttagatttttcagaatttggcattcacctcactctacttcctactctttggtttaaattttaattgtgcttagaatcaaaccaacataaatataaacctttttttccttctttttccttatgtttctcagtagcaattaaatggaggaatactgctttccacccgaaagtaggcagcttattattattattattatttatttatttatttatttataatttattttttgcttttgggctgttcatgaaaatggaaaatcctaattgcccatttttcaaatttttggtatttggcttttgagctgctcaaaaataagaaaatcagaggtacccatttcaaaaatttgacatttggcttataagatgcttaaaatggacttttttttttgggtcctagggtaacatccagagccttactgctgctgatcttga

SEQ ID NO: 99586 - DNA, 939 bp, Vitis vinifera
  Intron number 1 from transcript GSVIVT01037194001 (locus G SVIVG01037194001) derived from phytozome v7.0 (chr-ID chr1 8; pos 28113820 to 28114758)
agaattttgggttttcggaggtgggtaatctttgaattgttgatttatgttgtgtttgggtactgggaaaattgagggaagaaaggaaaggaaaaggaaagaaaaagaaaagaattattttttaaatttctttttgtttggtggtgttggggttgtcgattcaattcgggagattcgttggggaaaggatatgggtgtgttgtgttccaagtcgagaaagaatatgatgggtttggagactgaattgattttctttttgtttttcttgcatttcgcagaagccaatcacacctaaaatgaatgtctgtaatggaagtaaagtggtcaatttgagtcattttaccatcaatcttggtgaaacagtgtttcttgtgaacaaagggtgaatttgcttgcattgaaaaatacccatttgaaatcccctgaattgggtgtggatctgagcttcattcataagctacatacttgtattttctcgggaaatgttttctttattgcttgtgtaagcagattcaaaagtctttagcttcaatgacataccaaatgcattttatattatgtggagaacatgcccatttctgtatattagaatgttatatatttagaatgtctttttggtaatattcaaatataccctttacatatatgcatttgaattttagcagtattttccttcattcaaagagtagatacttttgtgtgtgtgtgtgtgtgtgtgtgtaaaggatatccgttacatgtatgcttgaatgcccatttcaatgtactgaatttgacctggattagagcttaatttgcaaacaaggaacttctagtttttgggttatttttatggagtatattatatatcatacatgttggaattacgaaataaaggctgagtcctttgtcttgtttggtgtaggtggaggtgtttctcattcttttacctgctctggt

SEQ ID NO: 99587 - DNA, 977 bp, Vitis vinifera
  Intron number 2 from transcript GSVIVT01037194001 (locus G SVIVG01037194001) derived from phytozome v7.0 (chr-ID chr1 8; pos 28114936 to 28115912)
gataccaaggtgagtctccatttgaatttcctttgtgttaatattgaattctggaaaattgtttgaatatatataccaattgaacccaagcttctcttttcttataaggttatattggatgatttatatagatttatacgttttgagtttctatgctgcttctaagttgtaacagtatttaggcaatcaaattcaatgcctctgcttagcattttcacatataagattattgttacatctctcacattgatcatcactatgttgtagacaagtttgatcagttcatcaaattcataaaaccagtcaatactgtgtttggatcagtttgatagtgaatagaagtactgcttgagtgattgcttctcaattatgtggactagttgttgtgattcaccaatcaggcttaactattctgtaggcatgattatgagaagagcttaactgtttctgagaaataggattcaaatttcaaacagacctaaatattgctcccagatgccacacatagtagaagattggatctaaagtagttttttctgtcagctgacatgcttgaactaacacaagtactctgtgtttcgagaactttacatcttctgtcttatttttccatgaagctactgagcctggctcaagtggcaagacattggaggggggatgtggagcttccatgtaccaaaaacaaaaaaggaaagagcaagtatctggtcccccccccccccccccaaaaaaaaagaacatactccatgacacataaaattggtcttgctttggaattcaccatgtgtacatatcttctctcactagctactctatatcttttctttggatttaagtgaatctttgggcgtttctagaatgcaccatttttaaattttagtcttattttaggaagacaatatcttaatttttaagaatttaatatctgtatgcattcttttcttactagccactctctgctctttgcatggttttag

SEQ ID NO: 99588 - DNA, 693 bp, Vitis vinifera
  Intron number 1 from transcript GSVIVT01031028001 (locus G SVIVG01031028001) derived from phytozome v7.0 (chr-ID chr1 4; pos 21128293 to 21128985)
tctcatctcttgttcggagaatccaacctagtcaggtattttttttcttgttattttcagatctttgatttttgttttcttgttttcttgactaaaatatgcaaaattaattgattcagatgagtaataataatcaccaaaaaaataagaaataaaaaattgtagccttggtttttaaatcggatctggttgattttagccgtcttcaagcgaaatctctgaatttaaactatttcgctagtgaatagatgcaaaaataattctttttgcgttcggctctgatctattccgacagcgcttgaatatctgatgggaaaacatgaaagtttctgtttttattttcgagtttctggttttaaggtcggcctctttgtcttgctcataggaaccagatctgtttcgtcgatgtgaaatcgaaggaaaaagaaagaagataaattgtctggatttttaggttttggtatttgtaaattgaaggaatcaactcaactaagccaaaggagttaggttaggtttagtgagttacgcaaagttttgatttaatttatttttccaagggtttctcggaaaacaaacgagtatgttaaaaaaagcgtttttctcagatctagggaattacggtgttatttttgtctgaaaatcttgagctgtggtgttaaacaggcgttcttttaaattgaagtggtatccaag

SEQ ID NO: 99589 - DNA, 827 bp, Vitis vinifera
  Intron number 1 from transcript GSVIVT01032046001 (locus G SVIVG01032046001) derived from phytozome v7.0 (chr-ID chr1 3; pos 23211513 to 23212339)
tcttcttcctcctgcgccttcccaaaacctcacaggtgttttttttttatttttttatctctgtacagatttctctttctagagaaacctgtatcgatactattatcagcatatttgtccctttgtgcatgtcattttctctattgatttggctgcgattatactttttatttttatttttgtacttttgttattttttggggtatttttgttgaatttttttgggttgattaatctgtttggcttctgggaaaatggaagggaggaaccagaacgaagaggaaatgggaggaaatggaaattctggattgtgtgctgcgctttgtttaggtttccggaggatgaggggagtgaggtgtggaggttttttgttttgtcgtgttgtggattgtgagatttggaattttagtcaggtttgttctctgggcttttcttggcggccgaacagttggagttgttcatacgctatttgttcttcagaaatgattgttttattttattgattgttttagtttggagtctctgtattgtttggtgtgttctgttgatggatactaatcattattttgttcttttggtgttcttttatatatatattttcgtgaataaatctattctttgtatgtttattggatttattttattgattgaaagagaatgaaatcattttcattgattttgtgtgatgtttcttgtgaaattttcttctttctgctaataacatttgtaatattagtgagacttttatgcaggtttttattttttatttcatgtgttgttatttatttatttaaattttgatgcgggtagggaaataggaggcgaaa

SEQ ID NO: 99590 - DNA, 601 bp, Vitis vinifera
  Intron number 3 from transcript GSVIVT01035167001 (locus G SVIVG01035167001) derived from phytozome v7.0 (chr-ID chr1 1; pos 12505766 to 12506366 reverse strand)
agtttttgaaccaggtatgttgattgaatcttcagaagttccattctcttcgccttgtgaatgatggcagtgtacgtaagactgtcttttgatgattgtactcgcctccaaaaaaagaataaaaaaaaaaagggagcaaaaaagaacagaaaattctttatcaaatccatggttatgagtaccagagctgtcacagttctgatgcattcccagttatctgtgaagtgtgaaaactagtgcttacaatgtaaaatagaatgccctattgtcaatgcagcgcattgcagaatgataggtcgcagtttcttcagactgctcactgaaacattaagtggtcctattgtcaatgccgcattgcagaatgcccagtatttcactttgactgactctgttaagttagttcttccttgaacaggccaactgaacatagttgttaatttcatcagcggcttcttacctatgtttcttgatgaactgagcttacatagagcttgtgaacttgtgcttgaatggtgatagcttgaaaattgaagacagtgcactaatccaatgttttggatttttgatttcctgggccttgttcagttgcgaggtgctgcta

SEQ ID NO: 99591 - DNA, 690 bp, Vitis vinifera
  Intron number 2 from transcript GSVIVT01037090001 (locus G SVIVG01037090001) derived from phytozome v7.0 (chr-ID chr1 8; pos 29262301 to 29262990 reverse strand)
cctagctcgcttgcgtactctattggctctgaaaggtaaatttgctaatttcaatgggcatttccctatatttgggttcttggaaaatttgagggaaaagcaagagaaagaaaataaaaagaaaaactgaaggaaagagaaagtaaaagaaaataataaataaatttaatttaataaattatttttacatgcttttttaaacccatttcacttatttttcttctcctatgtaaagattaaataattttgaatgtattagtctctaactaattagaattatatttgattttctttttcaatgttttctattataaacgaaatatgggaaaatcatttaccttatcaattttcttcctttattagtatttttctagaaccaaaattagggttcaggtgttgtgttctatgaacgtgagattacatttcgtgttatattatttgtaagtctctaactaatttgaattatatttgattttctttcaatattttccatagcaaaccaaacatgaaaatattgtctttgttatcaattttttttttccttattgttttcctagatccaaacataggattcaagtgttgcattctgtgaatgtgaaactgtattctgtgttatattatgctgatgggtagctgtgttattgttttgaactagtcaggaacagtatagatcttgatacatattcacct

SEQ ID NO: 99592 - DNA, 771 bp, Vitis vinifera
  Intron number 2 from transcript GSVIVT01037088001 (locus G SVIVG01037088001) derived from phytozome v7.0 (chr-ID chr1 8; pos 29284293 to 29285063 reverse strand)
attttcagcgaggtatttctgtttttgttttcttctattgtagtctaaagtaaacttttctttgttaaaatacaaataatatttatatacacttgtaacttcttttgataatactaattgccattttgtcttccatttcagttgattattcatctattcaaatatttcgtgaaggagtatgattttatatttctttttttattggttcatttctatgcattcctagtcactgctgtggccaaaggatgaaaatattggaatttcacagaatgatgattggattttgcggaaatattgaaaatattgactgtaaattttgggaaaaaaaatttcaacatgaaaaagaaaaaattgtgacaaatttgtatgaaactttgataaatggtaaagcattgatgatacatgtattaaattggtttttaaagaaattaatgtacatatgataagtagtattagaatggatattggtatcaataccaggaaatgaagtctatatgaccatatataagtattttgatttcttctcactgcttgtcatgagtaggagattttttggatttctcattatcctatctttgaaactctatacaacgcgtgtagaggaggatggttaaatattgatggaatattggtgccccctcttttgatattggtacccctaaattacagatattttgatggaaatattgaaaatctcatggatgttttcatccttagctatggaaattagcattattattattttttattttgtaggtgaaactgacgata

SEQ ID NO: 99593 - DNA, 945 bp, Vitis vinifera
  Intron number 3 from transcript GSVIVT01035855001 (locus G SVIVG01035855001) derived from phytozome v7.0 (chr-ID chr4 ; pos 4904238 to 4905182)
gttcagctgttcccacttccattttggttggtatacagaattgtttgagtgtttgaatatcaagaaaaaatagtttgaggtacaaactatgacatatttttagtatcatgcttttaaatcacattagataatttttggaattttggagttatcatatttcccattttattttgtttaaaactactttctgcttcacaggctgtcagctggactgaaaggagaaccatgggaccttgacccagatatttttccagtctggtgcctggtccagttttaataaaacaatggctacaatccaactaacattaatggcttctgcaacaatttgtggccctgctcctataagatgctgcctctatttgtcttttttattcaatagcaattgaaaaaaataaagtaaaattcaagaaagatgctgaagtgaaatgcatggattgctatggccattcaacattttgttttttctgtactattttgcttttgtgctttttggtacatggatctgtgttggggtttatgaagctaatcggacatgttgtacaccttcatgtctttgtcatgggaaaaaaagattttgagggtcctctttcatgcgatatctcacattgctgttttgcggttactttgtatctgctttcttcttcattttggttttttaatttaattttatttcttttttatttttcattttttttttattttttgtgttcttcaaagaccattgcctacataatagatgagggtggtcctctctgataaccaaaaatcctgcaacctgaaagacagggtttgatccaggtttttggtacattgcccagagaatttaccagctggctagctgacaccttcccacctgcatctatatgtacctttttgatggagtgaatatgacaatggaacttcgtctaatgcaggtttgcttctctggaatcagacaaggcagca

SEQ ID NO: 99594 - DNA, 1015 bp, Vitis vinifera
  Intron number 1 from transcript GSVIVT01036583001 (locus G SVIVG01036583001) derived from phytozome v7.0 (chr-ID chr1 3; pos 18585780 to 18586794)
ccactccaagcttatttccgaaactaatctcactggtgaggttcactttggttgcttgcagtaaaaatgtcggggaagtttattgcgtatcgcctgtgtgatttttatttttattttggtttaatttttggcttatttccaatatatagactgcagtccaatagactagtccagtttgtttggtttctacagttgatgacaaaatacggggaaaagaaaagaaaagaaaataatcgtggggcaggaaaagataggaaaattctgcgatcctttgtgattggttttggtttttctttcttcccagaacttgattggtcgagttaactgaaatgaatacatatagttaggcttggttcactggactttgtcaatttcttggaattcaagtagcggaagctttaggatgtgtttggctgctgagaaagtacaggagagaatgttcaaatgatgggttcctcttaaaagatgtctgggtcggttgtaattagtctgaaaactgtgcgattagttcaattaccgattggtggcttttgcgactgagactatcatagtttttagatctgcaaattttagaatcgtttattcctttcttaaacctataaaggaaatttatggcatagaattacaatttcaatttttggttacatacatcagaggttaaacttaactttttctttacttggacacccatggaatgctagggctatgttgaaatatttgatattgccataaaaaaaaaatgaaaaaaataaattttttttttatgtattttcaaattctttaatctttatattgaagatgcataaaaaatgactttaaatctatttattattattattttttctttctacttttgctttctattttcttttccttgcatttttcctcaaattttatgggaatcaaatgtagcctatatgattttggagttgtctttttctgatctgaattgctaaagtgtactgccttattatcaatttgttttcaggccttttatcggagtcgcacaacaaat

SEQ ID NO: 99595 - DNA, 684 bp, Vitis vinifera
  Intron number 3 from transcript GSVIVT01037184001 (locus G SVIVG01037184001) derived from phytozome v7.0 (chr-ID chr1 8; pos 28239901 to 28240584 reverse strand)
gcgttccccagaagcccagtaatcctttgtctctttccattgttggttttttctttaatttttttttgtcgattcgcttggttgccgagaaaatttgtgaggaaaaagatgaggaattaaagcataaactcatcgtagcttcattttgtcttttccattgaatttagtggtttggtgactctgggtatttttagaatgcttttctggatctgtttggttgctgagaaaaactgagggagaatgagattaaaaaaattgcatagaaaataatcataagctcactttttttgtttcaatcagttttggatttttttttcttttttcaaattgtagtgtatgtcatatttcttggtaactgattgtttgattaacgagaatcttggttgaaattaggatttgtttggctgttgaggcattttgagtaaataagggtgaaattttaaattatttttcattggcctgaacaaaacttagactaggcattataggaattttttttttcttttttctactggaaattgaaacagcaatgtaaaaaaaaaattcaaattttcacttttttgtttgttcctttgattctcaacaagcaattggcattcccatgttcacacgactaccaccattactcatcgccctcttcctttcataggcttccaccaacgcacctcagcacactgccaccaa

SEQ ID NO: 99596 - DNA, 850 bp, Vitis vinifera
  Intron number 1 from transcript GSVIVT01031626001 (locus G SVIVG01031626001) derived from phytozome v7.0 (chr-ID chr5 ; pos 19110125 to 19110974)
tattattggtactcttacgtaataagaagaataggtaatagaagaagaaaaaaaaataaaagaaaaagaaaacttagacataataaaaatatataaatttatatgaaaaaaataataagaatatataaatttacataaaaaaaacttccatagaaaaaaggaaatccacttcaaaaaattaggaatatatatatatactcgtatcacgaagttgtcaaatcaaaattggagttcggttcttacaattaaaacatcgataccctaattgtaaattgaagggaaaaatacaaagaaaaataattaaaaaaatattaaaaaatctttttatatattattttaaatccatttaattcattttaactatttcttgatataaatttttagtctttctagatataaatatttaattaattttaattacatttaattttctttgatattgtccaagatacaatcaaacataaaaagaaaattattttctttaatttttttttcttgtaccacttcgagccaaacataacctaaaagtcccaaacaaatatcaattactccaaatttcagttcaattctcacaaaaacgctttatgatacctcatttttgcctttaatgctgcagaacttatgcctagtaggaatggcaaatgcctaattttcataatccgaaaacatcccatcgtccactccagtggaagcatctacatattcaaatattcagtaacccatcccgccggaccgacagcggaggcccatcaatgaagccatcatgaccaaccgattcaagctcaaacccaacgtaacttccctacgagagctagggccagataaaaacctacagaaaattctctattgc

SEQ ID NO: 99597 - DNA, 908 bp, Vitis vinifera
  Intron number 1 from transcript GSVIVT01037034001 (locus G SVIVG01037034001) derived from phytozome v7.0 (chr-ID chr3 ; pos 8696648 to 8697555)
ggggtcatttgcactaagtttgtagtgtggttcaatgtacgtttgtgttttatgttagtcattttttttttgcctttttttttagttaggtatcgtttggctagattttttgttttatttttttttaaaaatagagaatgatggtgtaacgatctactcccaattgtatagacgcgctttaaagttacaatcttctctttaggtttagaatgaaatctatacggttgtgagtgaatttcacccctaactatgtagatatgttttaaagttgtgaagactaacatggttaagggtgggttgttacatatagtagcttatatatatatatgtaaaaactctttaagacttaccctaaaatgatttttacaaacggtttgacaaaatcgagctactaaaacatttttattatcattttgtattttttaaaaaatgaaaacaaaacatgtatccaaacgggagtcacctaaaaattgaagtttgtattagtattgtgtttccacacgaataaaaggatttgtttcatgtattattattttgactttgacattattaataattctttttgttgctaatggtgtaacttgggtgggtaaaattagatagaggtttacgtctttataagcagaatggattagtacttatggctataaattcaacttagataaatcctattagtatgtacatatggttataaacaatatctagcccctatctatctggttggcaactatggatatagaccatacttgaatgcaatttagaacctttgcttgaatgaaaagttggtacttcctgttataaatttaacttgaacccaacccacattgttaaacttacagttacaaaatgtactttaatctattctgcaataaggtataattagcttaagtaagcaatttgaaaatcaa

SEQ ID NO: 99598 - DNA, 690 bp, Vitis vinifera
  Intron number 2 from transcript GSVIVT01036604001 (locus G SVIVG01036604001) derived from phytozome v7.0 (chr-ID chr1 3; pos 19073734 to 19074423)
gataccattttcttgtacaagcgtaacttctgggattattgatttaatgcctgtaggaaatcatatagtctttgaaattttagcttaacgtattgactaaatgcatttttggacatccatggaaattttacttttccattttgtttttctttcattttttatgacatattcctcattgtgcatgaggccgtcatagaaaatgcaatcctcatgatagaaacataggattttttattaaatccaaaaactaatcagataccgtcagttccaggggtggttctctgtttctttgatggctctatctgatgaatatatgctttaaaagctgtgtacacacaatggagcattcaatttccatggtatgtccaaacacaccctataacgtttggatgctgagaaagtgtaggcaaagaagataaattgaaaattcacatcagcttagctaagtagttatattaggttcctctcagtgaaggttttggtttgacaagttccgggtggtgaaaaattaaaagttcaaagcccgatttattttctttcctacatttatcagcaatacccaaagcataattgattagcatttcatcttttgggttcaaagagcagttctcttgtttttcattattcactttgttttatttttctttttatgcaggacttccctacttgaagatctgcccaacacagaaa

SEQ ID NO: 99599 - DNA, 442 bp, Vitis vinifera
  Intron number 4 from transcript GSVIVT01037758001 (locus G SVIVG01037758001) derived from phytozome v7.0 (chr-ID chr1 9; pos 7623094 to 7623535)
ttacaggtacgtgcagttggtgattcctttatttattagaacttatttctcggcaaccaaacagaacaaagaaaaaaatgataatattttccttttcacatgtctcaatgaaataatccccttagagatgaacatgacagttggctgtgtttggttttttcatgcgacaagaaacttcctactttagtttgttgttgaatactcttcacctaagactctgaacctcaaaataaaataccattatttagttaaaaaaaaaaaattattaaacaaagacttcttcaactgtcccaatccatgtaatatttttgaagttttcaaacagtgagccatgccaacttgtcaagtttttccagtgatgaatccatggaacagggaatacatttgatcataattgaaaaaaatatatacgtttgtttgaatggacagggagctgttcaac

SEQ ID NO: 99600 - DNA, 826 bp, Vitis vinifera
  Intron number 1 from transcript GSVIVT01033599001 (locus G SVIVG01033599001) derived from phytozome v7.0 (chr-ID chr8 ; pos 19429225 to 19430050 reverse strand)
ttcgcctctcctccgttcttactccttctacgttcgtaagtcttctttccttatttatttcacttctaagaaaaactggttctttttttcttacaaatttagcaagtaagacaactaactatttgtcttagactcagaaacttcttgctttctggagttataagtaatttttacactctggactcctttccttgtgctcattttcttagcaattaattactctggaatttcggttgcatgattacctgaaatctaaatcgcaaatgagaagtgctaaaaccaactcacgaccattcatcatttggggctgtcgtccaaaatcattggaaaggctgtgtagccatgcaaaatttgggtggttttgaaagggttttttattttattttatttagtttggttgtcttatgattattagcgtagatgttcagtaatgtcaacgctaatgaggttcagatatggtgcttaacagtaccttatctattgatggtaaaggaaattcactgtctaatttgaatttttaagttgttgggcacaaatctcttgccatcatcagttattggctgatccttaatgagttgcccttgatttttttatccatgaagggtgtgctatatttgcactccattcttatcttccccttgctccaattgttactgtaataatgtaaaatgaagtaaaataaaacagatacttggatggaagggtgtgaagtcaatagcagtgcccattcataaatgggatttttcatgttactggacttctgtgttaatgctgtttgaagtgccttgcagagctctataccattactgaccaaaattgttggaac

SEQ ID NO: 99601 - DNA, 1003 bp, Vitis vinifera
  Intron number 2 from transcript GSVIVT01033770001 (locus G SVIVG01033770001) derived from phytozome v7.0 (chr-ID chr8 ; pos 17985939 to 17986941 reverse strand)
ggttagcgctgcagtgccgagtggtgcatccacaggtgagactcttatggtttaactggttggattaatgatctctgtctctgtgttcatgtcttactaattattgtttatttcttttcaattggggccgcaccaaatgaaaaacaaaaacaaaaaaaaaaagaaaaaaagacaagaaaaggtgatattgttggaataaggattcttggaaacgataggatcactaaatcagtgattatatgtctctcaatgatttggtctttctgaaaaggctaggaaaaggaataggtcgcattcttgagcgattgggagcattttcctttcttcgttcccactatctgaggtcactttcttacgaaattggaagagttgttccctatcattttcaacaacgtaatggagggtaaagattttttgaaaatgtagaaaccattgaggttgtttttcttgctaggaaggccccaatctttcattggaaaataattgtaggaatattttaatagctcaaatactgatggtggatattttattttgatacattgaaaatctactgcctcttcaatcaactttgggggaaaaaaggttatggcttcctacctgcaaaacatgtttttgctgggtatgcacaaagaaaacagaaccaaaatgctacatttgacagtcagttgtgagcctgaggatttgtctcactgcttcacagttttagttgtggataggtttttttttttcagtgttctaaaaaattactctctgcatgtatgctaccttttggttgccttgtaaatctctttggtagatatagttttttatttggaagttttaacattgctatagctagtcatcagtggaagaatgtttctatcttccataacttcatttgtagaaactcttgttttgagaaatcttattttagttgtgttgtgacatttctataactgatgcttaaagatgtctactctgttaacatttttctcatgctatctattttgcttcttaggtattt

SEQ ID NO: 99602 - DNA, 261 bp, Vitis vinifera
  Intron number 3 from transcript GSVIVT01031220001 (locus G SVIVG01031220001) derived from phytozome v7.0 (chr-ID chr1 4; pos 1075802 to 1076062 reverse strand)
ttaggaggaggagggggggaggcataaatccaagtgtaagttgaccaatttgatatgatatatttctgttatatatatatatatatgtatatatatatatatatatattttgttcttttcaatgagtttgtgtactgtatctaattgaatgtgatgcaaaagaactgaacctagaaaagtatccagtgatggggttgaggtattaacattattagattttgtgcagccaaaggtcctccggtgcaaaggaaacccttgaag

SEQ ID NO: 99603 - DNA, 722 bp, Vitis vinifera
  Intron number 1 from transcript GSVIVT01031151001 (locus G SVIVG01031151001) derived from phytozome v7.0 (chr-ID chr1 4; pos 1690995 to 1691716 reverse strand)
ccctccatttgcggttgcagtctctcctcttcctggtaagccctcgtaaatctcatgtttctgttcttctttgaattacatgtcattgctataatttcagatctacaatttcttttactttgtgattgtctgtcgctgccgaaaaggcataggaaaatagtttgcgatgtgcccttgggttagggatttggttaaagatgagtatcaacccgcattcctttgatttatcggcaatcaaacggaacttattcttcctatttctcttccattatgactagtttatatgattgtggttgataggacttagtaggaattttataccaatctaagcaaacccatcttgtttatatgactagttttcattttttactttcacatggtttctcagaaatcaagcggaactgtttagctgtgtttgtataagattacacgatgcgattgccctagaaacaattttttgtgttttatgttttattttattttttaaatattttatatggaaaaattaggaatttctttataaaagatgcatccatccgtatacaccaatgctcctttcttgttcttatgaagagtatatgctttattttttgaaaaaaatagttgattaaatttgtctacaatatgtatttttaattatctaaagtgagcacttgtagttgttttgacttgattatattgaatcaggtatttttagatccgtatattgggagcatttaaac

SEQ ID NO: 99604 - DNA, 882 bp, Vitis vinifera
  Intron number 1 from transcript GSVIVT01032922001 (locus G SVIVG01032922001) derived from phytozome v7.0 (chr-ID chr1 4; pos 24159778 to 24160659)
ccttgatttcagcctttcaatcaggtcagttcatctttttttctttttcttcttcttttttccttcccattttcaatcattttgatcatttagtttttttttttttttttttctgtacttgattgttggcattcccccccaatctgatgttttttttccttgggggttctagtttcagtagcttctcgttctgggtttgatctcttttatgtttttttttttcctttttcttttcatggcaattcttgacagtattttttttccctttatgtctgtttccatttttttttgttgacgattactgtctctttccatatttccatgttgcaagttctgaagcggataatgatggttggtttgtttgatttttgttgtgcattattattctcataatgtatgtatactgttatgtgtgtacttattgcttgatttaattgcttctaggttttttagttgagtagttcaagctagaaaatttgtgatctgtgttcattgaatgagaaaatattgagaatatcccatatctggacatggagacacgacaatatagttgggtctttgtgaaaatttccgtattgaatggatacatttttattttgggtgtttttgtgtgaatttggaggaccttggtgagtacaaaagtgaagaaagctatagctttaagataagctctgtaccaaaatggcataggtataattcacttgttaggaggaagtcttacacttatgctgcaagaaaagtccaatgaaatagagctaattatttttgttgttggaattgattcctgggtgttgatcattttcattttctctattttcaacatgtaaggattgatttttcaatattaagacagtgatattttggttttgatgataggaagac

SEQ ID NO: 99605 - DNA, 533 bp, Vitis vinifera
  Intron number 1 from transcript GSVIVT01035957001 (locus G SVIVG01035957001) derived from phytozome v7.0 (chr-ID chr4 ; pos 6495370 to 6495902 reverse strand)
tgtagagagagaaagagtattgtagagagaaagagagagagagagactggtgaatgaagaatgaagaatgaatcatcattattatcatgagcatccgtttatcaccaaatcacacagatacagacagaaaacaacacctaggaaagagacagacaaaaaacccagatccttggatccccatttgaacaacctccatatctgactctttctctttctaaaaaccaacaaaacaatcactttctctctttataaactcacattccttcagcccctctttctctgcatagtgtgaaggacaaggcacgttcacaaaagggtttcctttgattcacagcaaaatccatgccctctggttcctgaatccgcactctctgcaatgccgtcatcatggttgtttagtctttttgggtattgggtttttctggggatctatgtattttagctgaaaagggtgtggtgttggttgcaatgtgggttgaattggaacgtttatagggtttccagtgggtgatattgttggatcttgacggtag

SEQ ID NO: 99606 - DNA, 433 bp, Vitis vinifera
  Intron number 1 from transcript GSVIVT01035350001 (locus G SVIVG01035350001) derived from phytozome v7.0 (chr-ID chr4 ; pos 686497 to 686929 reverse strand)
ttcactccttcaagcactccggtaataaaagttcatagatctgtttttggattcgctcgttttgagggaaagtggtttataaaaaccttctggggaaagaaaatattatttgacgtgcgagttggcactgagaaagtgggaaaaagaaaagaaaccgacttattaatttagatatatttttcattaatttttggaaccttgaaaaaaaaatccattttctcaaacataaaacccataagattttattttcttttgtttttctcagttttttcagctacccaacagattcttttaagttgtgagtcgtgggaaaattagtcatgtttcagaaaattatctgtatccacttgaatattattatttttttgttaatttttcttggcttcggaaatttttaggactagcaaaccgcaagacagttacaattcagccc

SEQ ID NO: 99607 - DNA, 931 bp, Vitis vinifera
  Intron number 3 from transcript GSVIVT01033988001 (locus G SVIVG01033988001) derived from phytozome v7.0 (chr-ID chr8 ; pos 16068158 to 16069088)
atcctaatcaccactaaaacctatattcttgtaagtgtaacgctaggttgtttcttcttccaattatttatttattctccttcacagttcacatcatggataagataagttaagtgagattttaatttaacccttaaacatgctattttgataccttgtataagtcatttttaaaaacacttttcaaaaatttaaaaataaaaaattattttggataataattctttattttgattttataaagtataaattgtaaattcaatttatatcatataaataaatttaatttaagtcttattaaaaaatataaataattttttataataaaatatgaatagtagaattataataaaatcataaataacattttctcttataaatatcttaatatcttattaaaacataattggtttatttttttaaaaataaaaattaataattactaatgctatttttaaaaattatgaaatttattactttgttttttaaaattgtttctcaacaacaatcaaacaatagtaataaaaaaaagactcttaaagatgtttttttttaatgaaaataaaatatattttaaaatgcatatagtgtaaaagatttttttaaaatgaaaataaaatattactttaaattatatatatggatcattttatttcattttttcattgtaacattgaattgaaaataaataatcattttaattttacagtgtaaatgaatctaaattcatttccatacaaacataaatgtcaacaaaaacaaaatattcaatccattttttattagcatgtaccaagcctggcgttagtactgctcctaggggcttcctctccactcggatgtcttggtactcttattaatacactagattcgataattcgtggattcatgtttagtgtcaattcttgttgttgcaggggttggtactatt

SEQ ID NO: 99608 - DNA, 901 bp, Vitis vinifera
  Intron number 2 from transcript GSVIVT01035561001 (locus G SVIVG01035561001) derived from phytozome v7.0 (chr-ID chr4 ; pos 2323651 to 2324551 reverse strand)
cgcactttcaaaggaaggcttctacgttgttctcggtgctcatttaatcgtaatcctattgctgttgtttgtttctttgtttgttaagatagatgtaggatgtttagttgctcaattcatcgtgttacttctgtctccatgggatttttattatttatttatgcttattatgatgggcataggaaatttggttgtacaatgtgtagtgttgcttagtgttgctgctcacataatgtgttgatggcccatttgtggttctttatgaagttataaaaatgtgactttgttaaaaccaatgcatgagagtagattaagggaatactgtaacccagatttgcccataggaaacttgttacggctgattaggtacgttttggaggtttgctatgcattatcaaactttatttttttcatcctggaacctgattccaggggagctccttcatatatagatattgtttgccttgagctcaatgagtcctcatagctttaaaacacatctacatggctaatagaaacttatacatatatagtgttaagtgggaatatctacatgaaagggagcatgtcattacaatactttccctccaactttgatgtgccttagttctaacagaccaatctttatttttagccttacaatctacttgagcaatctccaagctctattcttttgatccatgattgcgcctggaatttaaagtgggctgttttattccatttccaaaaaataaaatttggtatcattcactggttttttatcctaagtaaaccatgcaactcccctctattagagtaagatctgtttttttcaaataagttaccattatgaagatgtataactgtattttatactgtgtttgcagttgggaggtcatctcatttattatcaaaggtaagc

SEQ ID NO: 99609 - DNA, 827 bp, Vitis vinifera
  Intron number 1 from transcript GSVIVT01036645001 (locus G SVIVG01036645001) derived from phytozome v7.0 (chr-ID chr1 3; pos 19739908 to 19740734 reverse strand)
agtcatctctctcccaactggagtttcgctccaaggtatgaacagtcttcaacaatggcggattcacttcgtttccttttcatttcagtcttttttgacttcctctgcaatttctacaattccttttgcatttttcaactgttgtttcacggatccgcttcctgaatttcgcattatcgatttcaattggttgtcttttgtcgattttggtggcagctgtcttgaatgcaagatcttactgtgtttttgactgaacgacactgtttggttccagagaaaactgaggggaaggggaggaaattgaaattttggatctttgtcgtgttgttgattgagaagctcattcttttctcggtaaaagattgtgaaggatctgacatttattctgagtgagaggaaaagaaaaaaaaagacagagcttgactttaaaagcttgtcggcttggtttagtgtttctcttttttcatctttgtccctaggaaagtttttggccaaccaagtaattgaattagattcttgggtttctctctttttctgctgtttcttggcaaccaaactgggcagttttgaaaattttcgtgctttggctcttctaagtgcatgacaaatttgctttatttaaaggcttctagtagattctaattttatttttcaggaacagggtctaactgttctgtaaaatgactatagaataatgtgttgtaaatggatgatgaaacaacacagtgaatttttgtaatacctgtgatttcttcaaccaaatgaactgggattttacattatgattatcaggtgcatcatctatcataactgtgggccattgaagt

SEQ ID NO: 99610 - DNA, 640 bp, Vitis vinifera
  Intron number 3 from transcript GSVIVT01035477001 (locus G SVIVG01035477001) derived from phytozome v7.0 (chr-ID chr4 ; pos 1589665 to 1590304 reverse strand)
tatttctctgcaacagggctgcctacaccttggaagtaagacgtgcttacctacttgaatttactcatacattaggacgattttatatattctcatggttgtaattatcttattccttgaattcccactcccattattttgaaaatttatatattctttgattttcttctcctccattttcaagatggcaaggcaagcaagaaaatttcaggattttatcttttcatttcttttaccccaatactttttttcttctctgtttccaccgtttttcctttctttacacaatgtaaggaaattaaaacatatataaagtttttttattatattaaatttaaatttctttttttttacacaataatttataaaattcaactttatatatatatatatttcatttttgttagtctctatttgttaataatgaataattaaacacccgaagtctataaatttatcatcaaattatttatgaacgttttgtaatatctttggaaaatttcaaattaatatatctgcatggttgaaacttgaaaccaaacaactttttagttccttttgagctgccaacatgaatatacaatatcaactttctcacaagtgtttctcccatggatgttttcaaaagctattagccaaa

SEQ ID NO: 99611 - DNA, 565 bp, Vitis vinifera
  Intron number 1 from transcript GSVIVT01035477001 (locus G SVIVG01035477001) derived from phytozome v7.0 (chr-ID chr4 ; pos 1590444 to 1591008 reverse strand)
accggcaagccctgcctcaccgtcggccaaaacaagtaatcatttcttcttcatctacttcgatcgctatattcgctatcttctctttggaatatatccatggacgtttctcgttgctttcacgcttttgccgaggagtgtccaaagattttattgagagtttgtatctttgcagttacgcttggattcgtccttttggccacttttgattttgttttcttgttatttttctccgtatccgctcttctcgaaggttgtttctttatacttacatgcctctttcgaacagttttagcttcctttcgaaggatattccatccactggtgtacttcttgaaaaaaaaaaagaagtaaattggtagatctgatcggcatgtgaatatttattcgaaaaatgttaaatcgtactcgcaagtggcttgaatcgaagccaaggaaaattcggatacggatctaattttatggagtaacccgggttgattattgtttgtgtctatatatataaaagaattattttatatgatttaatattatatttatttcttgtagaaatctgcttacggtc

SEQ ID NO: 99612 - DNA, 693 bp, Vitis vinifera
  Intron number 2 from transcript GSVIVT01034960001 (locus G SVIVG01034960001) derived from phytozome v7.0 (chr-ID chr5 ; pos 455805 to 456497)
taattgagaagctcaaagaggtttgttgactctgatattcaagtcgatatttttgggcctcgatcatgcttagttaaggtttgatcgtgaaattgttagttttgatgatagcaatgctaaagaattacgaaaggatcagtggctttgtgtgaaagtttgtatcttctatgtagtagttctgttcaggctgtttttccccgaggtttggagtcatctatctttcttctagtttctggaatatctttgtttcttatttttgttttgtattttccttttaaactttgttgtttttttattctaataatgttagggaatcaattgaacttatgcaaactatgcagttccaatttttcctttagatgaaaatgattcataatttgattttcacctgcaagggacttctcatctataaaattatagtctatttggcggtcatgttaatgatgatattttctttatttatgatatgcggtgaaatgcattctcctgttttttcatgtttatccatttagtttgctgatttcagtggttatttatctttgatgtggttgcttgcatgctgaattgtattctttatattgttacattgattttgccagtattgttctctctgaccacttacttaacaacttcacatggcattcattgtctttaaatctctatgtttcatattgttttgcagatagtgttgac

SEQ ID NO: 99613 - DNA, 995 bp, Vitis vinifera
  Intron number 2 from transcript GSVIVT01035843001 (locus G SVIVG01035843001) derived from phytozome v7.0 (chr-ID chr4 ; pos 4812667 to 4813661 reverse strand)
gtcaccggaaaagtcaacggcgaagccgccaagaagtgagactcctactatttgatttccatatgttttttttttcctaattttttttctgtttggttgcgttgaaattttggaagagtggatattttcttttgaaacgatatggtttttgcatatatatatgcaataaaacggggaaaaaaatttaacagtgagccatatagttgctttaggcttagttgagggcgatctacattttcttgggtcgcaatggtgaaaaatgttgccagtatcttagtttctggtatctaccaacattttgtcggcaaccaaacggaggattttgagtttcatttaaattcagattttgggccgttcggatgtggggaatttcggggaaaatcattaaattagccatcaatttgattgctggaaagcaagtcttatattggtctattatgcctagactgtctacttaacggatctgactgttatcggaatgtttcactttttcccttttctacgagattaagaattgtatgatatggctcaaaaaggcatttcttgatatgtttcctttcgctacagctaactgagtaaaaggatacaaaattttgtagcttatgctagaaataatatgttttggtttctgaaataaaaattcttctaccaaaaatagaagaaggaaaaatgttttctgcaaaaaagatgaaatatcatctcaggtaagaacaattgtagtagtctcagctaagcaacattgtttccttgggctcttgaacggtagaagaatctcatactcaagattttgatttctttgcctatattttctcagcaatgaaaaagaagtcagttctctgtatatgccattgcagtagcatgcccaattgtgtgctgatgttgtgcttccatttgtattcacagtcaagtttgtttcaataaatgcattgtggagctcctgttgtatgtgaaggtagcttatttctcattgtttattgttgtttttgttaggggct

SEQ ID NO: 99614 - DNA, 869 bp, Vitis vinifera
  Intron number 1 from transcript GSVIVT01031197001 (locus G SVIVG01031197001) derived from phytozome v7.0 (chr-ID chr1 4; pos 1271316 to 1272184)
tgttgatttggcgtccaggaaggccgaggaggcttgtatgatcattattttccttacattttgatgattttctttgttttatattttgcttctttttttttaatcaaatttaagattttttttttcttgttttgaattttgtttgtgaaagtagatgaaattcatttgcatttggcatggtttttattcttcttgatgcttttttagttttgattgagattttctatcaattttgagttcttttcaatgaacatagaagacatttattagcattttgattttattttcattgggtttttatcgattctaatgtgttttcatttctcgtaagattattgaatttcttgaattctgtaatgggatgcctttgatataacttggtatctgttagtttcaacagaaaatgattcccggaaaaaaaaaattcccgggcttttttcccttctcttttttgtccaggcttctgccactaaatcgataatgcactgcaattcttgaagaaaattaatcgctgttctttagattgcttcaagaaaagattatttttacactttaatatgattatttgccgggaaactttttggcttgaaatattttccctccaaacaaacaaaagttagttttcctgaaatttcattttgcaatgatgttgtaacggttccttcccatcctccatagtcactgttcccatgtcatctttctccctgcattttcagtagagggtttccttttctttcttttttttttcttttaaatttgatgtttcatttttcctttttattatgttggtagtgaagtttggcttctcttacttccaatttacttaaaagaacttacatgggaacactgttttgcagctttgagaaggt

SEQ ID NO: 99615 - DNA, 984 bp, Vitis vinifera
  Intron number 5 from transcript GSVIVT01035342001 (locus G SVIVG01035342001) derived from phytozome v7.0 (chr-ID chr4 ; pos 634927 to 635910 reverse strand)
ccacctccgcctccgcctccacaacgcgttctcaggtaactcccacttgctttttttacttttggttgttggtggttgcttcacatttaatataattgactcatctgcaaatccaattataaaatccctcctataaaattctatagagttagtcccacaaatggtgtcctctgacgcattttgtggttttctgcggttttgttgaagcattcacatttgtgccttaggcagcgtttctgaggattattgtggaaaatctaacattacctttcttcaaaagacaagcatttctgtgatgaaatattttagaaagttttgatacccaaaaagaatatatcttgaaatcatcactccaaatttggtcccttctcatttagtgcactagatggatcttgctaaacgccagggaatttactaaaattagctcaatataataaactgatggttgatatgatataggcagaggattttacccgtggaattaattggttaatttattattctatttctaaacaaaaaagcatttatggtatctgtatattcgaaaggcaaattagaaggggatgatggttttattgagtaaacattaatcatgcttcttcctatttgaagtgggtattggcatcccaactttttcatggggtggtgagtggagatggctgttctagaaattaaatggtaggacattttattcctgtttattataatggtttaatagaaataataaatttcgtaaaaagttttaacttgatgatgttgaaggttttcatatgaatagaccttggatggatggtactattcatatccgtataagatacgaagtgttgctttagcctaatgatgcactcctaacagtataaccctttgacctctgagttgatgtttaaatgcctcatggtatggtggggatactcacacctgattttttattttttttttttctccttaggtctggctagtcgggttacagatctcttcctcaac

SEQ ID NO: 99616 - DNA, 978 bp, Vitis vinifera
  Intron number 1 from transcript GSVIVT01034157001 (locus G SVIVG01034157001) derived from phytozome v7.0 (chr-ID chr8 ; pos 14780708 to 14781685)
acccgaaacgggttctttgtgcagcacctggctcggttagttcgttttctttgcccactagttggttttaattttgggtgttttgactgacaatgcatacgttgttgctgtttgaatacttcggaaaaggaacctgtaatttcaacgttttattgggttgggtatgaagtagttctggcaagcttgaaagttttcttttgtcttatcatgaataagtgacaatcacaacagagcatgaaaatataaccttttttttttccaagatttatttggttcttattaactttgatgtttttgggcaactcacttgaagaaaagatgtttttttttttttttcacttacatgtcttatgaaggatgcttaacaggctatttttggggatggaagtttgaactcaatggattcaattatcatataacactaagcattgcctacaggattaagtgttctttttgtacataatataattctgagatgtgctgccatttggacagtgaactttttatgttgaaaatgatgaacttaccttatcaaaaaaatggatggatgtatgaatctttgacaccagagtatttaatgggaattgtttgatgtaagtgaaaaggtttcttatgggatttatttccatgtggaaagatatatgcaattttttgaggataattgtatttgatcaagcacctaacaaaaagggggtccaacctgtgtacacacaacagaaaagaaactaaccaacctttagcattaacaagctaaccaatcctcatatatcaacaaagtctgagaagggccaagtagttaagcccaaacctatggcatgtaaaagattaatcctaatgaattttttgcttgtttgaattataaatcgatacgagcataaggcacccttgtttcttcctaggcggacagatgccaagctatccaaacttttggtttcttttgtaattttattcttactattgatcttgaatgatgacaga

SEQ ID NO: 99617 - DNA, 841 bp, Vitis vinifera
  Intron number 3 from transcript GSVIVT01033876001 (locus G SVIVG01033876001) derived from phytozome v7.0 (chr-ID chr8 ; pos 17079272 to 17080112)
atttgccgcaagtaatgcttttttttcttatatgaatttgaatatcagattggtgtttttcattgtcttttcttgttctaagcaaatcatttcatctttgccaagaaaatatagaaatctagaaagaaaaaaaaaacaatgaaagctcaagttttgggttcttaaaggaactttctcaaggcaaatatttaagatacgaatttttgaagtatgttctcattcagcatttgctctcatcaaatagggcttcgagataaaaaaaaaaaaaagaatactttaaaattacttattatcaaattacaatggtggactgatcaaagaatatggaaattcaagtttccatttgatgttgattttttatttcaatggttgtgtatattctttactaatgggacaatgagtttttttgcctcttctgctgtgaagtgctggagagggtgctctattgatccctatatcattttccattcttcaactttgtcagctgagttcatttacttgcagttgattttcatgggtggtacatttgttgataagttgtgggtcaatttttatttttattctttgttcttttcaatcatcttctaaagcatggatgaagagttgcagcttgtattttatgatcatgatcataattttaatctaactcttgaccaagatgatttgaactttatgtttgtatcctctttcatttggctataaatcttacaatatggtatgtgtacattccaactacttttatcttgttatctcaattgaacattgaaagcaggtgtagctttgatttatgatttgaattaatgcaacttttgttaatttgttttaacatttggattattag

SEQ ID NO: 99618 - DNA, 891 bp, Vitis vinifera
  Intron number 1 from transcript GSVIVT01036392001 (locus G SVIVG01036392001) derived from phytozome v7.0 (chr-ID chr1 8_random; pos 4567588 to 4568478)
tggctggtaattacgttcaaaacttgtgccttcgatgtcaaaacccaatagagaagcaatcctgggtttgtatttgtataatatagttctccaaccaacccttcaaacttcataaaacaagtacggatattcatataaagtgtacatagaaggagaaaattcaaagaaaacatgagtttggacatgctttgttattgtattgttttatatttaagttgtgtttggttctcaaaaagaaaaaaagaaaaaagaaaaataagtacctatctggggctgttttcaaaaacagttctaaaaaacaatttttaagaatagttattgaaacttgttctttatattttgtatgacaaaagtctatttaaaaacttaaaatattttaaaccaaataatttttatgtttagtattttatttttagtcattttatatgtttgtataattatttttttaaatagtcctaaaaaaacatgtgaaaaacaactaaaagatgttatttaaaaacactgtatttttttttttaaaaaactaaaaacataaaataatttcttattatcaaacatgttttccaatttttttattattatgaagaacagaaaactattctcgaaaacattattaaataggtttttaattttcttgtttgattgtattataaaaatatatataaaaaaattaaaattaattaaaaagttatatattttcaaattatttaatctttatatcaaaaaattaaaataaataaaataaatttaaaataatatataaaaataatttattgatattagatttattatttattttccccttttttttattttttatttttactttttgtcttttaacttttaactttttttctattcacaaatgttccattgccgctcactctcagc

SEQ ID NO: 99619 - DNA, 473 bp, Vitis vinifera
  Intron number 2 from transcript GSVIVT01038634001 (locus G SVIVG01038634001) derived from phytozome v7.0 (chr-ID chr1 6; pos 21305086 to 21305558)
caagccctttccgattggggtgatagaaagacaaggtaaattattatagagcagattagattgtacatgcaactatatgatcaaaatatagtgctgtttgaattgtctatatgttaattgtagagcagattagatttctttcgatggacattctcattatagaaaccaaattcatgtttttcttcgagttccatgttagtgtggctgattgcttgaagtgtttatatttgcatgtgagtgatgggaatatgccttaatttgtgttttacaactctcttgccagttacttttaataggtgaccagaatttcccttttttgcatttgcacagtgtcaaaaatctccccatgagtcctacactatcgtaattagtaatttgcatcagttgtccatggttcagtttcatccgaaatttattttaatttggagtgttttgcagatttatactcaggctgcttgttgagcacttgttta

SEQ ID NO: 99620 - DNA, 290 bp, Vitis vinifera
  Intron number 1 from transcript GSVIVT01031883001 (locus G SVIVG01031883001) derived from phytozome v7.0 (chr-ID chr3 ; pos 5135541 to 5135830)
aacacctcaacaacgattgctccactcttgttctggttctctcaaccttcttcatccttcctttgtttgtcattttccgttgattcccgagagaatagaagtagaaattttgaatctttgatttattttttttaatgctttgggactgatgtgttgtagaaggaggacttttggattattttattttgttttctcggcaacggaatggagggttggggagtttgattgagtaaatatttatttggttttatggtttttggtgttggatcagcctgctttgtcgattggaa

SEQ ID NO: 99621 - DNA, 927 bp, Vitis vinifera
  Intron number 1 from transcript GSVIVT01033407001 (locus G SVIVG01033407001) derived from phytozome v7.0 (chr-ID chr8 ; pos 20930096 to 20931022 reverse strand)
taaccgtttatcaccgaaaggaaaacgcgtaggggggagggggagcaggggagaaaagaccagtcaaagatgatctcaagaagaaatcaagattctcaatgacgatatcaacaacaaatcaagaaaacaaacaaggagatagaagaagagagagatggtgttgaacagcacactgatagggagagtagcggtggtatccgcagatttgtgccaatacgttgcttgcaatccggagagactcagccccgagcatgttctccatctcctcttttgttttccttttcagcagttacgtcgattagcgctctgtatctccgccttcttctgctccccttcctaccccgacgattccgattctcattccgactagcatcctttttgttttttgttgtggagattcttgtaaatctggattcgtgatgatgagtgagatttgaaatttcgtgaattgaggatattgatttgttttcatgctttcgatttgcttggatttgatctgatatgttgcgtttggttgaacttgaagaactagttaattccaaatccagaaatggatcaataatccattgggccgttttatttgtcctgcattttcttagctaccaatcactctcagaggtgactttcaatctgatttatcttaacaaagaaggattgaactaacaatttaacattctttgaaaaaaaaaaaagaccggataataaatatttctctaattaggtttccaatttaaaatcggatgatcaaccgatcaggcggtccaaaaacaacgaaaaacagaaaaagaaaataaaagcaaaaaaaaaaaggggatgacgaggttgtctgttacgtgtgtgaatattagtggatatatgttgcttgtccagtattctatcaactaaacatagaaaaaaagaggaaaagaggagtaggtgagaagcaag

SEQ ID NO: 99622 - DNA, 386 bp, Vitis vinifera
  Intron number 1 from transcript GSVIVT01033437001 (locus G SVIVG01033437001) derived from phytozome v7.0 (chr-ID chr8 ; pos 20694854 to 20695239 reverse strand)
atcgcaccccgtttctctctcatcgtctatctcaggtttctttcttctcttattggaagctatctaccgctttctcaaactgtttgcatttctgtatctggcccgatgttctgaattgaatcattctgcctcgtaaggaagcattaccgcgattttgattgttttagcattttatttgttgaatttttttaatttttttatttttgttatattttgtattgagtggcaatcatcgtggttgttagttgttgataatcaattctttcgtctgatctcattgtttttcaagcgtaaattttttttctttgttatttgcgatttttttaattatttttgtttttgatttgttagggtctcgatctgctgatttttagataaaaattgtg

SEQ ID NO: 99623 - DNA, 815 bp, Vitis vinifera
  Intron number 1 from transcript GSVIVT01030667001 (locus G SVIVG01030667001) derived from phytozome v7.0 (chr-ID chr1 4; pos 13232164 to 13232978 reverse strand)
gaaggtaaatagttaatacctcttttattggtttgttataggtcataatgctggagaaaccgacgcaccgaaatcaagatttcgtttattacatttacaactgtttaatttccttggattgcttggagttggaggagcagaaaaactttgatgttgttctcctgcaatattttgtcctaaaattcaaagctaggtgtaaacttgggtaattcttgttttggatggaattgatgttgcaggtcacttgatttaacccagttgaaatagaattgtgggcattttaggtgtcgaagtttcatatttcttcaaaagataaagagtaacataacatgtggatggttaaaatattaggaacaaacattccatgtgccagttagtatttgggcgtgtttgatgtaatgcaagtatgtatcagtttatttccacaggtggagagacaaggtagcaattagagattaggagagattcgacccatatcaagctatcaattttcttagggaagggacctgcaatgtattgcagctaattttatagacaatttatataccatatacagaacactagagcaaagggattggactaataataccatttataacatgttcattttttgagaattacgtactaaatatttctaaacttcttctttctggaagagtgttatcttcagactctttctcaccatttccagaatttgaaaattaatttggcttttccttgttgttttgatttttgagaagaagaagaagaaaaaaaaaaatagaagcagtgatagatttgaaaattaaattgtaaaaatgcaggtggtacagaac

SEQ ID NO: 99624 - DNA, 919 bp, Vitis vinifera
  Intron number 2 from transcript GSVIVT01035714001 (locus G SVIVG01035714001) derived from phytozome v7.0 (chr-ID chr4 ; pos 3580973 to 3581891)
cgtcttcggtcttggtgaaaatcttactccaagatgtaagagtttctcctcaattcttccagattctcaatgattttttgtatttatgttcatgtagatgtcctgttatgaattgggatttatttcaaaagaagtggtggtttcggactgtttggctgcgatatgagaaccagtttctggaaaatattttctaaccaaaaaacatgtttgaaagctaattctttcgggtgggtttcgactttcatcttttgaagtaggcacaattttctttcagccccaaaaataacggctttaccatatgtttggttgtcggaaaatttgtgggaaaacgcaaagaaaagaaaatagaagaaatgaaaaagggaaaataaaaaatagatttaaagttaaataaatgatttgtatatgccttttttaactcatttcatttatttttcttgataaaatattttccttaacaacttctttttgttcatttgtccaatactttattgaaaccaaacatggtgtcaagtttccttaaaacagcctatttttaaagaaacattgtttggttttcatagataattagaatgctagattttgatatatgggaagctaaacaccaatgcggcctcaaataacctttttttgggttgttttatactcatttttgttggttttaattctttttttgaattattggaggaatagatgtaaatttctaatccaaactggctgaaagtgtcatcattgagcactttgaattttggaaatcaaaagcgggtaaacttatgttttaagtttgatgctaaagtgctaatgatacaacccacctcatgctttcatattttaggcaatttatttgttttttccttccaaattctaacaattgtgcttccttttaatattctgttatgcagataaaatactcagcaag

SEQ ID NO: 99625 - DNA, 823 bp, Vitis vinifera
  Intron number 3 from transcript GSVIVT01034679001 (locus G SVIVG01034679001) derived from phytozome v7.0 (chr-ID chr1 3; pos 7546873 to 7547695 reverse strand)
gcattattctaggtatgtgattggatattctaacttcttcttccacttctttttattgataggctcactatatgtgcaaacccttttttctccaaattcatttattgtggtcacatgtctaatatatttttgaattgtttatttatttatttttgttcacgtgttttggtttgaaataattagcacttcatcaatgaatgaaagttaaaaagagaaatggattaaagacaccaatatgaaataaaggcattaatgactataccaaagctctagtatttggagtcccatggaaattgaatgagtccataaaattttttaaagcattcataaaatagatcctgtttggttctagttccataattctctgccagataatatgaatggttcttctttctcctgaagttgttccatcttacatgctcttattggtgccatcattggtcttctttgacaatttctgaaccatcttcatctgcacgttaatttttccatgtaatggggttggtctaagttttcctctgtgttccttgttctactcttatctttaactcaaaaatttcacctcttcatgatgttagctaatatttttgcatgcattttccatttgtcacgtttaattaatccaagcaacaagggcagtaacatggtttctactgctttatatgagattgcaaaatcttaaaatgctatgaaatgaggccatgtggatgccagtctaacacagtagctttgacatggacaaagactatgatagcagccttttttgtaggtttgtgttgttgttgctttatttccctttcattttctgtcacatggaatcagc

SEQ ID NO: 99626 - DNA, 660 bp, Vitis vinifera
  Intron number 2 from transcript GSVIVT01034679001 (locus G SVIVG01034679001) derived from phytozome v7.0 (chr-ID chr1 3; pos 7547715 to 7548374 reverse strand)
gggaaaagattgaagcttacaatctgggacatcgggtaataagcactaaggagttgtactaggctttcaacttccaacttcatgggattccaaggggttttcctccagatgcttctactgaccatattttttgtcacattttggtggttataattgcctcatttatggttgaaaattttctttgctccattattcaagtttagaaaagaataagaatgcttcttgattgtctttaggagtttctgtgaaatactattagctcagtggcagtttatctcatgcagcagaactatggataaaaaattggggtagttttatatgttgttgggtaaggaaaaagttttaatgcttttcttttaaaagaaacttaactctgaatgtaaaaaaaaaaatgaaggatttgggaaacttttgtactccgtaaagggatgtcacccctctttgctgcatatgatttggaatggaagtttgaaatcttgttgtacattaaattataatacctgtagaatcaaagcataattgggaactagtgaggtgacatttgtgtttttttttgttttttttaattaaagacaattcaagttgtttgttagcaattttttattttttattttttgggttgcagctggacaggagaggtctggaacattgacaaacact

SEQ ID NO: 99627 - DNA, 562 bp, Vitis vinifera
  Intron number 1 from transcript GSVIVT01034217001 (locus G SVIVG01034217001) derived from phytozome v7.0 (chr-ID chr9 ; pos 12929921 to 12930482)
cttctcctgtctacgccgcttctcaaggcgttgaggtttcttttcactcccctttgtttggttgctcagaaaatttcggaaattgtttttttccttttttaggaaacgacaaattcattgctttttgtaaatcatcataataatgacgagctatccttcacaatatgtcgttttcggaaaaagggcatgtttttggagaatcataataatgcttggttgctgagaaaaagggtggaaaaaataggaaataaaattgaaaaatgcagttgatcaaacatgcttataaatcattttgatttttccatttaagggttcttgaattcatgttctttttccccttttggggagaacggtccccaataaaatgagctgacaaatgggtaatatgatgaagtccccaatattgaaaaaaaatctctcagcaaccaaacacagcataattagatttgttgttttctaagtatatattctttgtttgaaagagatttgtgaggtgtgattgctgcctttatttttattttgaattaattaatttgtttatctgttttggagtagattactt

SEQ ID NO: 99628 - DNA, 939 bp, Vitis vinifera
  Intron number 1 from transcript GSVIVT01037660001 (locus G SVIVG01037660001) derived from phytozome v7.0 (chr-ID chr1 9; pos 6628765 to 6629703)
cctgcgttctaaggtactcttccaatctctgtccctaattcattcaatcgacttctactttacatacaatccaaatgacgagaaaatgaaagaaaatttcgtatcagaaaattttcatctagggttctgagaattctggacattgcactttagctaaaactcataagactctttggcttcgttgatctgccagcaaagaaagtgagagagatataacatagtatcaaaatgtggttttcttttatttattttttcattttcctggtaaccaaacagagggttggattccactcttgagtgctttataagttggatatgccattgctggaagttttcaattcgtgagtttctctttgaacagccatagacagtttggattgcagctcaggctcaaatttttgttagattaacagtctttttctactcgggaatgttttcttgtgtaaaaaaccgtcttagtttagatacagattaaaaattttgagataaggtttttttttttttgtttaattgctctattttcttggaaaccaaatagagggctagggtttctctttgaatgatttcaacctgtcaatggtattgttgaaaattttgaattcttggattttattctggactacaggtcaagccagaattttgataaagattaattatctaggatttgaactttgttaactattttattcttaacctcataattaaggggaattatgacattaatctatcatgtttcatataaaagagaccctaaaatcaaattacaaacaaatcgagtcgtgaaaaagatccttccttcattctataatggtatagatgttcctctgcccttctgtatgcatagtaacatttgatgcagatgatggctatttctggcacttagaatactaataagattgttgttgttagtagagaggcttcttagcagcaaagaggaag

SEQ ID NO: 99629 - DNA, 654 bp, Vitis vinifera
  Intron number 2 from transcript GSVIVT01033414001 (locus G SVIVG01033414001) derived from phytozome v7.0 (chr-ID chr8 ; pos 20885221 to 20885874)
agggcattaaagccttctacaaggtttgatactttgagtttgagtaatggattttgttttcgttgttgaattgacaatgatatcaagtgtgtgtgtgtgatttttttatctgggttgaaagaactaagtttgttaggcattaatcaattgggtgatttgagtagatgttgtagttcgagagatctttgtcaaatccagtagcttgaatcagatttctgaggttttaggttgattgcagagaaagagagagtaattgctgtgaaaatgtggagaacaatggaaaagaaagaaataagagcatttaattggattattttgctgatttgctatcaccactgcgggaatactccctagtagaacttttctttgagtaccttgatatttctagtgttcaattttcctttgttgggataggaagaacatgttctttgcagtatgattggttgggtcggtgtgtattgattgaatgttgatgaaaattttccgctttctaattggagagttttatggaactgtttgaattttaaagccatccatccatttgtgaccagatgtttgtttattgatttagtcctttttcttctggctaattcctctgaatcacataattcttgttcagggactgtctgctgggttgcttaggcaagcaacata

SEQ ID NO: 99630 - DNA, 681 bp, Vitis vinifera
  Intron number 3 from transcript GSVIVT01033414001 (locus G SVIVG01033414001) derived from phytozome v7.0 (chr-ID chr8 ; pos 20885867 to 20886547)
gcaacatatacaactacaagacttggatcattcaagtgagtctgtttgcacattaaaaccaaagtttaacattgcttcagaattgaggatattgtccttgcttgttttcatttctataataaaaatgcttttcagcataatatttctattttcattttttttttcagaaaatgtatttcctgcaaaatatatttgttagctaggggcatacatgtttcctccaaaaataattgatcgccatccctggtgatcaattacaacaaatggttttgactagtggcactagaaaccggacgctaagagtatcttagttctttattggtgataataaactcaatgcttttcaaatgtagtgtttgatggggaactcttctcatttattactttgtagaaggttatacaacatattgatgactgaatttgaattattatgtttctatattactaatttgagaaagtagacgttgcaaaattgggtttagatttgtaaaggctattgtcccatgtggaagaagaaaaattagtggattttgaaggaagttggagtctgatttcatttatttagatgtggcctttcaaatgctttggtgcattggttttttctggctttaagggtgacaggaaccttttaatcattttcctttttcctcagggtcctgacaaataaagctgttgctgcta

SEQ ID NO: 99631 - DNA, 526 bp, Vitis vinifera
  Intron number 3 from transcript GSVIVT01030550001 (locus G SVIVG01030550001) derived from phytozome v7.0 (chr-ID chr1 2; pos 6653653 to 6654178 reverse strand)
gacaaggtatgcttgtatgagtaaaatctcacttgtaggttttttattgttgtttactttcattagcatttcctcaggttttctttttctctttctcataataatatcaatcaaacttcgaaacaatgaaactggtcagggatatgttagaatcgtttgaattcctttttcatgattggcatctcataaagatctatctctcttgtataaggtataaactaaattggattcatcttttcttttcgtatagagtcgtatgctacatggcatttgttcttgactttgatttgatgttggttttaaatttttgcatggttggaagaggaaaaaaaatgataccgttcaaagtaggaggttccaaattttggatcgttatgagcatttcaccctaagcttttcaagtctctctctgatataaagttatttggattctatttatcaccttcttttgttttattttgcttcttttcttttttccttttcggtttcagatcagtggattagctcaaagatacccgggcttaat

SEQ ID NO: 99632 - DNA, 329 bp, Vitis vinifera
  Intron number 1 from transcript GSVIVT01036475001 (locus G SVIVG01036475001) derived from phytozome v7.0 (chr-ID chr1 4; pos 22532666 to 22532994 reverse strand)
ttagagagtctaagacaggaataccagcattgcaggtaaatttttgcactgttgtttacaagtgtctggaagttgatgttttcttaaagttaggtgctaatcactttaagcgatcaaactggaagttgattctaaatagtatattaaaaatatagcttgaagtttattgtaggagttcagttataagtaattgtttcttggaattgttttccactgtaattcacaggttctccttcctttgagtcttggttaaatattcttcttctaattcatttgactgaaatgatgaaggtgccatgactttctattttgatcattcagggctacct

SEQ ID NO: 99633 - DNA, 776 bp, Vitis vinifera
  Intron number 1 from transcript GSVIVT01033285001 (locus G SVIVG01033285001) derived from phytozome v7.0 (chr-ID chr8 ; pos 21825619 to 21826394)
aagtactctcagctgttcagaagtatctctccttcaatccacctctctttctttactaaatttattcttcaatcaatatatggatcgctacacttgttcttgctacgaaaactgaaaatggttgttgtttttgctctcaataacaaaagtacttttcccaatatgttgatatggaatcaattcattgtgttttctaaagcattgatgttgggtccattgtgcttttagtcatcgacatgactgtagggtagtttgatttcagactttccggtcaaaatgcccttttgggcaaacccaagagtaagaaaggagacggtatttataaattgtacctacagtataaatttaaaaatcacattttgaaactgggtctaaataacagtacttttcagtgcttctgaagtgatgatatctttgtaaaagcacttctaaaagagtaaatagaatcttggttatgaggcttcttaagattggaatcaatgaattcattccatctctgtttggtccctacaatgatttttcacacttacactgccaagttttgtatccagagatgccatgttgaatagaatggattggtttaatcccagtaggtattaacacaaatcctgaattgttcatccaaaatcctatgtaggatggaatggattgatttaattttactgaacttgcagcaacagaatggtgattttttatattgttaataaaaataatgtcactgaggtttttatgtttgggagatttctgtagtgacagcttgttttgactctgtaggt

SEQ ID NO: 99634 - DNA, 700 bp, Vitis vinifera
  Intron number 3 from transcript GSVIVT01036794001 (locus G SVIVG01036794001) derived from phytozome v7.0 (chr-ID chr1 9; pos 22472584 to 22473283 reverse strand)
acgaagttaaaaggtactaatgtaacattctcaatatattagaatatatcgaaggaagggtggccacatatgaagaccctattccaaggtcaaattttagatttttgtgtttttcctatcactattcctatactattaccagtgcaccttatttgtcaagatgattaaaagggaattccctaggataattagtgtctcaagtgatcttgaggttcataaatttttggtttccacaagataggtgccaactattttttttttttttttacacccatgcaatattccagtcatctattaacaagggctaaaatttcttgtagagaatagaataaagaactaaattacatgaaaataggacattattattctatttacaagtaagggccaaaaattattgagggtcatcaagcacattgttcctaaaataataacatccatgttattgagcaaaagttttttatattggcacctcatatgtttgtttaaatgctcacatcaataactttgaaaatattttccagattttcgaaaaattgtaatgttgtgcactaagctaatcattttacttggagttctatattctaagagtttgagaaaaaactgtttgatatgacaactctcaatcttaaatgttgttttgtgtttggaatattactgcacttgatagatgccctcacctctcttacagaacttggaattc

SEQ ID NO: 99635 - DNA, 772 bp, Vitis vinifera
  Intron number 1 from transcript GSVIVT01033337001 (locus G SVIVG01033337001) derived from phytozome v7.0 (chr-ID chr8 ; pos 21375808 to 21376579 reverse strand)
gtcaagaatttttttcatagattgatcgtttggtttctaagttttatgtctttatatttatttaaattaaatttatttaattttattcataataaattaaaaatacattaatcaggtggaggggtatatgcctctgctgttgcctttttgaaattagaaatattaatgttttctaggtatatattatcatttttgtaaattttaaataagttttatacttttgattgtattcttattttatatttttatatttagatgctaatgcataatgataatttgttttaagaatatataaatatgaatttttcttaattatatattttcgattaggatttacagaagatccacttgatttgatgacaatctaaatatctcgatcctgaaaattcacatttaagaaaagccaacaacatcttaaagccggtacacagcttagtttggcttataaagaaactgcttttaattttaatttttttaatatataacttttttgtgtgtaagtgtgttttttttaattagaatttattttttatttattttggaagaactttgataacagaacagagaaaaaaaaaaagaattaattaatgtgaatttatttatcattcataaaatcacatcaattgcaaaatcataatcacatctctcctcctctccaccagaaacataaaaacatcgcacaaagcctcttttaccttcaccacacatccacacaatactcagcaacagaggcatagttacagacaacgtaccaaaacttcgaaattcacca

SEQ ID NO: 99636 - DNA, 866 bp, Vitis vinifera
  Intron number 2 from transcript GSVIVT01038568001 (locus G SVIVG01038568001) derived from phytozome v7.0 (chr-ID chr1 6; pos 21801090 to 21801955)
gagtactcgccaaatcgttcagacacattgttcaggtattttctttgacagacattcctctcgggcatactaggttttgtgccatgtcttaaactttgttttcaggaatattgcaaatacattggtagatgaaacatgaaaacatcctatagggcttttaaactcatattgtagctatagtgtccactccaagttttggaaattttaagtataaaacaacatatgggttatttttgtctgagaattatttctcaaacaaaatatgatgatgaattgaggtgtttatgtgtaatcagcgttttcaattgaatgtcctcacaggattttcttcttctttttcctttttttctctcccttttgcgagtgtgtgttttccccgtaaatttcccatcttcagctagtatttgttagtggtagagtttgcagacatttaagcagtctgtgggttacactcgagtttcttggttaatgtgtctgattgtatgattactgtatattgaaatgtcgagtttttcaggaatatgtaaatgaatcccaaatttatacaatagttttcaaaattaatctgcagattctacaaatccattctcgaaagttttcccaaactgtttttggaacacttggaaaaatacatttgccctctccatggattcgcattttcagcacaatatttttgtgagttaaagtagtgtgaggttgaatattcaaagtcatcatcaggctagtgccgatacattcttttttttgtgataaaaatatttgggcataattttttcaaattattgagagacttaaattctcgaagtcactatttatatccggttcctgcagaaacaatagtcacagtataactggcacggatcagg

SEQ ID NO: 99637 - DNA, 969 bp, Vitis vinifera
  Intron number 1 from transcript GSVIVT01032540001 (locus G SVIVG01032540001) derived from phytozome v7.0 (chr-ID chr1 4; pos 28185931 to 28186899 reverse strand)
acgtgtccgccacgtccctgaaatccgagccaaaggtgacagcagctctccttaccttttcccctttttttttggattgtaggatttgaattcgcaaccctaaagttcagctgctgaatttcagtttttgtttttgaatttaatgcctttttgggattttgtttctggggttttcatttaaacattttggatttgtttcctatgtggggcctttcacattgcaattttcttttctttgcttttctcttttggcttatttttgtgaggattgattgatgattatacagtttaaacatgagggtgggagcggagacaagttttgctgttggaatagtaagatactgctagtgggacaaaatttgtgtgagaatttcacggttgatgtaggaagttcttcaatttggctcttagagaaactgaaactgaaaattaataaaaatagtcatagtaatgatcgatgggtgcattttaggattggtttctggggaaaatgatataaaatatagtgagctaatgttttgtgcaattagtggttctttttttattatatttatgtcttctttaacgagatgatttgttttgaaaatgaaagaattataggaatcgtaattgaagttttatgtatatatattggaagactactctgtttcagctataaatgtatcatatggcacactgaaataaacacaggagatttttactagcatgttgcaaatcaattttatacttgtcagttcggacgagattacttgagttttacagcctgtacatggcgacttaagcttcttctgctttgcggagtttttatttttttggatgttttggttgttaagattgcatcttatattttttattttattgcaacactcttgtttttctcctcttcagttatagggataattgttacataaatttaagagcctgttgtttgttctttcagtggaaccatcggataagtctgttgagata

SEQ ID NO: 99638 - DNA, 876 bp, Vitis vinifera
  Intron number 1 from transcript GSVIVT01034090001 (locus G SVIVG01034090001) derived from phytozome v7.0 (chr-ID chr8 ; pos 15249811 to 15250686 reverse strand)
tgttagtattattttttaattactccttcttagcctgataatacatatagagtataaattatataaattatgatataactttgtaccataaaaataatatataattttaatctacaagaatatatggttattattctatgcaacttcatgctataaaagtatataagttattatcattatttttacacaacttttgttgtaaaagcatataattttttttactaaattttaggcttcaaagagtttatagaataatttaaatatgtatattttttctaaaaattagataaaccaaataaaaatatatgcaatatcaaataatttttcctcaatgataataataacagcacttgacgtgggagagaagtttaagaggaggatgagtcttttccatttcatagtcatgagtcttataaatgaggtaaagaataaaagaaggaaaaaaaaaacgaaaattttaaataaaattggaattcgtccgatcaagttatatttattttcattctaaatggttgccctcacaatcatgaaaaggccaaaagtcaactattacattagtatttagacatgaaaacaaagaggtagcaaaaataccaacaaaaaggggtagtaattcacatttttgagcatatatttacgatatattattattattattattaactgtctctggcagtagcctccccgcagcataaaacgcgacccagcccaacagggccacagataattaggccattccaaacccacccatccaccgattccacccacgctcacgattctcctttttctctcacctcctgcttcctcgtcatcatccttttcaaataccacaaattaaaagttttttcctagggtttcacagagcacccgatcgac

SEQ ID NO: 99639 - DNA, 693 bp, Vitis vinifera
  Intron number 1 from transcript GSVIVT01036042001 (locus G SVIVG01036042001) derived from phytozome v7.0 (chr-ID chr4 ; pos 7749227 to 7749919)
taaccttttagatcaggtgagtgaaaccaatatttgtgcatttcctttttctgttctctctctctctctctctcacacacacacacacattacgtatttctgaatatgacagcagaaacaccaagcgctagaagataggacgacattaggtattgctgaatatgacagtggaaacaccaagtcctatttttaagttgggcataatcctgatggtgatatcctacactctgaatccaataaaagaaaaatgaaagaataaactgtcgaaaacattgatcatatggagcttgttaacaggaaagaggcaaattggtctttggggatattctttatattggaagcatcaaaatccattttaatggttagttttgagttaggcagtcaatactgttcggcaagaaagtttagttttacccaatattctgttagtatggtaaacaatggtgggtattctttcatgctactgtatcttatactcctgtcactgtgatagtaagggattttagtcttttaattcttgtgtagtttttgattgatggttagaatttgttttattcaagggctaaatttaacagtaattaaagtctttggtctttagaatttggttcaatcatctctttttggagttattggggattctatttaaaatgtgttcaaggcttttcttttgaacacatcatttttcagagctct

SEQ ID NO: 99640 - DNA, 493 bp, Vitis vinifera
  Intron number 2 from transcript GSVIVT01037102001 (locus G SVIVG01037102001) derived from phytozome v7.0 (chr-ID chr1 8; pos 29116327 to 29116819)
tcaagagcatctggaaccacgctgattttattaaggtagtggggtttgttggaaaaagaaacatgtattttagggtatgtttgtttgcggagagtttatggaaagaaagtaacaagaagattagaaaaaaggaagaatatttgggatcaaaactcaaaaagtcaaaacattctcactgttaccttctttaacttaaataaatataagatagtttgatgaaacttgaaagggttattctttattgaatttttaaatgggggaatatttgattatttgtgagaatacatttttttaaggatttttccaagaaaattgagaaaattttctttttaacattttttcacttatttccatttccattattgaagccggagaaactcattctaggtggcaagtaaaactttgagatctgatggggtgtgtgttggtggggtggggtgaaaagggatgattttgacatgaaattgatggagaaaatgatgacaggtgagtg

SEQ ID NO: 99641 - DNA, 599 bp, Vitis vinifera
  Intron number 1 from transcript GSVIVT01034578001 (locus G SVIVG01034578001) derived from phytozome v7.0 (chr-ID chr1 8; pos 19152610 to 19153208)
attaaaaataaaatacttgatgtaaaaattatttaaattttttttaaaataggttaaaaatattttaagtctttaaatagaattttattccttgagacgttataaaatagtttttaaaaattgtttaaaaaatatttttcagaaatatttttgaaatttgttgccaaaagagagctaattattttggtccaaaacttgtaaaatcaaacattctcatgcttcaaaccaaagcaataaacacaatggaggaaaagcgggaggcatctgaccttatttcaattcaagcatactgggattttttctactcagttcccttttaagtcacggaataccaaattctggacagtgtgatacacacactccaaaggcgcttgaacaccaaacttatggaaaagaaacttccaactatgccttctgagagccatcacctctgttgaaaacatggccacatctcatccacacacacattctccaattctgataacacgaaccacccacaggctacaatccacttcattttgctcttctcgttctctctctttctggattctatccataagcaaatcagaaaaaagcccagaaaaaaaaaatccaaaaag

SEQ ID NO: 99642 - DNA, 205 bp, Vitis vinifera
  Intron number 1 from transcript GSVIVT01034496001 (locus G SVIVG01034496001) derived from phytozome v7.0 (chr-ID chr1 8; pos 20345852 to 20346056 reverse strand)
tttctcactgctctcttgctgccaccacccattgagtaggtcttcacacgcacaccagttctgtttctatttgttacttttctttgaattcccatttgtataggttgaaagagcactcttttaatatgtgaaatttgtgtttgggtattgctaaataatgttaaaaatttcctgagtcttttgagttaaaaatgtgcagattttg

SEQ ID NO: 99643 - DNA, 782 bp, Vitis vinifera
  Intron number 3 from transcript GSVIVT01033039001 (locus G SVIVG01033039001) derived from phytozome v7.0 (chr-ID chr1 4; pos 25265886 to 25266667)
gtccaagctcaacagttcacaacagagcatagagagtatcctcttaactacattatatggattggaaattttatatcttctttctttcttcttgttcatattttgttcaatataaatttattgactgtttttacttctataaaggggccagccttctttcttagagttagattgacaatgacaattaaacacccacttgttggttccttctcttacaagtcacatcattcattgttgttaaactaaagtgtagttgcattcgtaaattatctttataaggtaccactttggaccaaaattgtttttaagtggattacaattgtagaacattctatttttttgaagtgtagtttttcgttcgaagaatattttcattgtgtttcattagtgtttattgataaacattctccttaacactacatggtgtatttggttttgtcttttcttttagtgcatgttttctcttttctgggcatggatacatttaagtctttatcaatatatatctgttctgcctctggggatatgtatgaaattttcatttgattttaaagaagttgggccagtatagttggtttatgagaatttgttgtgttcgtttcttgtcctatatcttgccttggttagtcattatcataattactattaatgactgaccatctttgaaatacaacttgacctctcttcatattcttctattacttcttttccattcattccacttgtaccaaaggtgctatccttaacacggttaagctttatcacattggtgtattttccat

SEQ ID NO: 99644 - DNA, 823 bp, Vitis vinifera
  Intron number 2 from transcript GSVIVT01032580001 (locus G SVIVG01032580001) derived from phytozome v7.0 (chr-ID chr1 4; pos 28559320 to 28560142)
ttcggcgtgaacagtggctttctcaaggtatgtgatggataaaattcatttcacctgttttgtctgaattttatagaacagcagaatgtagtcctttatgctctatcgattacctggaaaatataggaaaagaagagaaaattgaaatattaagtcttaggtttttttccccttttaagttgtgcacaggaaacaagtttcaaaacaaagacaatgtagacatgaaattgagaattttattgccgtttctcttcccccttgctcaactaccaaacacaagactaagcgctgtttgataggtggaaaatgcagtgaaaagtaaaattgtatttttgaatctcagttcagaagcaaagaaaacaaaaaattctagtgaactgagcctggtgcaactagttggcttggttgagcctttgaggtgagttttatttctttagaaaaaaaaaaaaaaaaaaccaaaagcaaattcaaatgttcaactttagtaaagccttaatcccaactatttgggtcagctaaaccaaaagccaagtagtcttccttttcttttaattcattcgcttagagaagcctacagaagggttattattactagttcccatttttgcttttgtttagattaagaattccagataagttgttcaaatgaaaaagaaaaaaggaaaagtgaaagatttggttcatgggttttttttttttttttcctcttctaaggcaagaattgaaatagagatgccttgtaaaatttatataataattgcaatatgttaaaaactgtttcttgataattgatttgggattgtaacacagtcaagaacaaggg

SEQ ID NO: 99645 - DNA, 432 bp, Vitis vinifera
  Intron number 1 from transcript GSVIVT01036003001 (locus G SVIVG01036003001) derived from phytozome v7.0 (chr-ID chr4 ; pos 7008522 to 7008953 reverse strand)
tcgagaaagagttccaacagatttatcctcacaatgttagctctccaatttctcgcattttttccccctttttgtggttttcatcctctttttggtttccgaaatgcgaaaagactcaccaaatttaatatttttttccctcgtttttgagaaaatagaggaaagcaaatgaaaacagaactgaatctttaaaattttctactctgatggtgtttctttcgtcgtcttgagtttatttatttatttttatccgatttaagttgtttctgttttaccacattttctcaccaaccaaagggagcatcaagggaagaaagttgtgaagataatttgttttctttacctgcattttttctcagaaaccaaacagaggattagtatgatttaggagatgtgtttttttaatggtcttttggtatgtaggcaaatcct

SEQ ID NO: 99646 - DNA, 903 bp, Vitis vinifera
  Intron number 7 from transcript GSVIVT01037176001 (locus G SVIVG01037176001) derived from phytozome v7.0 (chr-ID chr1 8; pos 28306903 to 28307805 reverse strand)
ggtttacaggtaattttcgctgaatgttcataatttatgccactagttataaataatgaatatatagttaaatgaactacttcctatgtgctgctcagcttcttttttaacgattcaaatatgtaaatgtaaatcgatcacacctgcatcattgttcaagttgtattttctgaatacctacaaaaagttggttagctacaaggtcagtttgcctgggatgtgttagtttatacctttggaacaaacaagtagaatctaatttgcattccagttatggggattaacaccattggaaaataacacctatttctttggcaaagttgagggccatagcatatgggctgggggtttgaatttttctgacataatatgcaactagttttcatataatgttaggggcaatgcatagattttcatgattttggcagttaagtgccaatgtccatggatgtctggggtgtggtgggactccaggagaaggtgttgcgaggtgaagaggccatgcaactcctctttgcagttgacaaggagggagttatctttggcatctcaggaatgcatgcttgggcgagaagacaaaaatagagttaaaggaaattgaaccctcagtgaattatgaggagaaatagggagggagggagtgggagatgtgggctgaaaagggagtggtccagatgttccaatccctacagttaaaatcattagatcctgtttccagctgttctacatcactgtgaggtttttcaaagcagtgattttattgttgttgaaattaaaaaataatgtagcttttctatttatgtctttcagttggttaagaagaagatggatgaggagtacgaattgactatggaggacattgattcgagtttggtgttcatgtacatcctgtaacagaggagg

SEQ ID NO: 99647 - DNA, 910 bp, Vitis vinifera
  Intron number 1 from transcript GSVIVT01032665001 (locus G SVIVG01032665001) derived from phytozome v7.0 (chr-ID chr1 3; pos 1671715 to 1672624)
tgcttgagcgcaccaacaaggttccttcccttaatccatataactcctctagttttacactgtatcatcttctctggttgctccattctgcattttttgtgggttctgtaattgggtctgcaggtttgttgagtcacattcttgggttgttctttgcagtttcatgaaatccctctactgggttagcggaaaaagttgttttgttgggttgaatttgagtgggtttgttacgaattggacttttgaccattatggtggaatatgccacacatttcttgtatttgatattgaatttcttggtttggattgggttaatttaatacctcaaaaaattctgttatctggggttgggttttattggattgaatttcaagattattggatggaatcttggatgctgctcagcttgcaagtttatagctttgctagtaaaacaagtagcatatttgaattgaggtgacggttgtgaatttcctacttttcgtgttctgaataatgagtatatgccattattatatatggtttcttctaaccagatagactatgactaaatttgttcagataaagaaactgagaaagctacattttgagataaaagattgtaggacaaaataataaactttcccaataaatatatcaaaatattagtaaaagttgactttgatttttactcatccgaccttagtaaatggtggctcaagtgttttcctaattgccggtgtatagcacattgtaagcaggccaacctgttgaagtaatttgaacatggtaaattgaatttcgtaatgaaccataaatgtctttttcatgacatatagtcgtatacagttgcttttttttgtttttgtttggctataaacacttttgctcgttaggtggtggtccttggaggtggatcatttggtacggc

SEQ ID NO: 99648 - DNA, 819 bp, Vitis vinifera
  Intron number 2 from transcript GSVIVT01031228001 (locus G SVIVG01031228001) derived from phytozome v7.0 (chr-ID chr1 4; pos 1038898 to 1039716 reverse strand)
gtgatgtaagtaattattttgttctttcaagggtaaaatggtcagaaaaaaatcatttgcattttgagtcagtccataaatatgagtcatcttttcagtagaagggcaaaaaggaaaagttgatcacgtgggaagaaattaaacgtcatgataagggtaaaatagtcatattaaaatgtttctacgactaaattaatattttggcattcactattatgtatgaagtcataatgtttcatcaatggttaaaacggtcaaataattatttttgatgtgatttgacttgtataaccttggttaaaattttatttccctttctcgaagggcacaccatgatcagaaaaatgtggtatttgtggttagactaatatacccttaatagaactttttaaggtaattttgtcgtatgaaaatattaaggtgtaaatggccataaattatttgtttaagggtaaaatagtcatataaaatattgatccatctacaatattttgcaatattgtagtgaattaatctaatggtttcataattggctttgatatattttttagaaaatataaacttatttgcatgataatgtgaattgaccattatacccttaatggaagtttcgggtaattttatcacctgaaaatgttaaggtggtagatggtcataatttaagggtaaaatagtcatgtaaaaattgacccatctacaatattttgtaatactttatagtggatgatattaatagtttcataattgacttttataaattaatttgcatgatatgtgaattgactaatataccctttggtgtagattaaggtggagact

SEQ ID NO: 99649 - DNA, 471 bp, Vitis vinifera
  Intron number 2 from transcript GSVIVT01031305001 (locus G SVIVG01031305001) derived from phytozome v7.0 (chr-ID chr1 4; pos 513618 to 514088)
tttgaagcccaaaaatattaaaaatcgtaaagaaggtaaagaaagatggaaaatgcattttgttaacatggtgatctgttatctcaattttctgatacatgtgcaatcatcagaattatatattcaaaaacccacccttttatttggttgtagggtaaatgattggaaaaaagaggcatggttttcagttctatgcttttgattgctttataaagaactgcagtcaactaatccaaatagttgtaatacatttggtcaaggacttttggtttctaatattcaacattatggtttcttccccacctcgtcccatttctcagaaatcataagtagtataaatggcttgctaatgttggattgttatcttggagttgcattgttttagtttgtacgaggcatttattttttcttcattcaccaaaaaatgagcttgaattgtatatttcagggtctaaatctagcaactccaag

SEQ ID NO: 99650 - DNA, 677 bp, Vitis vinifera
  Intron number 5 from transcript GSVIVT01036387001 (locus G SVIVG01036387001) derived from phytozome v7.0 (chr-ID chr1 8_random; pos 4515386 to 4516062 reverse strand)
agcgggaaggttgctcctcttgaatcaatcaacttgtatgtacctgtttttagatttttttttattttttatttgaatgatttgttggtttttgtttgtttttttttctttctttctttatttttgtttccgggaaaacggaggaaagagaaaaggaacagagttttggattaaaatagatactagctgtaatgtttgaaagttttccaattttagcagccaacttttaaaatttatcataatccaaacacacccttacattagagacagagagaaagtgaggaactggttcttcttggcttttttttttttttttataattatttcttgggtattttcctctgacttttccacgtttggttgttgggaaaatggtagaaagaggaaaaggaataaaattttcaacaatccaatgtccaaaatttattttcttggcagccaaaaagtgattcaatcaacgtggtaaagtacctacagtcacaagcaaagaaccaattccacattaatcatgagacagacatacccttataccaaagagaaagcgaataaatgagagagggtgagaaaaaatgaaagaaactagagagctttcttcttaaattagattattcctttccctcagttttgggcctttttttaatgatctgtttaaattgaactgtttgggtgccaggaaa

SEQ ID NO: 99651 - DNA, 937 bp, Vitis vinifera
  Intron number 2 from transcript GSVIVT01038665001 (locus G SVIVG01038665001) derived from phytozome v7.0 (chr-ID chr1 6; pos 21117020 to 21117956)
ccaagttgcttagtcaacggaagcataaacttaaggtctgttctgtagaatggttgaattttttttagatgattgtattagaaattggtagtgaatgccttgatgttcatgtgtgaattgaaggttgtgaaatcatctattgggttttgcttgatgtttaattctgggaaaaatttctattatttgattgtatgtttgtgtgtatagcttctgtgaacacaacaaaaaatggctattgattctgtgttaatcacaaaatggttcttgtattatattttggtagagaaaaatgcttttcttcagttcaaatttcagtggaaccacatagtccattcctctttctggattataacaaagagaggaaaatggctaatattgcccctgaacttttgttcttagtgccatgtatcaattaagtgttggaaactgcagttgcatcgccttactcataacataaatggaaaatagtatcgactctttatgccggaaattgtcattagccctctttcatgtttcttagtcttatcttgttctctcagcttgaaacccctaatctcatttaatggcagcacgtttacaatatgaggaaatccctctctctctctctctctctctctctccctccctccctccctctccctctccctctccttcacttacttactagtaagttcaatggcaatgcattgcaaaattaaactctcttgggtgctgagcaagtgttactataggacctataggttcattggagccttttttggttgagtaacttatctctttctctctagctaaattctttgatttatatgtccatgtagaatttttattttaaggtacttatctaaattaatctgttataccacagatggaatttcgtaacttccctttatttggtattgaagggaactgtgagacttcttttccagccagctgagga

SEQ ID NO: 99652 - DNA, 933 bp, Vitis vinifera
  Intron number 2 from transcript GSVIVT01034877001 (locus G SVIVG01034877001) derived from phytozome v7.0 (chr-ID chr1 8; pos 15773248 to 15774180 reverse strand)
ttttgggctggagttgtaatttctgcattcaattggtaagtctcttgatattttaaattgtctttttctttgttcttgtgtttctgcacaagaaactgagatgaagtctgccttttctttgacttctaattcgttttttttaatttgtcatttctttagcttgctttttttttttttttttttggtttggccctccacctcatatcattatcaaattccgttgacaaagtggttgaatcctccaaattctttatggatcattcacttttcaccccttctaaatactctgtttttcaccacttcttttttctttgtagaaaaaaaaaaaggtgaatactaatgttacctttcaaaaaaattagaataaatttaaaagtaacagaaaaaaccacaaaccaatgataataaaaaaaaaaaaaaaaaaaaggttgaagattataccagaggaagcaaccttagaactaaaacaacccatatttctctctttaagttgagaagggttatgtgacccaacatgttatctgtaaaagaaaatttccaaggtgcgtgaatggaaagagaatttttctttccttttgttttgccataggagaattgtttttggcatttcaatttttattaaaataagaaagtggtttgcataacttggaaagttaaaattattcaatatcaataacaaatacttactaagtttacgtacaaaaaatacaaatattttatgagaaaattttatatttatatatatatatatatatatatgggaaaaaaacttattaattgagactccttaactattggacaatgatattttacttccataaatttacaaattataaaattttattaaaaaaacaaaggaaactaataaaggaacttagataatgatatatgttctatgctggtgtttttttatatttgttttgtaggctatca

SEQ ID NO: 99653 - DNA, 770 bp, Vitis vinifera
  Intron number 1 from transcript GSVIVT01034877001 (locus G SVIVG01034877001) derived from phytozome v7.0 (chr-ID chr1 8; pos 15774162 to 15774931 reverse strand)
gcgcttattagaagcgtcattgtttactatagtatttttcaatccatggcgcttattagaagtatcatcatttgataaggcttatttgaatattattcagtacataatggtgcttattcaaagcgtgataacattaatcccataacttggcgctttagagaaatgtcattgaattataggtataaatacttccctaaaatattcccctttccacgatctctcatccaccaaacattccctctaccatttcaaacccccccaaatgctcataccaaataaacctgtgtacaaaaccgaataggatctctcatccaccaaacacatccttcttattactttcctaaaatcccctttatcactgttactgttaccatcatagagagaaaacttcaatcttgatatcgatgatgaaaccctagattctcttgatgttttcccgacttggtccttctcgtggaagaagttgtggctattcacggacgcgagtactccatttcttgatcctggaaacctagaaaaggatcttgaggctagagccactataggatattcattgttatggttattgatgtgggtaatggttatggggttcttgatccagttattgtcagcgagaattggggtggccatgggccatcatcttgctcagatctgtaatgaaagagtatcacatgggtcgtttttgtcatgggtttttgcctagattgaggctaatatctaggagctaattcttagccgtgggtttttgccgttttgggctggagttgtaa

SEQ ID NO: 99654 - DNA, 825 bp, Vitis vinifera
  Intron number 1 from transcript GSVIVT01034191001 (locus G SVIVG01034191001) derived from phytozome v7.0 (chr-ID chr8 ; pos 14538113 to 14538937)
tcccagggttcgttttttcttcatatatatgtagctagaattatattgttctttgggttattctcttttgctatcaattttgctggggcttccacattgtggtgattcagtattatataggatttaattattgtactgtttgtatgaaaaataatgtggttttgattgtggggttttcatagtccaatcctataggggttaagaaaaatgcttctctttctgagaacttgtacagagaactcatactaactgatgcagatttttcatgtggctgctcaagaaagtggaaggttttatttacgctattctgatatatcaagtttaacatgatatgaatagtggaagttctattacagtaggcaaaacattttagtttcttatagcttggatggcaccatgccaggtcgaggttctgtcataataaaatttctatttgtgacacaagtctttcaatctttaatgcatgaagagcagaatggttttggagtgaagaaatcatttaatatagtaaattgctgcaacttatgtcagaacctgaatagatgctcaaaacttattagttttctttttagatcctttgaaaatggtataacagtttttcttttgcttggagagattctaggaagctatatttcccaattacagatgaacttatagatttcccatatgcatgtccatgtatatggcttggctagctctacaatttttaaaattgctgtatttcaccacataaagcatattggtttggctaacctttctatgtatcttcttctttttctctttattccagatctcctgcacattttctcatacttgcctagggat

SEQ ID NO: 99655 - DNA, 587 bp, Vitis vinifera
  Intron number 2 from transcript GSVIVT01034033001 (locus G SVIVG01034033001) derived from phytozome v7.0 (chr-ID chr8 ; pos 15694716 to 15695302 reverse strand)
ttgggcctttctcaggtaccattctgcttgtgaattttatttttttttcgcaatttcggtgacagtaatgtctgagataggcaactatttgatagaattgggttttggataatctagcagaatagatgaataggtgctatttgtttatccaatctggttgatgacttttgctttcatttaggtggatctggtacatacagtttattagaactgttgatcaaaatataacctctgaataattagggttacacattcaaatctaaggcgctcaaaactggatcttcttcaatagaaatgtgttgattgttggaattcaagaaaactgaagtcctgataatgtcaagcataatgcaacctatgctaaagttgagcctaatcttgtttgatttgaagcttcagttgtttgacttggaattctcagagccgctgaatgaatcctttaggcaacgagcaatttcccgtgatcatggtcattaacaattttttatatgtggaaattctttgcactaaaatcatgagtcatgttacaaagatctgcttattgttttggtggcttcatcgttttgatgccttctccttaggttacc

SEQ ID NO: 99656 - DNA, 316 bp, Vitis vinifera
  Intron number 1 from transcript GSVIVT01035537001 (locus G SVIVG01035537001) derived from phytozome v7.0 (chr-ID chr4 ; pos 2122697 to 2123012)
ctcagtcaactgattccggcgtttcgtcggccaaagtgagtgtttaaacatccttcttcattttcttctttatccttttttgatcccgtcagcccctaaataattataagaaccggggctcactgttttagtttctttttatttttattttctctgtaaccaaacagagaggtagtgttttgttaagcttaggtttatatatatatatatatatatatatatatatatatatatatatatatatatatatatggttattttaaaatttgtatttattgcagagtcgtgaaactcaaggattgatcccagtgacagt

SEQ ID NO: 99657 - DNA, 371 bp, Vitis vinifera
  Intron number 2 from transcript GSVIVT01035537001 (locus G SVIVG01035537001) derived from phytozome v7.0 (chr-ID chr4 ; pos 2123081 to 2123451)
ttaccaatgtataattataaaaccccctcgtctctcgctttgattccatttgttttagcggagaacattttcccaagaaaagttttcactatagtttatctctgagaaaattgatttcggctgtagaatattgaaaattctaaaatctggttccctttcatctattgggaaccaaaaagaaacctaaagaaaagtgatgtattttttaaaaattatgcagatcaagattctttgatgggaaacactttttccacgaagatccttcatctggatctattttctgtcaaaacaaactgaatttctattctgtcttttcctttttctaactgaggaattcctgtttctggtctgcttagattacattggttgga

SEQ ID NO: 99658 - DNA, 288 bp, Vitis vinifera
  Intron number 3 from transcript GSVIVT01035537001 (locus G SVIVG01035537001) derived from phytozome v7.0 (chr-ID chr4 ; pos 2123510 to 2123797)
gtacaggccgaatagagtgtaaaaggtaacattttcttttctcgttgtttgatttaatgtttgtgattatactaaacatgaaacatggtgttcttcataaagcaaatgatcaaaacaatgcccatggaactgatgatatcaaattattttgttttgacatgaaagggaaatgtagtgggatttagattcaagacgagggattagtttatgttctatgaattcttctttagtaatgaaattcagagtttattttgatgcatgtttatgggtttttttcttgaagggtga

SEQ ID NO: 99659 - DNA, 790 bp, Vitis vinifera
  Intron number 1 from transcript GSVIVT01037895001 (locus G SVIVG01037895001) derived from phytozome v7.0 (chr-ID chr3 ; pos 6568199 to 6568988 reverse strand)
ccctggaggtatcttttgtcactatgttgttgggttgccgagaaaattgagggaagtgaagaaaatttatggatgcatattttcttttcttttcttttctttcctattttttttcctttttcttttttctttttttcttgttgtggttggctacggtttctctgcaaccaaaaatagcagtaagttttattcggttgctgagagagggggcggaagtgaatcttggagtcttacaagaggttcagttgcaaccaaacggggttttaagatttgacggttcttatttaggtttgattgcttctaggtttttttttttttattgtgaaggttgggtttccactagttcttgatcaatcatcggggtagggattccggatcactagcttgctgtttgggcttttggggttttacttcggtgcgattgtagagttgaattttggtctcttcaaattggatttgacgttaatttattttatccgtaggtctggttttcagtttattcttgatttctgatctgggttgaattcatttttattgattgagtgtttcttttattaatttactctctgtttgattccttagaaagtaaaggaaatgatattgatatttgaatcttcttggttttcaggaaatgtaaagtgcaacttaaataagtttttagttagctctttttaagtttccttgttggaaaatttaagctcgaaattttggctctattctctcattatattttagggttttgataagtctacaatgtggttgcttaattctgtaatgttttgtcaatcag

SEQ ID NO: 99660 - DNA, 465 bp, Vitis vinifera
  Intron number 1 from transcript GSVIVT01036103001 (locus G SVIVG01036103001) derived from phytozome v7.0 (chr-ID chr6 ; pos 20673904 to 20674368 reverse strand)
accttcaaatcctttgcaaaatcctctggtttcaggtatgtagaaatctcattccttaaggtccatattttgatttttatttttgcttcatggtcccttatacatacaatttgaaactaccaaccattcagtctcctacatctgtttcttcctgtacttagtgacaattaatattagagatgcaaggtaagagaaaaaaaatgaaagatggctttttgtatcacgattaaataatttttatcttataattatacaaatttataaagcattttgtgaaataaataattttaaaggaaacaatattatttgtcccacaatccaatctgccttgcagctagttaaaaaaaaacttacacaagaaggaagattgtagccaataaaaatactaaatgaataatatcatacctgcaagctcaaggtagatgcctattaatttttgacgtggtgtttctcttccagccttca

SEQ ID NO: 99661 - DNA, 569 bp, Vitis vinifera
  Intron number 1 from transcript GSVIVT01033840001 (locus G SVIVG01033840001) derived from phytozome v7.0 (chr-ID chr8 ; pos 17317988 to 17318556 reverse strand)
ccttcgtcatcctcggcgccttcgctggagaacgtgtaagttttaagtttatggatttcaattgattctcatccgatctgactgaccgctgcgaaaaaaaaaaacccggggaaataaaagaagatggaaaacctcaattttagccaaataattgtgtttgattgctgagaaaatcgaaggaaaataaaaggaaaatctcctctagtggatgaatagaggttctggttgtattggatccaaaggaatggaaaattcgcagactttttttttttttttttttttaatctcagcaactaaatgcaggacagtggttgcaacccattttcgggttctggaagaacatctgtctattaaatcttggtcttttgctgcaatttttgaggtttttaattgcctcacaattttattttcttttgttgatcgaggattccaatggtattggcagatggtgtcactttatatggcgttttcctgtcgattcttttcatttttgtttttattttttatttggtaatgattgaaacgatggttcttattctaatcgatttcctgtttttaggctgtggatt

SEQ ID NO: 99662 - DNA, 613 bp, Vitis vinifera
  Intron number 2 from transcript GSVIVT01031262001 (locus G SVIVG01031262001) derived from phytozome v7.0 (chr-ID chr1 4; pos 706907 to 707519 reverse strand)
cagggcagccaacccctgcatctcaccctcaggtactgttaactttatatccaatgtgtaattctgattaacctaattttttctttcttttttctaaacaaaacatattagcaagcatatcactgcatattattggctaattgtaggaatgcaggaaggcagatgaatgcctagtagattcgggtttcaaataatttggaagttctgaggatgtgtgctttctgtttgtttcatttttcttcaacaagacttataaattgttttgtagtttcccgtattgggctattttttgagagaaatctcaagaaaacgattttccaaaaattcaatgcctaagtgttatattcagacttttcattttcccctgttttcagaaacagaaaagtttttttcaaacaaaaatcactgtaaggagttaatcaaactgttttcatgcgattagcctttaaataactggatttatttgggtacatctacgggaaaaatcagaaaaataattagtgtcactattgccttgacataagggatatacctctgtgcttttaattaaagtcggaagtcattttatttttaatttaataaaattattgtcgtgtggttctgtagttactaa

SEQ ID NO: 99663 - DNA, 532 bp, Vitis vinifera
  Intron number 1 from transcript GSVIVT01031262001 (locus G SVIVG01031262001) derived from phytozome v7.0 (chr-ID chr1 4; pos 707552 to 708083 reverse strand)
gaagaaaacttctgcaaaggagctcattcatacaagtacagtactctttttcagaaagcattctattttgtgctcttctgtattttttttggggtgaatttttggattctaaactggtaattaagttaatagatagctgtatccacgttaaagtttgtaactttatgaactttcatgcagcatttgatctaattttgatggattttatggatatttgaaaagggtattttcaaaaaacagttctcgggatttaataagaaattttttttgctcctcttcttttgtcttttgttcccaatttcactttatctctcgtctttaggttttgttcatattgggttttagttgttttggataatgatgaaatgaagttatttgtaaagtagagttctagtggttccaacattctcattgaaagtggtaatttgggtagattttgattaatttttagtttttatggaatgcccagttggtttttgataaagatgagttatgatatttcatgaattcgggttttacagggagttggaag

SEQ ID NO: 99664 - DNA, 962 bp, Vitis vinifera
  Intron number 1 from transcript GSVIVT01035767001 (locus G SVIVG01035767001) derived from phytozome v7.0 (chr-ID chr4 ; pos 4145354 to 4146315 reverse strand)
ccttgaagcccagcgcaacgatctcaattcccgaggtttttccatcccaaaaccctaaccaaaccctaattttgatgctatgattttcagaatgatcattgtattgtgacgcttataattttgttatgtgcagaaaccctaatccaacactggcttctgataatttttggtggctgtgttgtattttgattttattttggtaatataggatccggatggtatggatttgtcaaagccctatgttttgaaacttgatttgtgattgcagttgcgtgatttgcgttgctctgttatcggtaaatttaaagttttattggttgcctggaaatgtgggaagaaaaaaaaccagattaggctctcgacgttcaagatgtcttgattttctcagctcagttatttaatttagctctctttggttcaatcgagtgtaatttttcttttgggtgagaagtattgcgaaagattgtacttataaaaaaaataaattggcaaaagcttatagtaatagtttgatttcttttccttttttttttttttttggcttttggtttagaaaatgaaatggagggcaatgtttgaagatttagtgcctctgcttgatattaaaagttgtatctttttaaatatttttctttctaaaaaattttctccaatgatttggtgaagtaataaaattgtttgatgtgtagcttgatgggaatacagctggtttctttgtgggaaaatgggttcttttgggttaattttcattcacatatgagttattttgggttagttttcattcatatattcccccagcttttatttttctccttttcaaatgtcattctgaatgatgggtattggacctgattttaggtcacagttgcatagcattaggaattcttttttgctttcctattccttactagaaaaattgaaattttgattaatgaaccttggtggtgttacattcagtgagg

SEQ ID NO: 99665 - DNA, 525 bp, Vitis vinifera
  Intron number 1 from transcript GSVIVT01034589001 (locus G SVIVG01034589001) derived from phytozome v7.0 (chr-ID chr1 3; pos 14834283 to 14834807)
aattgtcgaaggtatcaaaggtattagatcatataatgaatggatttgaatttgcctagttaactttttctaatgcgacttactttgatgcattggagatatacacaccatgaaaagtgtttagacctccaagttgaacacatttgtccgaatttccgttactttttaataaatttataagctttgaaaatacaaaaataaaaaattaattttttattttatcatcattataaatgatttttttttatttgtcattgcttgaaaacaacaattttattctatttttgttaggattatggaagagttgcatgaggagaaaggggaagaaaggttaagagaagaataggtaaataaaagagattagggcttatttgtttttaatttactcctcttcataaaatatatagccttaaaaaaaaataaaaaataaaaaataaaaaaaggttgagaacttatatgatgggtttgggccagactcatctctgcaaagagaggagaagcgattgagaagccacaccgtcgccg

SEQ ID NO: 99666 - DNA, 780 bp, Vitis vinifera
  Intron number 1 from transcript GSVIVT01032126001 (locus G SVIVG01032126001) derived from phytozome v7.0 (chr-ID chr1 3; pos 22424956 to 22425735 reverse strand)
tccatattactggtcgcgtttccagcatctttaaggtattcaaatttaatttagtgcctgtttgggaagtgttcttgagaactgttttttttgttttcttgaacagaaaaacactaaaaacatgtttggcaaggaatgatgtttttgttgtccgtgttttccatgttctccaaaccccattttctgagaacaacttcaaggtgtttttcctgttattttgcagtatttagagggaaaaaagagttgttcttctttgttttcaaaagggtgttctccttgttcttgtgtctccccttctcagcctgatgttgctagatctgaaaacgtgttagctttaaccctctaaaatcaaactcaatttgctagatctgagagcagagaaagagcaaatttggaggctttcccatggaatttgtcaccccttcgtttatgattgacaatctgaaatgtaaaatgaaaaaaatccggtggtcaagggttctttccttaatctactgcttttatgggctagggattttagggaagctatacccaattggaataactaaaatgggtgaagaaatggttaccttgaaccttgtattgggtgttttggatggtggggttgatgatatccagagatttgctggaaggaggttgaagaaggctttttctacttaccttctgggtagtgtttgaagccatcactatttaatttcacgccttatctagaataatgtaaaactgatgtgattttggttagcaggatattacttctgagttcttaaggaaagtcaccaa

SEQ ID NO: 99667 - DNA, 668 bp, Vitis vinifera
  Intron number 1 from transcript GSVIVT01038626001 (locus G SVIVG01038626001) derived from phytozome v7.0 (chr-ID chr1 6; pos 21365464 to 21366131)
ctcccaccgccatcaccactgagcagattcagaaggtgttcttctctgcgacttttcactgattctttctttcttttcgaatctatgatctgtttgttttgcgggaaaccgtggggaaatgataaaaagggaaaacttgtgaatcatacagctgacaggccaacccgagttttgttttccttctacgttttttttttctcatgtgaattctcgccaaccaaacagagaatttcagagcttttatgaattttgaaatgttgggtaataggattattgaacaactgggcttttgattttgtaaatttatacaggaaaacaatgggtgtaatttgattgaagtagaccttctgatttgcctctcttggggcgatttggtgtagagacttttgtaaaagggattgagttgaaaaaatagaacaatgtaattacgaacagggctaggactaaataggcactttggatttgtttttattttttaattcataggttttgtgatctcttaatatagtactggattgggttgtgaaggatatattaatgaacatgttcctgggaaagggttgattccttttgattaaggattcacccattggtggcacctgaattgtgccctgaaactaggggtctaaaattggtttgctgatttttattctcgatgcagtatctgg

SEQ ID NO: 99668 - DNA, 1008 bp, Vitis vinifera
  Intron number 1 from transcript GSVIVT01034150001 (locus G SVIVG01034150001) derived from phytozome v7.0 (chr-ID chr8 ; pos 14817472 to 14818479 reverse strand)
acattttgaggcagctatagacaggatcataggtggtctggagaagaagaacagggtatttatttttctctcatactgcatcttccttttattttctttcagtatttatttttctcacatactgcatattctttttgtttactttcagtatttatttttctcacatactgcatattctttttgtttactttcagctacaaagtatgttgtttgtaactccttttccttcagtgaaaagtgattttgtacctctatttcacatatattgttcattggatgcattgatatggagtgtaagagtgttaatatattccgtgtttacttatcaaaaaaaaaatatggtgtaagaaatatattgtttgtcagatttattgatttataatataagaaatggaggtgttctaaaaataatcatggaaataattggacccttctcatttaaattactatgaataccccataaccactcccgtttgtggaggctccttagtgtatacaagtaagcacctagagcttgcaaattgtgattttttcttatttgttatattcaaaacagcaattttgcggcattaatggaatctcccaaagtatctcctatttaaagtatgagatctatagctgtctatcttataatcctattaacttttgccttggttttatatgttgggcagttctcataaaaatcttactttaactgtctctttctttatatgccttaaatgagttcttaatctttggcttagataatgcttgtataacatttaactgcttaaaggatctatttaaaagtgaaagaaaattttattattgaactttcctgacatttcaattgctatacatttcatcattctattattttaaaatttaatatgttcatttacctatagcattttcttgtttctcatttagggtaaatatttttattgactttgaagtttttagataatcaaaatggtgaaaaattaaaataagtaccattgctctatataactattctaagtcatctat

SEQ ID NO: 99669 - DNA, 940 bp, Vitis vinifera
  Intron number 2 from transcript GSVIVT01038137001 (locus G SVIVG01038137001) derived from phytozome v7.0 (chr-ID chr5 ; pos 23765194 to 23766133)
ctgaattgaagagaagaccaaggcgatttcgaaaggcaatctatctttccttctttctcttcctctctttcttccgtttctctacacatgcatagctttgaattattttgttattttattgggtttaaatttttgaggagtaatgctactatgggctgtttggttggtgagaaaatagaagaataggagggtatttttttgggaaagcagctcgttttctggaaattttgtttgtaaactaaagttcttatccataggtttgctgtgttatccgttcggttactgagaaaaagggagaaaacaagaccacattatgggaatttgtgtgtgtgtgcgtgtttcagttgtcaaattgctcaaacgtggaaaatgatatttattgtcttcatttttccatgttcgaaaacaaaaacagtagtgattttccattgaaccaagtcttaaaagttttgaattttatgttcagtaccttttgatttcctgatataaaaaataataataatgataataaataaataaataaaacaaaacctgcttcaggtatgctagggagttgtattaggtttggtttcatggaggacgtgggttctttcaggtccatgagtctagactaggaaaaatctaagaattcattatcaggaaacaatggaaacaacggaaacaatggaggcataatattattcattatcaactgagaacctcaacatgttttgtgtgttgtaaattatatgagaatcgaacagttgctggtggatataggagtattgtttgatatcttggcagtgcatattggagcatgtcttatatttggttttgtgttgttttgtttgtagttttaatgaagaaaaaaaagggaatgaacattcaaataacgtgttttagttatgcattgccttttattatcttgtaggtaatatcagctgacctaaaagcttcagta

SEQ ID NO: 99670 - DNA, 464 bp, Vitis vinifera
  Intron number 3 from transcript GSVIVT01031385001 (locus G SVIVG01031385001) derived from phytozome v7.0 (chr-ID chr6 ; pos 19289038 to 19289501 reverse strand)
aaaaccatctgccagacagaacagggagaaaacaggtcagctttagaatgccagctctttttcctattgggtggaaatgatgagaaaactaatgtatccatttgttagtcttgcatgcatgcaaatatttatccccttttgcaagggcatttgtcccactattgatggttctcacattaagcatttgtaacacattttcaacctgatttcagtctttcatgttctctagatgtaggaaatatgcagcaaagcatcaaaatgaagaaggcaaaatgatataactttggagtttgatgttctgatctagccaattagtttttttgaaatctcctcaacatgtttcaactacttctattttcaccatctattgcagttcctttccgttcctttccgtagacactttcaagcttctcagttatcaagcttttttgttgccagaacagaagttgttgagggagttccca

SEQ ID NO: 99671 - DNA, 970 bp, Vitis vinifera
  Intron number 1 from transcript GSVIVT01035106001 (locus G SVIVG01035106001) derived from phytozome v7.0 (chr-ID chr5 ; pos 1507843 to 1508812)
gctcaccggaacgagcttgtttctctcttcactgggtttgttcctctctcactgtggtcacagtaatggagattcatgcattcacattgtcaatttttacttgtgatctttgattcttacatgcaatgcttttttttttttttttcttttttaattcaggttgaggttctttagattgtacgtaagatagaggatttgttttgagtttagtagttatggtcttgattcttaacatgcattcctttcttgttgcttttgttttttcccccttttttttgtgttgaaaaatcatattgaatttatctagatggaaaggggaaggaaagccaaatgctgaaggattaccttaagttgtatccaattttcagcacttttctttcctttccaaaggcaaagaccagaaaagggaagctaaaggctcacagtggtggatttctgaagctattttcatttcctttcccatggagaaagggtaaagggaaaaagaaatgttgaatatttcttaaaattgaattcctaaacctctaagttagtatttttctacgatttttccttgggaaaagggggagatggaaatcaagatactaaaactaactttaagttggattcatgaagctaattttaccattgttctttcttttccctctgaaaagtggtggtcgtggttgtgctaggagaggaaaacaaaatgctgaaattactcgaatgtcgtttcctcaaactattgtcagcaattttcttttcttcactatgtccttttcatgatcaaaacggagtccatattttcctgaataatttcaatttattgcatgccaaataaagcttgaattctagattggtctctctgcctcttacccatgtactgtagtttgagacaatggtattatgaagtcttgttcagattaaattgatctgggttttgagatttggttgttgttttattttttatttttgggtcatcttggtaggt

SEQ ID NO: 99672 - DNA, 579 bp, Vitis vinifera
  Intron number 2 from transcript GSVIVT01035663001 (locus G SVIVG01035663001) derived from phytozome v7.0 (chr-ID chr4 ; pos 3116876 to 3117454 reverse strand)
gacagccgaagaggtaaatgtgtattttcatgaaatttgaaaaatttagttctctgtggtttagcgttattgcagatttattttattaaactgatgtttatgatgatgcccttctataacttatcttttctgatttgagaatgctttctgacacaaatgtgtttcagttaattattgaattttattttggactatgtttttttctcatgtattatctttttttttaaaggcaaaaaaaaatgtatacatcagaaaataacatagagaatccaaaatgagaatataaatgttattttctcatgtataagattttagtaatacatcatcatgctttgaggtgcctatttgattaaatttgttttttgagaaataagacacacttggtcctttttagtctttctttttttctttgaaaatttttgccttaaaaaaactgcatactgttgaatatgtatttcaacattatttgttgcttgatttgctaattgaactaatactttgtttattctgatcttcatataaacatacgctttactttgttagtttgtactcttattgggtagattttctttactcagg

SEQ ID NO: 99673 - DNA, 458 bp, Vitis vinifera
  Intron number 2 from transcript GSVIVT01035885001 (locus G SVIVG01035885001) derived from phytozome v7.0 (chr-ID chr4 ; pos 5267026 to 5267483 reverse strand)
tggaaaggaaaccctctccagtattgaaagaagacgtgagttttctttctcactcaaattttcactacttctactgcaaattgtgaatcaaatatcttcttggattacacttttttgtgtgttttggtggttgggttttgaaattactgatgaaaacattcatatcaagccttcctgggtatataatgaagccatgattttttgggtctgattgattcccatttaagttgggaggtttcttattatgaattctttctttctttcttttttaatacatatacgcccaaattaatttataatactaccgtgttaaaattgttgaatcccttgatcatcatcgccacttgaatgtctggtcactgatatttagctttttcttgcctaaaagacttgaaactctgtactgaatcagtggcttttgtgaacagactggtggtttggtagaagagttgcgtagg

SEQ ID NO: 99674 - DNA, 776 bp, Vitis vinifera
  Intron number 1 from transcript GSVIVT01031685001 (locus G SVIVG01031685001) derived from phytozome v7.0 (chr-ID chr5 ; pos 20175252 to 20176027)
cgcattcctcggccacgtcggctgcaaaacttcatgtaagtggttgatttggtgtttggctgctgagaaaattgagggaaaatgagagaaaaagaaaaaatcagcgtctgattaagtctttgtagttagttctgtgcatttttggaaatctaagatttggtttagtgtttttttccccttcgtttttctcggcagctagatgggatttaaggtaaatttgggagagtttagctttgatttgagcaataaattttttatagggtttattaagaaaatgttatatagatttgagggtttaattttacaatgggtgtttgattcgtcgaattgactggaggatttggattggatttctggacttagttttgatctagggtttgatttgatgggtttgaaatggataatggaatggacaattttctttcatctgaggtgagtttggacggttttgggattacattttgtgatttaattttggtctatgtgattggacctgtacatgatgcatgtttggaatttatttcacttcggattggattaaatggatggatttcatgaccctgcctggatcagagtgaatgaggaaaagaaagaaaatagttctgcaagttacccagaaatggtttcttccattatctattttcactatttttctttcattttccctggagttcttgagatccaaacagtgcccacgacactcattacgatttataataaggtgtgtggtgatattttcaggtgggtacggagtggccacaggagggccattgtcc

SEQ ID NO: 99675 - DNA, 843 bp, Vitis vinifera
  Intron number 2 from transcript GSVIVT01034160001 (locus G SVIVG01034160001) derived from phytozome v7.0 (chr-ID chr8 ; pos 14762544 to 14763386 reverse strand)
tattgggattcggcttgagcaagaatttggttttggtatgtattcaaaactcatactatcatcaatttgagtattgatctcaacacattctgaaaatctactcctgattttaagcattagcatcgaatgttcttaatggaggctatggatctcatgttcaaaagattgaaatgtgcatccaaacatttttagtgattacctcccaaagacccctggcataatgcaagaacattagaaaaaaaaaaatgcaataactggaccggcatcatgatgctgcagaagtaatgggagctatcctctggaattgatgtggctttatgaaagtgtatggtggaggatgaacaaaatctcattatcaatatgccttaattcttttacttctttctgttttttgttttttttgtaaaatcaaacctgtattcttttcttttcttgagagctaaatacttcatgggcttaattggagttcagatggtttcattttgattcccctcattgggggtgttttaagtttttctacggttcttctttgtcgtattgaattgatgcttgtatcaaattttcagatcttgttcaattccaatacgagtttcaaggtcacagactgaaaaatcttgaaatcatttgaaacagttggattcattgcagttgccctaagtttcctttatgtcatgcttgatgggtccaggatgatatttaagaactattatttattttggttggaaatctgtttgcacatacaaaggcttcattatttgtttctgctgatatttgagttgttttagcttataatcccttcccaatttttgtgtggttgtcttacagtaaaggttggattgctct

SEQ ID NO: 99676 - DNA, 681 bp, Vitis vinifera
  Intron number 4 from transcript GSVIVT01033551001 (locus G SVIVG01033551001) derived from phytozome v7.0 (chr-ID chr8 ; pos 19823814 to 19824494 reverse strand)
gaaaactgcttgccgcctggtattctctctctttctctctctctcatgttgtgccctttatgtgtgagtgcttaacttaaatctttaggagcagaacacgtgaaaaatcattttctgagtaatgagttattttgtcaggcaaacacaattacatctaacctttggtggtgtggcccgagtattaagatgctcttatgctgtgaaggcataatttatatccacaatttttcataccttttgctaattctcttcctcttgttctttccctctcgctctttttaaaagcatctctttactttttccaccactatcattggttatgcaagaagcctttattctttgcaggttgcagtcatgggtagaccttttgccccttctatgatctaaatggaaaatttagtgaattggaagtctgtacttgttgttggttaaacaatttttgaggtatattaataattacaacattgtgtttttaagaaatcatcaaaagattagataattggatcttagcatttccccagaaaaatgctagcaacatggtcattaggtctttctatgttgtctgtgattaatggaactcaaggctcaataagattactcaaatgccaaatgaggtgaggattacctgatttcttcttttggtttgcttttccctagtgctctaagcggagttgctaagat

SEQ ID NO: 99677 - DNA, 992 bp, Vitis vinifera
  Intron number 2 from transcript GSVIVT01033262001 (locus G SVIVG01033262001) derived from phytozome v7.0 (chr-ID chr8 ; pos 22053074 to 22054065)
tcgaagaattcgaagcaattacagcgacccaaatagtgaggaaggggaggaagcagagccgactcggttgaggtacggatcggtggtggggttcgaggccgccgagcttgacccggagaactcgctcgccggtttcttagaccacgttccgatgagtctccgccgatgggcttgttacccaatgatactcggccgagtcaggcgaaatttcaagcacatgatgcttgtcgacgtgaagagttttgtgcttctcggtgacccactcgtccgagtaagaagcaaaagcacagaatcagtgtttctatggacaaacccagagactcttacacccaaggggcgcaagaactcggacaaaactcagaaccatcagaagctggttaactcggagattataatgggtggaactcgaggcgttagacgattatcaaacgcaatgttgatcgaaatagtacgagcagcgatgcaacgcaagggtaagagtccattcagtgagtcagtcctcttgaaccagctcgtcagcaatggggttctctccaagggcgtagatttgaccatatcaaacgagtcggttcctgactcgaactcactcgccggtgtgaactcaaactcaacttcctccttgtctttatcaaagtatagcgtggttcaacgtggcaatagtaatcgtgatcttaatcaaattatcatgaaggacatatgttcatctacactagattcttctgtttatagtgactgttagcagaaaaataaaaaaagaaaaagtgatatgtataatttttttttttttttgtttaccacaattttatgtgcttagagaaattttttgtatgataatatcaggtcaggtctataatttatattgccaagaaactcatcttatggagtattccttcacatatgccatctggtgcttctttttgttctttataataaaataatgacccatttgtaaagtagagattttggagcgtgaacggccaaagcaaaggctg

SEQ ID NO: 99678 - DNA, 898 bp, Vitis vinifera
  Intron number 1 from transcript GSVIVT01037811001 (locus G SVIVG01037811001) derived from phytozome v7.0 (chr-ID chr3 ; pos 7652697 to 7653594)
cgtcgatttctgcgtctccagctctcctcattggggtacttcctctctctctccccctatgtatatattgctctgtgtccatatatgttgtacacatttacatatagttccaatgcttcttccaagttccaacagggaatgataatagagtcgattttgcgctaaattacatgttctaccagtctctgtttctctgtcttcaaatctctctgtttcttttgtttttctacatttccctggagtcgctttgttcacgtcttttctcttttgctgcgcctggttttcccgcagtttttcgacttggttttagtggttgaaattaatttttaattttatttttgttggttttttaattacgttgaaattttttttccagaattttcctttttttttttttttttttgggctctgtgtttgaattgggtgctgttgattctgttgccttttgggtgtgtttggttgatggaaaatgtgtagagaaggaaagaaagggaaaaataaaaaataagaattaaattttaaatggtttatggtgttttcatctgggataatgaaaagggtcagttcatctgagattgaatttcctgtttcctttgcttctgttccattttctctgcaaccaagtagagcatcaatctgttcaatttagattgagcaatctgttgattttccaatgatgcttcatgctccatcttggtaattctatctgtctgcaaatgttaaaaatttacaattttctaatgtattctgatttttctttttctcagaatcataatacttttgagttggtattgctcaatttcagatgtcaaataactgcttttttattttattatttatttatttattgtaactgaatgcagctgaagccgtcctcctgggatttcagcactacttg

SEQ ID NO: 99679 - DNA, 722 bp, Vitis vinifera
  Intron number 1 from transcript GSVIVT01038035001 (locus G SVIVG01038035001) derived from phytozome v7.0 (chr-ID chr1 9; pos 16570763 to 16571484)
aggccaggttctgggcggactacgtagacaagaaggtatgtctttgctgttgatttaaagccttttttttccattgattcatggcgattggctcagattttgataatgatgagggatttgtccaaaatgctgggttcttcttcacacattctcttctgacattaagttttgtgggccttggggtctcaaactagaactttactgattctctttgctgcgtgtgcaacaagactccactttgcatttctgatgtgggttttcagttctttgttatatatgggttttcatttctttgttctgctgaatctgaagtccgttctttccacccaaaaaagcagatctcaagaatgccttttccctcaagaaaggggatccaaaaaccagtttttacagcacagtgtttggtttttttttgttatcctgatgttcaacattttgcagagcagttcttttaatacatgttttgttgctttgatctctttcttctcattttctaaaacccacattgaggggaaaagctttagcaaatgatacattctttcaactgattctgatatttttctgccaccggcccttcatttaatatgttcctagtatatgagatttctatgctgaagggtccttaataaacttgtccaactatacagaaagttgaaacttgatgaaatgctccaaaaaaataacccttttctctctttgactttattgttttccacagctct

SEQ ID NO: 99680 - DNA, 695 bp, Vitis vinifera
  Intron number 1 from transcript GSVIVT01035646001 (locus G SVIVG01035646001) derived from phytozome v7.0 (chr-ID chr4 ; pos 2957531 to 2958225 reverse strand)
gccatttggataatagaggtgagtgcatagtttgagatcaggtctacttcaacatcaccattctctgtttaatagtgtaatgtttccatacaattaaaaatttcccctgtgctgtttttagatgccacatggaaatcttgtttcaattcgcttatattcaaatacatgactttatgcctcaaaatgcagtcattaccaaatagataacaaagaatcaaaatgaagacctttattgaaattctaaagaaatcttacctaactataacgacaaacaagaactttctttcctctttattgtcatttgttgattgtcatataatggcaaagaatacaccaacagaaagctttatgtactgtcacaacttcctactattgaaagcctcagctggaattttatcccaatggcatctcatattgggttgcagaacggatatctctcagtttgaagtgactcattcaaatgctacaaaaaggaaaagagaagaaaaagaaaaaaatgttgattctgaatgctttgcaaagaaacgagaataaattcttttaatatgctgtccaactgctcccattatcgttttcatcttttagaatctatgcttgtactcatcaagtcaattgtaatcaaattcttggttttttcacatggattgtttcattttgcaggaaagtaggttaagaagcaggcgccttcataccat

SEQ ID NO: 99681 - DNA, 302 bp, Vitis vinifera
  Intron number 2 from transcript GSVIVT01032461001 (locus G SVIVG01032461001) derived from phytozome v7.0 (chr-ID chr1 4; pos 27654393 to 27654694 reverse strand)
acctggtatgtttgccacttctttactggtaactttgagatgtttatattagtatgtgtctatgatccttttcttctctttgcatatgcactaatgcttatgtagtgttcttttgccacctattatttggtgctgaatgcctttgaacatagttcattttagttaataaaagaataaatgctgctcgatgtagttctgtgtttctcttatgacgttgtcaagaattcaatttgaacattgtgtaattgtcatattaaataaccaatttttttgtttcttttttgtttttcaaattatgcagg

SEQ ID NO: 99682 - DNA, 566 bp, Vitis vinifera
  Intron number 1 from transcript GSVIVT01032697001 (locus G SVIVG01032697001) derived from phytozome v7.0 (chr-ID chr1 3; pos 1446314 to 1446879)
ggtacacctccggtggtcacaggcctcatcagtgagttttacttttgatttttgtcaatgtggtgttttatgtttgtcgactgatattctagatgctttgtggaatggcttgataccctatcagtttttcttgaagaaataggctgaatttgggtttatggtgtctttaattgacaaatctatggcagtttgtccggggatctgatattgatcttgtaattttgaattcgaggaagtaacactacacattccaactgaatcatttttctttgaattctgaagaaaatgcatgatattcttttaagtaatttttaagaaaaccaaaaagcttggatcaaattgaggaagagagaaatatcccaaatatcttctaagcaagagaagcgaattgacagaaagcaagctctaaacgaaatttgctggaatgttttccatgtttttgaagaataaaattttccaaaaagggagcatgttttatcatggtttcttgatgtgttgcattatatttgtgtacttcaattggtatatttatgtgggtttttctttctttagttctttagcttcat

SEQ ID NO: 99683 - DNA, 453 bp, Vitis vinifera
  Intron number 1 from transcript GSVIVT01033400001 (locus G SVIVG01033400001) derived from phytozome v7.0 (chr-ID chr8 ; pos 20959969 to 20960421 reverse strand)
aggaagaagcaagcaccactcctgtcccagagagggtagccctttgtttactcattactcaatttgagttcctatgtgattttaaaatgttaaaatttgagtcttaagatgagcgaatgtgggcctgctcattttagtaacaaacacctattgccataaatcttccaaaattgtgccctcgtcaggcgacctgacaatttattccactcatgaaaaattgtagggtaacaggtcaaaactcaagtttcatagatggttgtgtttgaatagactgttgtaagggtccaaggttttgcttctaccctcattaccctgatttctgaggggctaatggagcatttgttaaaatttttccttcactcgttcttcaacacggattctttcaaagcatctagttgttttctgtttttggttctaggtacaagtgggtaattctcctatatacaagataga

SEQ ID NO: 99684 - DNA, 708 bp, Vitis vinifera
  Intron number 2 from transcript GSVIVT01031214001 (locus G SVIVG01031214001) derived from phytozome v7.0 (chr-ID chr1 4; pos 1125640 to 1126347 reverse strand)
ggcattttctggtgagattgttggaatgactattttttttttggtttttggtttttgggttgattttgaagggtatccatttgggtgaagttgtttttgtgtgtgcaatgcttggtgaaaggtgggatttgggtggtttgactttacatgttctcgttgtttggtagctgagaaaatgggggaaagaagggagattggaatttttgggttgttatgggtcttctctgatctggtttcaagaaggaaattgacatctctactcaactatgttaactagttgtagtgaggtaggtggatattgcaatttaaaacttgattagttttgtttttatattttctcagcagccaaacagggtttttgaaacttgaggctgaataagctgtatgggcaatatacccatcagaaaaagagcaatgtaggtttggattaatttccattgtagatcctaaattttatggatgtggatagaggcagtggaaaacgaccttactgttactgatctaatggaggaaatggctccagatagtgttgaatgccgaaagaaagattcgtgtaatggaacggttttgaacccaagtggtttggattaagcctttgctgaatcaagttgggctccttattttatgcttgtttagagaggttcagctgctgggaattcattataaatttattagccagagattgacaaaatcttgtgtacattgcag

SEQ ID NO: 99685 - DNA, 625 bp, Vitis vinifera
  Intron number 2 from transcript GSVIVT01032723001 (locus G SVIVG01032723001) derived from phytozome v7.0 (chr-ID chr1 3; pos 1255776 to 1256400 reverse strand)
gaaaaggtcaatcctttttacttcgcacattttttagataattttattgcttcgtttggttgctaagtaaatgtaggaaaaatttgaactttaattttgaaccttttctattttcttgcttgagatttcgaaaattaaattccttcactcagttaaaaattaaaacggctatttggatctgttgagttgagcttctttttttttttttttcctgatagctaagcattagagagaagaagaaaatttgtgcatgttttggcaatgttttctaaaacctttttcaaataatagttattgaaaataattcttaaaaacaattctcaatttttttcagtaaaaaattctgtttgggaacttaaatatgaaaaatagttttctttgcttattttccatctttttaattgttgcactaaaaacaactgaaatatatcctagaaaacaatcaatattcataacaaattctgaaaaaaaaatgttttcaacaacaaaaaaccgctttaggaacagtgaccaaacacgccctttgttttcttttctgttttcctctattttcttgccaaacaaacagtgtgtttgaatatttggtgttgataatcacagtaaaatgcttcaatttgaagtccag

SEQ ID NO: 99686 - DNA, 500 bp, Vitis vinifera
  Intron number 1 from transcript GSVIVT01036478001 (locus G SVIVG01036478001) derived from phytozome v7.0 (chr-ID chr1 4; pos 22556337 to 22556836 reverse strand)
attttgggtttctccacattaaggtgtgaactcctgagtttcagatctctttgttttttctcttgcctgacttgttttttgtttaacaaaatttcctcccgtcaacattgtcaagcctgagaaatgaccaacttgggtatgagccgcagatctttgtgcactgaagcaccgagaaacaggacttgtggcacatttttattaatgaatgaaccaactcaaaaacatatttacaagattcaaaactatgatcaatgatcctgaaccaatttaggaaaattttcacaatctaaagagaagatggtaaaattgaaggtctatgatcgtgggttgcttgaatattttacctgggttcccagcctgtcatgtgttcaacagctcagatatccatggggcctgacagtcaaattcatgatcttccgtatctgtaagataatagattcacgtttttcctttgatgtaaacgtgacattcttcttgattgttgttatcagaggctattg

SEQ ID NO: 99687 - DNA, 993 bp, Vitis vinifera
  Intron number 1 from transcript GSVIVT01037739001 (locus G SVIVG01037739001) derived from phytozome v7.0 (chr-ID chr1 9; pos 7392876 to 7393868 reverse strand)
agaatctgctgcaacaaagggccttctgcaaatttgtatgcttcctcgccatatatatagctgcctgtgatacttgaatttccttgttctcattgaataatgtaaaatatgctctttgattctcataagaatgttagggagtccagaaatgaatgaaacattgttgaaccgaagttgccaagatgaatgattggaaagaaaattgtggattaagaaatgtatacactaatgagaagtgagaaattgcagtagattaggatggtttgattttgactctacaggcggctcaactggcaggcccctgctcatgaacatgttgtttggttttcaggcttacctgatacacaatccttggagaggaatcatgtatcaattgttttccttggtcctggaaaccggggctacttgatttgcctcttgtaaaagaaaagaatgtcatttttttcaggatagataatgggattgggatggtttgttcatgtacaacataatccagactgcttaagtatgagggatatagctttgtaggtgaaaagacagaaaggatgaaggcaagtccaatagccttagatttgagcagattggctaggtagcagttgatctttaagtccccaatggttgtgataattttaatgatgtgacatctgtgagctagttgaagtagaaactttttatttttttatttttttgataaattattgaagtagaaaccttatagatttatgaccttttgtttgagagagaaacatagttatacaaatgaaataagctaaaactataatttatattatgctagttctacagccgttcacccgtggattttctttgtaatatacagaaaaacctgcatgcatttctgggtcatgctagttcttccttaaacagttcagtcattatctgtaaaaacattcatcttcttattgtttccaaaacagctgacttgcattttgtgatgcagattgcacctaacattggttattacagcgactgttt

SEQ ID NO: 99688 - DNA, 394 bp, Vitis vinifera
  Intron number 2 from transcript GSVIVT01035463001 (locus G SVIVG01035463001) derived from phytozome v7.0 (chr-ID chr4 ; pos 1465306 to 1465699)
ctcatcatcaggctacacaggctcttgggcaacaggtttttctagttgtttgttttctgtttgggaatatgtattagtcaatgaagaaaaaacttagactctaattgagaagtgagaagcactttaataaatagttccgattttgtttttaatgttttatgaagcaaaaaactgtttgggaagttggaattattaaagagcatgatatagtttaaatcccgttatcaaaacttgatctgacggaaggtcataaagaaaataaaactgttttctatttttttaatttttttttaacaacataaaattcttttttaaaactgtttctaaacatcacattcttaaactcaggtaaaacctcactttttttccattcattgtctgtggtattttgcag

SEQ ID NO: 99689 - DNA, 732 bp, Vitis vinifera
  Intron number 2 from transcript GSVIVT01035090001 (locus G SVIVG01035090001) derived from phytozome v7.0 (chr-ID chr5 ; pos 1400553 to 1401284)
aaaagaagagaaagaagcattacactcttgaacaagttagtagggccattttctagtttcctttggttttctaaatgaacttcacctgatataattaatgtcatcgattcaaagtccaattgatattaagcttttctatcatggattttggaggccatatctgtaaatcacgggtgtttttttttttttctgcgttatatatattgaaaataatgtatggaaggcaagcaaaatgctgaaagcagtttgagaagggtccattttgaagtgaatttctgcattctcttcctttccctaattcttcacaagaaccaaagagagtctaaaactttgatttatttgtaattattgtgtatgagactgagcatgtgtggatacatgttacactttatttatttatttattttggttcttttttattttcatacaattctctctgtcataagagcatgcatgagatatgggctcacttccttaatgaaggttaacttgttcttcattgattaaacaatttcaagctcaagctttcttattattggatgtttgctcatgaaatagtcactaagatttattctaagactcacccagtgaaagtggagtgcacagcatgtttgcagatgtagtagttactaagatttattttaagactcgtatagtgagattgtggtggcttttggcttaatagagtttttccgcctttccaactaggagcttgcatcactgtgggaaaag

SEQ ID NO: 99690 - DNA, 449 bp, Vitis vinifera
  Intron number 2 from transcript GSVIVT01032839001 (locus G SVIVG01032839001) derived from phytozome v7.0 (chr-ID chr1 3; pos 341861 to 342309)
gcagcatacaacaagaaacaggtgattattggcccatccatcttgtgagaaattaagggcttgtttggcaacgtattcaaaaacagttcttaattgttttgaggaacaaaattctgtttgggaactcaaatatggaaaccagttttcttgatttattctttcatgtaagtactaatctacttaagtaaaatgcaaaagttctcaaaatgctctccatattttttttattgtttcttagaattctctacaaaagacactagaaaacacctctttttctaaaaaaataatttgttttcagaacaaattctcaagaacctattttcagtaaaaaaaataaaaattcaatcgtattttttgagttttaaaaactgttttatgttccaaacaagccataatgttttattcttcccttcttacttcttgacttgcttatctggcttcaggaaagt

SEQ ID NO: 99691 - DNA, 505 bp, Vitis vinifera
  Intron number 1 from transcript GSVIVT01037327001 (locus G SVIVG01037327001) derived from phytozome v7.0 (chr-ID chr6 ; pos 15634873 to 15635377)
tctcatcgttctctcgtatctctaaatcaagtgaggtaattaaaaattctttctcatatgatttctttgcttagtctccgtttgctttccaacaaaatttaaggaaagtttaacgacagagtgggttttgaatcttttgtgtttcttttttctgtgagaaaatggaagcatccacttcactgagcttactcgattcagtgattttttttcctattaattttatattgttgaaggagaagtatggttgtattgggctctgtttgggtaccaggagacagaaaggaaaaggaactttgaagaatctcaaacgttgaagaatttaatggttgtattgggctttgttggttaaatcatgtggatgtggatgtggttgtgttaagtttcatactttgaagaatcgaatattgaagcttttttctttgttctttttttggatattttattgcatccaaactgaggattagggttaatacggaattaggatgtgattgtttacagttttgtg

SEQ ID NO: 99692 - DNA, 932 bp, Vitis vinifera
  Intron number 1 from transcript GSVIVT01031878001 (locus G SVIVG01031878001) derived from phytozome v7.0 (chr-ID chr3 ; pos 5062507 to 5063438 reverse strand)
atttattttttatatttggttgtattatgaaaaatgtaaaaatataaatataattaaaattagttacaaaatgatgtatttttaaacttaaattatttaatttttataaagaataattaaaataagtaaaataagttttaaataatatataaaaataatttattaattttaaatttatttttattattttctttccttttatcttttctctttaatttcttccccttgcattttccatcaaaaattttccaatcaaacatagcctaacaaaataatattgaataagttcctttagcattttaaaatgatgtattatatttaaaaaaattcatggtatattgagatgaaaaaacatatttagacgaaaaattaagtgtttttttaatttaaattatttaacctttacatagaaaacttgaaattattatataattttttttaaaatttaaaattttcttttccttcgaattattccgaaccaaatctatattaaatagtctaacaaatttttgtctcatatttaaaaaaataatattatttttattaaaagttttaaatatgaactcaattaatattttcactatttgaaggtgaatttgaggataaaaaatttgataaaagctatttttttttatcaaataaataaataaataaaataaaaataaaaataaaaataaagttattcttcccaaaaataactacttatgatatgattttgagcggtggctattagaattctgaatttttattcccacgaatcccagttttttcctaattgaaatcaaaatcaaacttcgtgattttatcaacagtcgccattctcaacaaataaaccctaactggttctccttgaagaaaaccctaacgcagacgcccaaaaacctgaagttctctagcgcgaatcgcctgtaaccccaggcaatttcaaaacg

SEQ ID NO: 99693 - DNA, 417 bp, Vitis vinifera
  Intron number 2 from transcript GSVIVT01037528001 (locus G SVIVG01037528001) derived from phytozome v7.0 (chr-ID chr6 ; pos 12136581 to 12136997)
gaaggtttgttttgttgttttgattttctgtgatttctgatttttctgggttacttttgatcaggtttaattgcatgacgatttatttacgcttcgagttttgtttcgttggccataaaatgtagagaaagtaaaagaaacaaagtttcaatctcggggttttcattagttggaacctgattaacggtgaaaataatatttgcctgagtttctgatagaactgattggttcagttgagtattttcattttctgagtgtcttttatttccagtttttttttttttttttttgtctgaggtttgttcttatccaatcatgtagttggttaaattaaggtttagtagattctaattagcaattaattgatttcgaaaattaccagttgttgcacaagaggaaactactagtactgtggaa

SEQ ID NO: 99694 - DNA, 653 bp, Vitis vinifera
  Intron number 2 from transcript GSVIVT01033311001 (locus G SVIVG01033311001) derived from phytozome v7.0 (chr-ID chr8 ; pos 21609257 to 21609909 reverse strand)
gcttctttctgggaaattctctgattctgcttcaggtatctgggtctcaatccgattaggtttttgttttggttttagatttttttttttccttttttgtttggtgccattttttgtattgacgttggcctcaatagttggattttgattcattgatttggcttcaatcaatggtttgatccaaaagtttgagctataagctgaggttgggtttgtttctgttttgttcttgaactgggatttttgtggaggtctctctcttcattgctctttgttttttagtggtatattgggttttaaacatggttttgggagtgatttatggaaaaggcaatgtaaatttatcattgagtgtctctctttggattttgaagattttttttgggggctattcgatatttatgttttggtttttgcggtatatttgatgttcatgcttttcaaagttttagatttgtgcctttgatttttttatggtaaatttcatggcctttttattattttaatgtaatccgtgctctttataggccttcaagctttaactttgctttatgatgcaagatccagaaaatatatgcaacttctgttctgatctctctgcttgccatgtgtattgaccagggtcaatcttgaatcggcgtaacaatttctct

SEQ ID NO: 99695 - DNA, 833 bp, Vitis vinifera
  Intron number 1 from transcript GSVIVT01034326001 (locus G SVIVG01034326001) derived from phytozome v7.0 (chr-ID chr1 0; pos 18107877 to 18108709)
tgcaccttcacctctgtcacctctgtcacctccaggtaataatacagcctctgaatctaagcaatatttgttgatctgttctcctacttctttggaagcatcttaatcataaaaagaccacttttttagtcccttctattcggaaatttcggcaaaatattttgaactgtgacaatactcctgaatcctgaccatgtccaaaaacttaaaagattgtacaacttaaacagagacaaatcaccatgaacttggagttgatagaagagcaacaacgtgatctcactgttgtagtgttgtgtgcattaagccaacccagcagtcatggtttgcgttttctagtccagtctacaaatattaaatataataaacggactaagctttggatctttgttacttccttcttcacaagccagagttcaatataaatggactcaaagtggttataatatcttcattgagctgatttttgtcatgcatccactaaattagaactcaaatttaatggtaagagaaaatatttgcaagcaaaacaaaataccttaaaattctgtttgataaaaattggtaaatgtgatttcagatataaaatattttaaatatgccagttgcagagccttcctagagatttatcaaagtgaaattgactaattttaagattatctatatcatacttacatcatgaattctaattatgggattgtacaatattactcttttttttccccctatttttaagcattggcatggattctaaatccatcctccctaagcatgacaatatttcttcgtcttgtataggtaaaaagggaaactcttcccaacttctaattgct

SEQ ID NO: 99696 - DNA, 280 bp, Vitis vinifera
  Intron number 1 from transcript GSVIVT01033966001 (locus G SVIVG01033966001) derived from phytozome v7.0 (chr-ID chr8 ; pos 16235566 to 16235845)
gacacaaaggaagcattgaagcctgctgaagacaggttagattgtctatattttgtcttgtgaaaaattcttacattctttggggagtttgtttagtttgagatgactctataaagctctgttccttgtcatgttcttagttgtcagttttgtggctgagttaatgagttctatcatatttgatggtggatacggtggttacaggaattttgtagttatggatcatgtatctctattcttttcagaaagattgggaagcgaaaggctgctgttaaggcag

SEQ ID NO: 99697 - DNA, 676 bp, Vitis vinifera
  Intron number 2 from transcript GSVIVT01034432001 (locus G SVIVG01034432001) derived from phytozome v7.0 (chr-ID chr1 0; pos 16309078 to 16309753 reverse strand)
ttaaaggtatccaattgtgtctttttttctgtgtccctaatttgggggaggatcctcctccagtaggaaatggtacttttttccttacccgtccaaccatagtctcattttttggatttttgatacttatcacagcttaaaaaaataattggtaaaatatcttgttttccatctagtttaagaaaatttaatttaaaaaaattattttctagtaaccaaaattatatcttgaagagacaattttaatttagaaaactatcttgaagatcgatttatttgaaataaatttgaggttttttctaactaaaatctctcttcatggagagagtcgagacgttttgccaagaaaacaattttattaattttcttttgtctttctcattttctccattttctttccctcaaacttctttgggaaccaaaacgtaaggttaatgagctatccataaggtggtataaacaaaccaagttggggtactgatatgaaattatcaagcaaaattcatttttaggccgaggatgtctcatgaaaaattacatagaactgattactttgtttaattttgctacttctgtatgccatatcgcgaatctccaaataatcttcgattggctccattcttacatgttgttttgaacaggaaaatttaaggacaacatcttctttgtcaccgta

SEQ ID NO: 99698 - DNA, 951 bp, Vitis vinifera
  Intron number 1 from transcript GSVIVT01037221001 (locus G SVIVG01037221001) derived from phytozome v7.0 (chr-ID chr1 8; pos 27784168 to 27785118 reverse strand)
cgacgaacaggtaattgtaacttctcttcatttgtcatttgaagtactctccttttctctgtctgctgatataaaaaatatttatatcatttttataatttttaaagctaagtgagttttaaacttttataattttttattcatttttattatttataaaataaagatctgttcattaaaattttaaacttgataccataatattacaatttcttaaaaacaaaattctattttattgattcataaagaatatactaaattattttaggttaaaattgatgtaaatttgttttcttaattcattcatgcaatagaattaaaattataaataaaatatttttaattaattcatgaaagttattttttaattaaacggttttcaaaaatttttgttcatacagctagagacaaaaataaatgcaaaatacaacatatggaacagcaagagacatttatctaaataaatggtgagagaaagtcttgcaagtatagaagatagtaatgttgaccgtctaatcagtagtaaaatcattagattaaaaagcttggatgcagactagcagttgatcctatgatggaatcccttatcaaaatagggtagtaatgttctagacaactcaactttattttgaaccttccacaagattgaatagtataagctaacacaaaaatattttagtttttttttttttttccgcttttgataatccaattcatattttgtattttcttcccttatttctatcatatacatgagcaattgtatagaataatgaaattgtactgatacgtaatttgttagatgtggtttattttattttaatttcaattcgttttagccctattaagttaaagttggaaaactaggcatcattaaatttatttcatataatttattgttttttgcaactcatcctaatgcaattggcaggtacgaatcagagcttattg

SEQ ID NO: 99699 - DNA, 686 bp, Vitis vinifera
  Intron number 3 from transcript GSVIVT01036725001 (locus G SVIVG01036725001) derived from phytozome v7.0 (chr-ID chr1 9; pos 23280320 to 23281005)
ccacacaggaggtttgtgcagtgggaagagggcaggtaacattgtttttcttatctatagtgttgattggtattgctagaactaggcttttattcgtgatgtatctagtctgaagatggttaagcaacttgaagaagattgctttttgttgctaaggcggtatccataatccatttataggtcgatagccatagatttgatgttttcatagtaaagaaagatttttatccatatcccatactgctaattatgttaaggacactttttggacttttttgggtgatgccgaggagagatatggacatgtagtttagggtgatattttttgaaacgagacgatcatttacaagatattgctcttcaattgctgaaagggaaaatgccaaatcataagaaaataactagtgggaaggcctattgccaaaagctattactttgctttaaaggtgtttatgctttaagggaaaatgttcaaaaggttgcatcaagtggtcattaaataggtttatttgtcataggaaacaaatgtttcatttaattgggctcaccatttgagagttgaccatatctaaaagaatgtagtcggtgctgttggtaatggttggcagcgattcttccataatagaattttcttgtcttaaaactttacaggccactgctgtttacaaggtatcttctattgctga

SEQ ID NO: 99700 - DNA, 829 bp, Vitis vinifera
  Intron number 1 from transcript GSVIVT01033651001 (locus G SVIVG01033651001) derived from phytozome v7.0 (chr-ID chr8 ; pos 18920178 to 18921006 reverse strand)
attggtagagagtttacgcattaatctgtttctctgtttttttctacatctggagaaataaaaggaaggaagttgaagactaggtttcttattcttaacgagggggtagatggattgtaggtaaacatctcagaacaaacctacttggttataaactattgagatgtttttgttcgtggaaatagaaatgagtcctgattttccttaccaaacatcacctaagtctacctgcatttaagcatctgatcatatctaaaaacaggaactttctctctttggtttctatggcactgcaattcctgttttgatgaaatccaatggccattgtcagtacccaaaattttcaacttgttcaagtaggaaattcatttggatcgcatgctactctgatatgacacccaacttccgtttggttgttggcaaaatacgtgttgagaaaatataatcggaggacaccctttttcattgactggaaaattgaaaggcaagacaaaaacctaactcacctaagctaaacacattcacgcaagcctttcgtttgacacgacagagacacgttttctcagcaaccaaatacgatgacgatccccttcgacatccacacggttggtgaaacccaggccagtatcctctgcagtgagcacagggagttgcatatggcttgcgtcgtggatgaagtgggtcccccgaaatggaggagggagatgagaggatgattataggttagagaaaggtgagaaaggaggcaccagaaaggtggttggggacagagacaggagaggatgcgaaatgagcggggaatcggagagagagcgagtcagactggata

SEQ ID NO: 99701 - DNA, 333 bp, Vitis vinifera
  Intron number 2 from transcript GSVIVT01038264001 (locus G SVIVG01038264001) derived from phytozome v7.0 (chr-ID chr5 ; pos 24797039 to 24797371)
ctctctgcttcaccttcggttttcactcttttcaagtgagtcacacgctcaacttcttcaattcctcgtgatttctttcactgcttgttaatttagttgatctccacacgctctcttgttttaatctctcatctcatcaaaagcaaatctgtgatctagatctggaatcctgtattctttctcaattttatactttctgcactagatcagtcattttcggtttttttggatgtggaaatggtgtaatcgatctttcaattcttgattttgttattattttcgatgatccatgcgcaagtttggtgagctacacatttgcgtattgctggcttg

SEQ ID NO: 99702 - DNA, 515 bp, Vitis vinifera
  Intron number 3 from transcript GSVIVT01038264001 (locus G SVIVG01038264001) derived from phytozome v7.0 (chr-ID chr5 ; pos 24797403 to 24797917)
gattatcaacaaaccgtctgatctctgctgcttaggtttttcttgttctagactattgatttgtgcactcaacggtttttgcttttcgatctcagattactgtcagtttcagagtttgactcactgaaattcttcatttctaaattacagatccatttgtatagatttaccggattgaaagtcaaataacaacttgcgatataaaactcatagctactactaatatgaatgccaatttccgagatattaatgtctatattctttagcatatgacttctttacatggtgttgcaataatctgccgctgattattgtagtgatttactagatgatggtttgtttggggcttgatagagtattttatgtcaaggtcttaaaccataagtgcacctcctgctgttgattttcgccttcatgttgatgtacaatttttctttttttctttttttttttttaaatgtgcttacaaggcataatccatatgattttctgtgttgtttttttgcttggaaggt

SEQ ID NO: 99703 - DNA, 754 bp, Vitis vinifera
  Intron number 1 from transcript GSVIVT01030600001 (locus G SVIVG01030600001) derived from phytozome v7.0 (chr-ID chr1 2; pos 7057285 to 7058038)
ggctgtattgctggtaccttcaaactttactttctgttattattcttgttattgcctaattataattttttttttccaattctgttatgcaagtaattttagtgaggaagaattgctccaaacagttggaaatcttgattttaacattttgtcaatggtttatagcaattgtaattaaaattttcactttggggatgatgcaaaatctatcaacttaactgagatttcgcattcttttttggtcggattcttcttaataaagtgtgtcttgtgtttgctctttcatgaacatactttatagcattaatccttgtaatctagtatggggaaagtacttgtagcttgggctaattttataaggtgactctaaaatatctgcccaaagaaaatgaaagaaacttggaaagtaaacgtttgaggtagcttcaaagttcaaattcaaggaacccaacttctctctataaaacattgtccactgctgattgaatttctaaaactaaactgaattgctaatttcattaggggaaaacccaaggaaccatatgctaatttagtgttaagaggcttgatcacaacatttttttctgtggtaagagcacgtgaacgggttttgtgataatttgtactaatgctgttgatggatgtattatggagtcaaaactaagaaattggatttcttgctgcaaactacattatcttgttcgcattttttttgtcagcatttcaggtacttgagagacaagtactggctata

SEQ ID NO: 99704 - DNA, 799 bp, Vitis vinifera
  Intron number 1 from transcript GSVIVT01033101001 (locus G SVIVG01033101001) derived from phytozome v7.0 (chr-ID chr1 4; pos 25731494 to 25732292 reverse strand)
caagctcgccgatcactcattcctgattctgatcggtctctctcttcccctctctctatctttctctctctgtactgtggaatgtgtattttcttggaaaatctttggaaaatctttggaaactctaaggacgtgtttaattttgtaaaattggtgttcaacttaacactgtttgatttcaaatagtgcgagagaaagaattaaaaataggaagtctcaaattctgatagttagtttgtcatgaaaaacagaaacgacaatgaaatatgatgaaaattgttcaatacttgttcactttggggaaaaaaaaaaagctcaaatttttcttgttttcctgtacctcttctttgcctttttcaggccttgcagaacttcatggaaaacctataaataactgtaggacttaaggggtgatagtatgtttgatttctgagaaaggtaggaaaacgaattttaaaattctgaaccttaagttctttcaatgtttgggatgagagaaacctaagattccactcaattgagtttaatacaattatttggctcacttgagatcagatttcattcaatggagacaaaagcaacatttagcacatggttcagaattttggtatattttatttgttcctttcataagttttctcagcatctcaataaaaagacattgataaatttcttgaggtaggtttaccaaatgaaggactgtgaccacattctgaaaatctatgatttaagatggtgatggtttctgctttatatgccttcagccaagcatttgaacaggcaggaagagttccaggtc

SEQ ID NO: 99705 - DNA, 1013 bp, Vitis vinifera
  Intron number 1 from transcript GSVIVT01035161001 (locus G SVIVG01035161001) derived from phytozome v7.0 (chr-ID chr1 1; pos 12442442 to 12443454)
agaagaggggacacaaacgcaaacgggaaaaaaaggtgagagattcgatctgacaactccatttgcacagatttctgtttccaggcgtttgcttcatttactcacatcgccgatttccattttcttcttggaattctcaattccattcccacttgcctctcccacctccattatctcactcccttttctcttttcttttcctttttttttttctccctcaattttctggctgaatttcaggcggggattattatttcaaggttcgatttgggttctgagctttttcgtgaagtggatttttgcttttgtttttgtttttccttttttcgcataattctgtaaagctttcttgttttggttctgaatttcgtgtggggtttatgggtttgattcagatttcaattatttgaaacacccgggtttgattttgtttgattttatgccatatgcagcccccatccctcaatgcccataatttattggattttatttttaatttctgatatttatttgtttttttttcctggtcacaagttcacatcacgtcctgttggcgttttcaaagaagattctcttcatctctttaaatgctaagttctatttttaattttctgatttatatttcaaattatttgttgaagtttcagctgtaaatttcattaatgatccttctttttgctgttttgttctttacaaaatctaatattatttgttattttcatgttctgaatcatgctctggtttctttttcattcaaatttgattcctttttttggttgattatttcatgtatgtttatgggcttgtcggctgtgaattacatataagatccattcgtttccttttattttatttatttatttatttattttttatgggtttgcaaatccaatttgaaatctatgttgattgatacaaacataagaacccagtagttgatttttttcttgagtaatttgacttttgttttgttgttagtttgtaggctttgtgtctcctcttgaggacagagg

SEQ ID NO: 99706 - DNA, 793 bp, Vitis vinifera
  Intron number 1 from transcript GSVIVT01033690001 (locus G SVIVG01033690001) derived from phytozome v7.0 (chr-ID chr8 ; pos 18639531 to 18640323 reverse strand)
ctgtcacctccattgcctcctctcaatcctctctggtaatcaatacccgtctctttctcttcgttcttttgcctccgtatctccttttggttgtggagaaaaaaaaaggaaagagggttttgagtcgttttatgctgtttctgtttttagtaaataaagaaattcgtcgagtgatctgaatggcattattggctcgaggattattgtagtcttggctcttctgaagaatgtagcttggaagggttccttgcgtttgattcctcgaggcattttgcatacttcctctctaacttggaagaatgtaatctctcctatttgtgcataaaagaaatactttctcagcgacaaaacaaaaatagttaactttgccatgttcttgaccttaagtatgatctctgagagagcacagaaaatatataagattaggtgaagtaaaatttgtcacaatatgtgtgattaagattatttctggtattgaagtgaaaaatgaaaactgctttgtcaagtcacaaaaaacatgtttgataacaagttttcagaaattgtttaatatttcaagaaatgggttgtgtttagaaaattatagaacgttgcttttctagtttttataaaatgcaagcacgtggaatgttgaaaagtattaaaaaaaaacaaatgtatagttttcgttttcaaaataaaaaattagaaagcaaaaccatgccattcccagtctgaattggccctaaggtttgctatttcattaatggatgagaaactgaggaataactttggttgcagattgcgagtgggt

SEQ ID NO: 99707 - DNA, 389 bp, Vitis vinifera
  Intron number 1 from transcript GSVIVT01032429001 (locus G SVIVG01032429001) derived from phytozome v7.0 (chr-ID chr1 4; pos 27314063 to 27314451)
ttgttattcttctccttctcactcagcattcccatgtaagggtttttccttttttctttttgtttaaattattttattttattcgtattttttgaaactatgatcgtctgtccgtttggttggtgagaaaatggaggaaaaatgaaggaaaactaagattcttgactgctataactacttcaatatttgattcctaagtgaatggaggactgtgctccagtaacgcaagcaattgcattaggttcagttggatggggcttttgtttccgcggtcctgagtaattcaaattctaaagtttcttttctttcttgtgttttctcggcaaccaaacggaccgcctatgcgtttgtttgtttcatctttgtgtggaaaactgcttctgcagttt

SEQ ID NO: 99708 - DNA, 779 bp, Vitis vinifera
  Intron number 2 from transcript GSVIVT01033804001 (locus G SVIVG01033804001) derived from phytozome v7.0 (chr-ID chr8 ; pos 17660634 to 17661412)
ctactttgaacacaatagaggtagtattttccttttatttatttatttattatttcctctcaatctttgttttgctgttcagagaattggtgaggaaaatagagaccattgaatctcaattttcattttatgttttatgttgtttatgtatcctaaagaactgaagaactctcctcggctcaattgagatgtggtttgtatttcctcagctccaaaacatttttgatctaaaagtgcagtttcttttctttctattgcaaattctcttaatcaagtgagggttaatgattcagattttttttttcttagccttaatgtccttatagttttccttaacagtcccaaggatgcgaaaaaaacaaaagaattttatgcaagtgagaggttattctgtatgttcaatcacagaggactcaattttgtcaacaagggtttgtttgtccagctgccaacggtattgtcagtatcgtcatggcctttgtcctgttctttagttttcttgggtggacattattatataaaatgttttgaaaatattaggtaaactgaatctgaaagatattatttgacttagaattttagatttcttacttactttttacagttttatttgattgcgaagaagctagattttttgagtttatatatatatacatacacacatgacttagatggataaactgaaatggttagtgttgctctgaaaactgatttgcctctattttaatttgtcatggacaacaggcagttctcggattgattcaccttgcaccatctaa

SEQ ID NO: 99709 - DNA, 571 bp, Vitis vinifera
  Intron number 1 from transcript GSVIVT01036326001 (locus G SVIVG01036326001) derived from phytozome v7.0 (chr-ID chr1 8_random; pos 3864525 to 3865095)
gtatttatctgtctaccaagtgttggtttaagggtatggaaacaaaggactaactcaaaagacacaaacaaaaaacataatgaatagtaagaaaaacttattagttgaggcgtgacaaacactgttcttgaaatagatccaccctcttcgaaaacgaactgaatgcactaaggtgccagtggtctacctccaggattcaatagccagatcttgccttgggtgcactctataagtgagacatgtacaacttggttttgaaaaaattcctccaaaaagatgtatgaaagactctctgaaaaattggtattcaaagagtaaaaggtgacctgcttttataggtcaccaacacagtcctaatgggactctacttgtaatcagaggactcaaagtggaatgagattctacttataagtgaaacaggactctattagcacaatcccaatgggattcttcccaaaggtaaaagactaagtcaaatggaataaaaattaaataaaaaaaattgaattttgtaaaaattagtcaaattcgctaaaacactttttcacatttacactcttcctacaccaag

SEQ ID NO: 99710 - DNA, 752 bp, Vitis vinifera
  Intron number 2 from transcript GSVIVT01038603001 (locus G SVIVG01038603001) derived from phytozome v7.0 (chr-ID chr1 6; pos 21567955 to 21568706 reverse strand)
aggtgccaaagggagttttctgtcattgcctcgaggtatgtgtaatctttgatatttagtcgtatttttctcttcatgacagttcaaagcaatggattttgatccattgttgatttgatcaccttgtttgcattcataacttttatgttctatatgtgcactttaaacgcttagttcatgttgaattgttgttgaagtttatgtgatttaaatgcttttggcatcagttagatgagtgtttttataatgatataattaaaaaagaaaccaatactcaagctataggtttatggagagattaataatataaatgtgttcttgtctgagttacccatttgggtcatttttcacccttgtatttgattgaggagattgttcgggttgtcagcaatttctgctatatgttggatctaactgagagggaatgtccaaaagggcttatggtacttttaattggtttgttagttatgcttcatctatgcctttgattcatgtgatatatctaataacataggacgattgcattcatgaagtgggatggtcaaaggttgtactgtttttctcgagttatgcaatataagaagaacaaatcatcattgttgttcatgaacttctatcactatgataaacccaagcaacttgtgcatttgtgtatttccttgccatcaaatgttattatcttgatgtcattcctttccttcttgtccttttccccttaaattttatgaaggtttgagtcagattaaagagaa

SEQ ID NO: 99711 - DNA, 817 bp, Vitis vinifera
  Intron number 1 from transcript GSVIVT01031544001 (locus G SVIVG01031544001) derived from phytozome v7.0 (chr-ID chr6 ; pos 17324558 to 17325374)
tctaccctcacaataggtctctttctcactcactcccccaccatatatatatatatatatatatatatatatatatatatatattattgttattagcattaagcctcttgaaacgtaatatctaagtggatgaggaaaaagtttttaacgttatacatatgagctttttttaactgattttatatatatatatatatatatatatatatatatatatatatatattattgttattagcattaagcctcttgaaacgtgatatctaagtggatgaggaaaaagtttttaacgttatacatatgagctttttttaactgatttgtaaatgcgttttaaagttgtgataacgtcttaggtttagaattaataatatttatatgattgaaaatgagttattataaatagtattagaattaatctttaattttgatgtgagagtttgcttgtcccacaagggtaaggtatctatttgtgtagctctacaatcttgtaaaacattgcaaagatgttatgtttatatatgattgattgtgatatttcacatcaattaggagaaaaagttgacgttattatatataaatcaactcctcttaactttgtgagaacttggattcagatcaaataatatctacacaattgaaaacatatcgatacatgaaaattgatcccccttagaagacctatctttccccgagaagttagctaggccgtgagcatgaaactgtgtatgttatactatttattttcttcctttcttccctgagcttatcatattttggtgaatctaatgcaggagcacaatccataggagtttgtt

SEQ ID NO: 99712 - DNA, 414 bp, Vitis vinifera
  Intron number 1 from transcript GSVIVT01030926001 (locus G SVIVG01030926001) derived from phytozome v7.0 (chr-ID chr1 4; pos 19130995 to 19131408 reverse strand)
aaagaagtgtcagctagacaacagctgaaattttctgcttttgctctaataccaacttgataaactgttgaacaaatattttcatatatctcaagggtatttatatagggtacataagactattttaggataatcaactatacagaataattacagctctataattacagctgtatacacaactataaatcacagcggtccagaatatatgctatgtttaatttattgatactctgaatgactgttttttaagcatttgaactgtattttcttttcttatttaatgtgaaattagtgtttttttttttaactttttatattatgctttgatgcacttacaatctcaccaaggtttctatgcattaaacaaccattgattctaccttttgattgttaatatcaagcctttgacag

SEQ ID NO: 99713 - DNA, 453 bp, Vitis vinifera
  Intron number 3 from transcript GSVIVT01035482001 (locus G SVIVG01035482001) derived from phytozome v7.0 (chr-ID chr4 ; pos 1652742 to 1653194 reverse strand)
tagttggagaaaataattccagtttaacttcagaggtttttattttagactctaaatccgttgttttttttatgtctaatatcattagcatactgattcttctttctctatggttcagctgcatctatatataggttttcagtggagattcagttatttctcattagaaacatgttttagaaaactcgagaagcagaagcaaactcattcatgtttcatcaatttttgtatgacagtttatgcttcctggcatatgtttttctgatgataacattatttgcaattcaagatgctttaacaattttgtatgagaattcttttaaatagcttgactctcctcctctgttgattgtattctttttggttgagatttactttgtttatttattttatttactcattttgatgtttccacctgcatttcaggtccttgtaggaactggatcccgaact

SEQ ID NO: 99714 - DNA, 1048 bp, Vitis vinifera
  Intron number 2 from transcript GSVIVT01033509001 (locus G SVIVG01033509001) derived from phytozome v7.0 (chr-ID chr8 ; pos 20179616 to 20180663 reverse strand)
tttctctgtatcccaagctttagcgccgaagagaggtgggttcccttatatttcgcttcatgtttctcaaaaaaaagttgggctgtcaagctccatttctattgtgatcgtgttctgaatatggtttaaagtgggcgcattcattgtgcttagagaaatgggattgtttttggagttctggacttgttatttccagatttattctctgtttggtttcccagaaaaatgctcgggaaaagggggtaaaattttgaatccggtgattcagttgatctatggcgcaccagctaagccaagtcgtgagagtcccatgacgcatacttttaatttctttgtattttccacatttcctttggaaccagacttgctgtttgtgatggtgatcttgatttcttatattgttttttttaaaaggtataatttctttggtatttacagtgtccatatctcctatatcatttccgacagaaagtctttttttcttcttcttttttttcgtagaaaatttattttctattaaagatcagctatctttagatttaggatattatttccgagttgaattagtgttgtttgtttgattatttggatttaggggtaatttgacagcagttttggggttttctgtataagtttaaaaactatttgttgtatttaacctttagattcatctccatggaagattctatagagggtaaaatgactttagtgcatcttttagtgttttggcttatctttgttagattattttttggcgaggttgcataacacctccacatactgttactgggtctatgtgttgattatatttatttgttgtttattgattatcttgtgaccttcttaatcttgtttatttatctattcgtttataaaacttataagatccagtttttgttatttgaatgaacctgtgcgtggaaaggaaaaatgcttcaaaatggcttcctttcttaggcattttcctttcattcttcccatttaaatttgttttgtcatggtttcttttgcaggtatatttattcttgtttcgtgattaggctactga

SEQ ID NO: 99715 - DNA, 419 bp, Vitis vinifera
  Intron number 4 from transcript GSVIVT01035499001 (locus G SVIVG01035499001) derived from phytozome v7.0 (chr-ID chr4 ; pos 1814863 to 1815281 reverse strand)
gggacgagtcactgccgtatccagataaggtattgactgctctaagattcttcctcaagatcatgtaatatagaattcagttcagctacagtttgaaaatcaaacaaagtcacaggcagcagtaattggtttttttttttttaactaacatattagttgagaaagcatttttattaattatcttaatgtgtcttaaggtataaaagttgattttaataattttatatcatttagaactaacaattcagagaaaagtggttttaaacatgtaaaagtatttacacaaataacctgtgtgtgtttattaatcctgttaatattttgattattctactaattgttcatataaaaccacaactctcaacttccctaaccgccactgacttttgctctatatggcattgaactgtttcagcaca

SEQ ID NO: 99716 - DNA, 612 bp, Vitis vinifera
  Intron number 2 from transcript GSVIVT01033172001 (locus G SVIVG01033172001) derived from phytozome v7.0 (chr-ID chr4 ; pos 8910940 to 8911551 reverse strand)
gctctggaaacgggttgaagaaggaaactcttttggtaatttaccatgctttcattccttccccctttcttgttgagatccaaatggagtttctgggagagaatcttttcatgtctatcttcttttggtaatttacatggggtagaattaaaatctttgatcttgtgctatatttttcggcctccagagggtattatcatgctagagttcaagatctgtttgtttggattttattcttatcatatagtttatgatgaaagatttggataatttatcatctgttcttaggtaggccttggagaaaagatttggatatttaattgctcaccctttatctcttttgggtttgcacatactcgagcgttattgtgtaagtcaatctattatgggctacacagggactatgtgcacctcgttttcttgatatcatttggatatttgtttcttaaaggatacacgtcataggttgaacagtgctttatttctattaaactttaattgaattgattctttagctttgcgatgatttttgcttacattatgttttgatttggattaaaaatgaacttgtttaatttctgttggatgtgattgacaggaatatttgaaaca

SEQ ID NO: 99717 - DNA, 486 bp, Vitis vinifera
  Intron number 2 from transcript GSVIVT01031798001 (locus G SVIVG01031798001) derived from phytozome v7.0 (chr-ID chr3 ; pos 4451405 to 4451890)
gcatcattgcttcacggtatatatgactatgcactttcgttcataaggctattatcatcaattcagtgaattgatgcttgtagttatttgatgttgctttaattacagatccatacattgtttaagactaatgatcacttagttgaaatcgaaaaagaaaatgaaaaatgaaaacgacaaacgtgattacatcaatggctcacaaaatctggccttggaaaagggttggaattggtccttctttgcaactagtgatttcattgttgttgcccaattgatatgtgtacaagattatgggaataagattttaggcatcaaaatcttgaactttgttgtttgtgatgtatggtctgtgatactgcaagttttatgtaataattgtggccgtcattatattccagttagtagctcgcagactttggacttgggaaatggttaataattttgtttgggtgttgtttgagatgtgtatgatatcatatgcag

SEQ ID NO: 99718 - DNA, 918 bp, Vitis vinifera
  Intron number 1 from transcript GSVIVT01033273001 (locus G SVIVG01033273001) derived from phytozome v7.0 (chr-ID chr8 ; pos 21960345 to 21961262 reverse strand)
gggaaacgcagctctatttatagaggagttaccaggtaggattcattattatgcgcaattttacgttctgtttggtttctgaggaagtttaggaaggggaaacaggagaaaagtaattttgaattgaaaatgacaaacggaaagaggagagtgacgactcactttaccacttgattctctgtttggttgccgagaaaatttaggaaagaaaaaagaaagaaacgaaaattaagttttgagttcaaaatgtgacacgacttgctcgatgagttctgaaggagaaaaataaaaggtgcttgggttgactttatactctgttcagttgctgagggaaccaaagaaaagggaaagaattttgataaatgccttaaaaagatcactaaacttttattcagtatgtccaaatgtagattttgtccggggctgttatctagtgtagctatgtaacggtaattatatggactgactgagctggatccatgtttgtgttttagttgaatttgtggttttcttttccatggggtttatgttaggaagttaagtttatcatcacttttttttcttttctataatcgatgaaaatggtttattacagagatgatgtatgtaagagtgttgtttgtagaataggttaagattttgtttctttgatcaccttgtcatttatttgagacttcggcatcatgtaaactccagtggaagtgctgagagatccagtgaggtatttctcattttttgtgactgtttgttttcagcttgtgcaatatttttcattttgcaattgattgttttagttttctttgctttcagtgaatatctctgcaactgcttatcttgtagggctgcccttgattttacgtttcaaatctcatttaagttgcacactgatgcattggttttatgaaataaaaggcatag

SEQ ID NO: 99719 - DNA, 826 bp, Vitis vinifera
  Intron number 4 from transcript GSVIVT01037476001 (locus G SVIVG01037476001) derived from phytozome v7.0 (chr-ID chr6 ; pos 13011182 to 13012007 reverse strand)
tccaagtaaagtcaactaagggtatgagctggttttagtatgtcaatgggctgcccaagcttaatataatagatagttgggcctaattggaaatgtgggttggttctttaatgtcaatgggttgtccaaagtcatttcataagataattgggcctaattggaattgtgggttggttttataatgtcaatggctatctaagctgaatacgttggataattgaacctagttggaaatgtagggtgggtttataacatcaatgtccgatataaaagtcattgtaccatgtaattggacctaattggaaatggatccattggaattaaaaatttcaaagtggcaagaatttttttttggatttacaaaaaattataataattttaaaaaatatgataattcaaaaaatatttttaaatctatgatagttaggaggaatcgaattgaaatctatcttttaaaaagataacttcaattaaattttaaaagtgttgctttaaaaaaaaattgtaaattaataccttatgataggtttaaaaataattttgaaaggttcaaaagcgtttgttttctaaaacccctcaaaattttttattttgctattgttaaaagatgtgaaggattgccgcttgcaattgtggcaatgggcggtgctttatcaaccaaagagaagaatgagttagaatggcagaaatttaatgacagtcttggttcccaattagaaagtaatccccatcttgaaaatatcactaaaattctgtccctcagttatgatgacttgcctcactacctcaagtcttgtttcttgtactttgccatttttccagagga

SEQ ID NO: 99720 - DNA, 791 bp, Vitis vinifera
  Intron number 1 from transcript GSVIVT01031970001 (locus G SVIVG01031970001) derived from phytozome v7.0 (chr-ID chr3 ; pos 5805704 to 5806494 reverse strand)
tggtgccactcatcaggtacaaggactaaaaccgttggtgatatttctgttcttttgactgaagttggtgtcggtgatttggagttgtttgctagtttgtgtaatatattctgtgttgctgtgcttatctctatgtgggttagggtgtatataggtggtgggtatatcgcatttgattgatttcttagactggttgggcattgggtgagagagggagtattttttttaccctctttactactttttgcttgtttcacttgtatacaacctgtatactcttgcgctcttttttttttttttttaatacaatttcttacttatcaaaaaaaaaaatctgtgttgctgtgcttgtaacaaatttctcaaatttatcaggaacttttctttgaatgaacgtaaactgaattctgaatactcaagatcttccaaatgattattggactatttccaaaatgcttgaatgatgccaaagaattgtagaatgggaatatattgtttttaactttttatttttgtttttaaatttcttcacctgcattctttttatttctcccaaattcattgcttgagggctttctttccttgaatgtatgttttctctctctggaagtattgctgatatattctctttgcgtttctgaattttattcctatggtgaataattttggaaccacaaatttctctctataatttctagaaaagaggagtaaaatgttagaccatattatctcaatcgcaatggttgaatcatgtaggtggttgaaacacaattcactctcatatccacgaa

SEQ ID NO: 99721 - DNA, 345 bp, Vitis vinifera
  Intron number 1 from transcript GSVIVT01033971001 (locus G SVIVG01033971001) derived from phytozome v7.0 (chr-ID chr8 ; pos 16207835 to 16208179 reverse strand)
gctttgaggcatgtacacatcctttccgtattgcatggcacgctattcatcataatgaagaattaatactttgaaaaattaggatagtgaaatggataataaacattgttcaccttactgcatgctatcaccgatcttgcacacctgacacagaaaaacctcatattagagcaatctatagttaagatatcattgttatgccctacctaaaggggtagctgcactggttctatatgtagcaataatggagtgccattttgtgcaatgatgtagtgattcacattttgattcagggttttcttttaatcaggatataagacgaagcattcagggcaatctccgccc

SEQ ID NO: 99722 - DNA, 660 bp, Vitis vinifera
  Intron number 2 from transcript GSVIVT01032407001 (locus G SVIVG01032407001) derived from phytozome v7.0 (chr-ID chr1 4; pos 27068325 to 27068984)
ccaggtcaattcattcgatcctttttttcttcttctgttttaatactggttttcgaattttttggaagatgggttgtgataattcgaatgtttgtagtcttgctattaggagttttcttaacgcacgacttggtcgctgagaatatcgaggaaatggaaatagagtgagactttagatcgaggaaaaaaattgactcagctaaatcaactagttgtgttaggtttggttaagtgagacggttggtttctgagccctaaatggagcattaatgggatttgtttggttgccgagaaaactgaggaaaacagacaagtataagaccgtgaaccttatgctttatgttgttctgggttatggaaaatgaaaataacctagttgtgtcgaggttagttaagtgaggctttggggttttgcataatgttatcttaaattcataattcaatttcttttattttcctacttttattggctcatggattttattttctgccttattttgtaatatccggaggttatgtgtaggtccactgttagaattgcatatcaatttttcatatagcatggattacctttgtggtttctatggaagaatttgagttactggtttcagttgcgtcatccattaatctggctgaactgttaattcacaggttctgcca

SEQ ID NO: 99723 - DNA, 1049 bp, Vitis vinifera
  Intron number 2 from transcript GSVIVT01035010001 (locus G SVIVG01035010001) derived from phytozome v7.0 (chr-ID chr5 ; pos 875435 to 876483)
attgttcctcagaaggtcaaccaggagtattgcaggtacaaattcttgacataacactactcctggatatcaatcttatgtagctttcagtattttgaatttccttacttttgaggtatttactctctgatctatggaattatggtgattgctgtgaatgtctgtttctcatacatgtttatttgtgtctttgaagggttgaaaggtctgcaaaaattctctcaattaataaaataatcaattgagaaagttccatactgtaactggtctactaggtatgaactggttgattcctctgtgactatgggagttcttgttaggctatgcttggtttttagaaaattaaatagagaggaaaagtagaaagaaagaacaaataaaagaaaattaaaaacagatttaagatgtgagcacccatgcttcttaggaatcaaatgtgtaacgcttggttcacggaaagtactaaggaaagaaaaagaatattaagaaaaatagttttctaaaatacaaaagaaaatcaaatataattaaaattagtttaaaatttatgtattttaaaattatttaatctttatataatagaagataataagtttgaagaagtatataaaaataatttattgactttaaatttattttttatttttctttcattttttctttccttccactttttcttcctattttctttcccttatattttctatcaaaattttcggaactaaacatagtctaaggaaaagagaataagaaaggaaagatagaaggaaagaaaaaaataaagaaaaataaaaaatagatttacaatgcaggcgccttcttaaaaatcaaatgcataacatttaggagcttaaaagagaagaattgagttgagcttgaaagcttaggataacatgttcatgttcactttgttctccaaaacaaacatatgaagcaaaccactagaaagaattgtatccaccattagaaatttgttcaacacatgcttgactactacaatttaggtcattgaatggtatgcatggtgctacagatttctggagagcctg

SEQ ID NO: 99724 - DNA, 748 bp, Vitis vinifera
  Intron number 2 from transcript GSVIVT01035262001 (locus G SVIVG01035262001) derived from phytozome v7.0 (chr-ID chr4 ; pos 11588091 to 11588838 reverse strand)
gtgatttcaggcttttcggcacgagcataatcatctataatcaattatttttaaaaatagatttcgtagaaacaattatgggaaattaagggcctgtttgattatattttttgaaacttgtctttaagaattgtttttaagttaaagaataaaaaacagtttttaaaaacaagttttagaaaatatgatcaaatgagactatgttttccttttatttttaaaaattaataaaaacacctattagttgttctttaaaaattgttttctatttcattttatttttaaaaattattttcaaagaataacagtcaaataattaagaatttttaaaatgattttctattttattttaaatatagaaaagtgtttttaagtcatacaatcaaacagactctaatgatctaaaaaaacttaattctttgatcgaagactgtaacaaggtggaagccactcacatcttcccttcaaataaaatcagttagtattttatatatagtaaggaaaacaccatcttttggtattttcatattaggttctcttcttggaaaagcattgcattattgatattatttaaaaaacttctagatttgaaatatcttgaataatcttaacatgatccagagtttacttagtccaattacagcttgcacaaaacatgtccaaattgtaaaaatgacgtttgtaaatgatatatttgatgcttgaaactccagattcgagggcaattataagatacattgtggccaag

SEQ ID NO: 99725 - DNA, 853 bp, Vitis vinifera
  Intron number 1 from transcript GSVIVT01031639001 (locus G SVIVG01031639001) derived from phytozome v7.0 (chr-ID chr5 ; pos 19437719 to 19438571 reverse strand)
cggattctttgtggtgtttcctcagttttgacaaggtacttgatgattgtttggtttccgagaaactgactgcaggataagaagttaaaagaatgtgagatgtgttatgaacttaagatttgttctcgttatctctcatttggtttggtagctgaaaaagtgaggaagaagagggaaaagaaatgaatttgaatgttctaaattggttttttttgtttttcctggtgccttgtaattgaaagtttttaatttccagcttctttccaacattttcttagcaaccaagcttagcgtgtttgaactagaaacgaatatatattttgttagttgttattttgtttgaaatttcttacaacttggaaaaagtttttgcttaatacaaacaaggtacttaatatccgtttggttgccgagaaattgatcacaggggaagaaaagaaaaaagaaggtgattttctttttcttttctattttgtctcataaaaataagttaagaattgttttctgtatctttaatttcagtttggtagctgagaaaacgaagggaaaagagacatcctaaaaaaaatggttaaagttgaaatttatattttgtattgcttatttatttatttattattattattattgcccctttgagatgccaactagttgaaactttagcacaaagattttgatttctttcatcttccaacattttctcacagcaaaagtttcctttgtttttgtggaccagaaacagatttgtgagagcatttttatattttgtttgaaatttcttagaacttagaagaaagttatgctcaattcactataatgaaaagggtttgttggcagagaggaagagaagaag

SEQ ID NO: 99726 - DNA, 914 bp, Vitis vinifera
  Intron number 1 from transcript GSVIVT01035947001 (locus G SVIVG01035947001) derived from phytozome v7.0 (chr-ID chr4 ; pos 6284629 to 6285542)
aaactgcaaaatctcttgcttgcatcctcttcgtataaccctctctttctcattatatagcattttttttttcttgtaaagttggcacctttttgatgtgtgcttgcaaatttagggtttgattatactctaattgcagtgtcttgtgttaacctactcttaagtaggattcccttttctgctaattttttagcttttttcttgactttcttttttttccccttttgtttcaatgatgtttacataattgtctgtccctctggaggtatattttttccctctatttttgttcttaattattctatttggtggtttgtttgtttgtttggattggtatttgttgagctaattgaatttattatgtttataccatgtagaactggatttgggtttagggtttaatgaactattaatttggttacagagttgttgaatcaaaggcagggcttcgtgtgactttttgtaaacaaattccaagttgtttctctggttgtttgtatgcttttggatcactagaaattacacagtattcataagtaatatccatctgaaaatcttctttcaattaggttgaaagcatacatatatataaactggttcagagtctgaattccaggctttggttttatattaaaatgatgatgaacctttttgattggatggtggaattgattactttctctagccttggctttagtcacgcatggattttctgaacccaaatcttccccaaaaaggtgttccttatatggtaagtcaagccatttgggcatgagtttgagaatgaatgtatagggatttctgactattgttctttgtggtgtttcctttgtataactttcttgattacctatatgaattttgtatgccttactgtcagtattgtgtcaacatgttattttgggctgtttcag

SEQ ID NO: 99727 - DNA, 597 bp, Vitis vinifera
  Intron number 2 from transcript GSVIVT01034713001 (locus G SVIVG01034713001) derived from phytozome v7.0 (chr-ID chr1 3; pos 8248418 to 8249014 reverse strand)
gcttactgcagatacctgagtgtaagtggcttgatccctttttctttgattcatttctctctaccttctaatttcccttttagtgattacactaggcactaatcatatataacttaaacagggatgttgagacacaatcgcatcactggttctaacttgaattcacagaacttgggaacaaagctcttttatgtaaaatgtagtcaggtcctaaatgaaagacaagctcattgagaattctaacacaccattaagaaatccagtctcttcaaatagtgcaaaaagccaaaatcaggccaaaaatgtcatgggaagcagatggaatttttctaaatgaacacaaaatacaaatattgaatgccataaaaaagaaataaattcaattttctttagtagtaaagaacctcaggctgtgtcagttttatcatatcaatgaaaatattgcatttgctacagaaacgaattttattctacactggacaccacagacctctttataaatggagaactttctccaaggatgtcaaaaacaatataatttactaatttaatgcttttaccatttaacagtcaattgatgaaactgtctttctgcag

SEQ ID NO: 99728 - DNA, 498 bp, Vitis vinifera
  Intron number 1 from transcript GSVIVT01034713001 (locus G SVIVG01034713001) derived from phytozome v7.0 (chr-ID chr1 3; pos 8250544 to 8251041 reverse strand)
acctaactcaggccatctcacacacagagagatcggtgagctcaactgtagttgaattttttttttgtaattttcttcaatttttttttttggttgtgggtttgtttaattgattggtattgaccaagacccttgtatgtggttgtgtttgttgcaatatcaaaggaagattctttggagatttttgttgattttatttggtcaatattatccgttaaaaagagtattaaatctaggaatatattctgatttcacaagtttttttttgtatttatcagttatgtatttcatattttgaatatggctgttttaattgttgagaaatatttggctttaaagcagagtgctgggcatcaatggaggatgcaattgcgattttttagtggaaaaacaatgctttattttgtttttcttctttaatgcttgcatgtttgatttgatagaatttgtttgattgggaaattgatttttggggctttaacaggttaggttctggca

SEQ ID NO: 99729 - DNA, 853 bp, Vitis vinifera
  Intron number 1 from transcript GSVIVT01035556001 (locus G SVIVG01035556001) derived from phytozome v7.0 (chr-ID chr4 ; pos 2271300 to 2272152)
tctcgccgctcgacgtggtcatttcgcgttatccggtgaggtttttttctgtttgaattttcctcataattgattgatttatttattttgtatgttcttaatctcgaaatcctcatgaatgtgattctgattttgcttcgatttggtgaggggaattgtatggatttgtttatttatttgttataattagcagttaatttttattaattatagtgctgattttctggtaattacatcaatatgatgatcgagttacagattgtaggcataattgatatttggattgttattggtggtatatgcttgattttcattttcattaatttttgcttttagtttaactattcactctgtaaggcccagaatcggagtacttgttcgtaattttatactttattgcttgaatttaatccctgccgtttgtttggggcttgaaaatagtagaaaaatcgatcatgctaggttttttttttataataattattattaatattatttatcatttattattattattattattattacaattgtgtagctctaagaagttaattttttggtctcttgagaaccagatactggaaatggaagacattgagggcatcattgagtgatgtaaatgagaaatgttgtctatgtgttgaaattgaagagaatttgattggaattgattatggaaaatgttcctgcaattgatcatttgtagtgaatttgtgtgaaaaaatgtgggtactttgaaaactgtagaggggatgattcaaatatgtttacagtttttcatggaaatgaaatcatttgttctactcatattgttacaggaaggtctgtgagagtaattgtcggttgcctcctt

SEQ ID NO: 99730 - DNA, 761 bp, Vitis vinifera
  Intron number 1 from transcript GSVIVT01033891001 (locus G SVIVG01033891001) derived from phytozome v7.0 (chr-ID chr8 ; pos 16983272 to 16984032 reverse strand)
tcgactgattgtcgaagcccttgaatgtaagtttccaatccctaattttttgttttttttttttaaataaaaaaaatctaatggtgcatcattttaggtcgattcgatttcattggtttgaaaatccctaattttttttttctataaatggaatgtttgttgctaggactggggttttgaggtgttaatggttattcgttagggttttggattgaatagtttggttttaatggtgtagctactgtagttagggttttggacttggtactattaggggcatttctgtggtttaaatatatttatttttttaagtggatgttttgctatactgtattattattgtgattctatgagcgagtatttgaacagttgagttggagttggtggtattatttggaaattctgatttatatgctctggtagataggaaaggaaatgggagctttgaatttcgtaactggttagtgtcagagcggttgttggatagttccaaaaaattgtttctcctgcagttcttctgcagccaagcagggaattaaggatttgctattccattatatggtgaacggtgtttgtcttttgtctataaattgcactgaggcaaggcattagcctatggtgctcatcttgtttatttgcttaaatttgaaattctctatttttcttgtgcaagcatggtttaattgtaaatgtcggataatgagggttttcatttttgtgattattttgacacaggcatctgatcttatagcttttttcaa

SEQ ID NO: 99731 - DNA, 319 bp, Vitis vinifera
  Intron number 1 from transcript GSVIVT01032030001 (locus G SVIVG01032030001) derived from phytozome v7.0 (chr-ID chr1 3; pos 23354713 to 23355031)
ttgggaagactgccggataccacagcagaacccaggtataaatctctctctctttctctctcaagactacatttttggagtttctgtgaattgggcatctttgatttccaactgggtgtctgatatgattgaaaagtttgaagatttctgtgaattgggtttcttttgtttgtgagatggggccaaagttttgatgatttggggttatgagtttgcttgatttcttgatttggtttcacaattttttaatttctgtgagtgggtgtgttcttgattgaggaaatgagtaattattgactgtaattgcaggaggagatac

SEQ ID NO: 99732 - DNA, 831 bp, Vitis vinifera
  Intron number 1 from transcript GSVIVT01034483001 (locus G SVIVG01034483001) derived from phytozome v7.0 (chr-ID chr1 8; pos 20632312 to 20633142 reverse strand)
agaagttccctggcgtggccactgatttggagcaggtgtgcaaattctgaatcttatttaggaaccctaattttgattatttgggttggattttacttctttttttttttgttttttttaattgtaattcagttgctccttttttttttttttaatagtatttatttttctgttctgtgtttttggagacaaaattttgaaagttttttgaggaaaatttgatttttgtgttttgacttttgataaacaatattttggaaatgtttgggaaaagaataagtgaagatgcaacaaccaaacacatatttctaaataattttgttttaaaaacgaaaatagaaacagaggtttgcccaatttgtaattgtttatttacattttaattctgcatgagagtgtctgatcaaaggcagtgtagcaaggaggggaagatttgtgagttgagttgtgtagagttaaaccctgcaaacagaatttatggggcgatgataataatataaaaatgttaaactaatctgtattgatgcatgatatacatgataaatttgctccaccttgggtatatgtgtgcgggtcttttgaagttttccttgttctgggaagaatcaaatgcaaccataaattaaaattagaatcacgttattggttcatttttagtattgaaaatatgtcatatgaaggttctgcaatttcatgcaacatttgtttttatagttcaattaggacaggatgatttctaattgtgattatctgcagacattcctagtatttctcaatgcatacgtggttgattcttccttgtaaaccatcttttttacatagcttctgcaa

SEQ ID NO: 99733 - DNA, 759 bp, Vitis vinifera
  Intron number 1 from transcript GSVIVT01035806001 (locus G SVIVG01035806001) derived from phytozome v7.0 (chr-ID chr4 ; pos 4537221 to 4537979 reverse strand)
aaggtaagtttcagagttttcaaattttcaatattatttgtttattttttttttcaattactgtttatttaattggaaatgagtgaatagtttcgtggtgtttgcatgctgatgagaaatttaggttgtgtatgtgttaatttatttttttttcggattttgagtttttgttgtcatgtatttagtgattttggtttgctttactttgatttgatttgattaattcttataaggattttggtgatcaaagtttgcttgtggttttctcgaaagtttctgatgtttttttttaaaaaaaaaaattgggactaattttttgaactgttcactattttttttttattttctctttatactttttgggcattttggagtttcccgtgagtgatgggtgtacaagaaattcatattgagaatcaaacttttaatttttattttccttgattttgtttttatatgatttgattatgggattttttatgtaagttttgaatcattaactactgtttttaaagatctatttaaaagttgttctcattctcttctcttcttcctgatctgtttgtttcaatggaaaacagctcctaagaaggaaaaaaacggatttcaggtttgaagagaaaaaagatagaaatagggaagttctacaaagcattggaattaatataaccctttctgtagttgttttgttcttatggaatgcattggaattttctgattaaatttttatttaatttcttggttgtgacaggttttgga

SEQ ID NO: 99734 - DNA, 710 bp, Vitis vinifera
  Intron number 1 from transcript GSVIVT01034488001 (locus G SVIVG01034488001) derived from phytozome v7.0 (chr-ID chr1 8; pos 20555829 to 20556538 reverse strand)
atcccgccggagactcttcttcttagtcctccaaggtcgcctcctttcctctcctttcctttgttttttctcgattcttccacatgcttcagatctggttccctccgcaatttgcttgctgtcttccctgtagctcgcagagttgagctcgttctctgagaatttgtgctggtgttttatgatttagcaagatttctggagttcttttggtggatcttgatctgccgctgtaaatttttggattttctttgctcttttggcttttggtgctggttctgagtctgatgggttggcaatgtggtttgtattgtgaaatggcacaaaagttgtatcttttttgagtttggattttttaattaaaaaaatgtggaaaataaaaagttgatttttggaacttgtatggaatcataattttggagtagagttcatatgttacaggctcaaatttggcttttgtttttaactattttgaatttttctgaagttattaattggtatttttgtttgaattcgtgagaacatgtatatttctttaattaatgtgctacaaagattgcagttggtgttgtaaatttggcatgtttacataattgggtttatttgttgaatgatttgtttgtggggtgcacttgtttgactttgctgagtaaataaaaaatgtttatatgtttacagatctcccattgtgataagaacatttcttcattgaa

SEQ ID NO: 99735 - DNA, 208 bp, Vitis vinifera
  Intron number 1 from transcript GSVIVT01037783001 (locus G SVIVG01037783001) derived from phytozome v7.0 (chr-ID chr1 9; pos 7834671 to 7834878)
ctctaaattttgcggattcttcaacaccccataaggtatgtgttgtgaatttcaatttatttttatgcatgcacatgtgcctttgagaaccctctgtttggttcctgagaaagttgaaggaaaagacaaaggaagaagatagaattttgaattttgtgggttatgatgtccaggttttcaaacagtggaagagccaatattggttgag

SEQ ID NO: 99736 - DNA, 720 bp, Vitis vinifera
  Intron number 2 from transcript GSVIVT01037136001 (locus G SVIVG01037136001) derived from phytozome v7.0 (chr-ID chr1 8; pos 28754921 to 28755640 reverse strand)
gatctaaattaggttagggttttcccctcctttttacctttttgtttttttattttgtgtgttattaattttttttaatatataatttttaccactagaagctttttgattcaagtgatgcagagaattaacatattaaaccattaatatcctgatcatcacagaaggttgttgtcgctgttgttatgcatttcttgggttggcagatcaattgtggatctaggaattaagatctttatgtcctcggaattggggtggaaattggctaccgggtcttcttgcatcttggggtgcaaaaattcaacctccaagagttggaattgtatagaattagactttagtcatcacatggagatttatgaaaccgttgcagcctgtcattagatttttacactatcatttccatctctactgtctaagatcatccattgttatcatttttgttatagtttaccatgcgttggttcttcttcaagtttaatgtggcttctttgttgcagaatttgtattcttaggatggttgtagtaaaattgcaaattttctttttaaactgtgaagaccctaatgtgaaattgtatgctcttaatagcagatggtgctcaacctgaaaattggtttatatttgcttctatacgtgttgtctgttttgtttcttccctttctttttaatcatatggtatcgttaaattcttcttattcttctctggtagggaccgtca

SEQ ID NO: 99737 - DNA, 805 bp, Vitis vinifera
  Intron number 1 from transcript GSVIVT01037136001 (locus G SVIVG01037136001) derived from phytozome v7.0 (chr-ID chr1 8; pos 28755792 to 28756596 reverse strand)
ggattgggtgtttttagagggagacaacagtcgtactttctgaaactatctgtttattttttcttcttctttatttctggaaggagtggtgattgggttaggttgtgttgttgttgctttgtctgattgcaaatttgatgggttctgtttggtttcctaggaagtggtttttcccggaggaaggggggcattttttggaggattcattttcgttgcaaatttagcccgttcatgtttgtttcccgggcaaaatagcattttggagggttgatctgtattgggaattgggttctgaatgttatgcaaagtgtttctcccgcgaaaaatagcattttttattgcaaatttaaccgggttctgtttgtttccctggaaagtgatcttcccagggaaaaaggcttttatttgattccaaacttgatttggtgctgttcgcctccctggaagtaattttcctggggaaaaagacattttttgaggattgattgtaatttattacatatttaattggcttcagtttgttttcctggagggttatttagattgattggaatttattgtgaagcttgaggggggtttatcatttgtctttatttagatttagatttcctccccaccatcctatgatttgtatttttcctcagtaaaaattttctcttggtgccaatcagatacaaacaaaacccgaattatatgcatttatgtctttctgtgtactataaatacatttttataagcatatctgtaactcctttgctgaatttttgcaggttatagagatttcttcaactgggtctgttaatag

SEQ ID NO: 99738 - DNA, 708 bp, Vitis vinifera
  Intron number 1 from transcript GSVIVT01034952001 (locus G SVIVG01034952001) derived from phytozome v7.0 (chr-ID chr5 ; pos 398013 to 398720)
ccggcgttttccctgaagctgtgctgctcaaagaggtcacacccacttcatcttttcctttttctttttctttttttcccaatttttgttcttcttcactgcatgggtgtggttcgcagtttgcggaagtattttcttttcgtttcttttctttttttcaatttgtcttgtacctgctcgactgtattttattcccgggagtcctgttatctgctactgtttttcatgattttgtagtctaattaaagatggtgacggaaattccctttgtttttatttttttaatatgaaaattttcattgaatttgagcttttgtttggaaaatttgggaatttaggactgtccggtggtggaaatgagaaatattttctatttcagaaaccagtagcaacgaatcgtgtttgattcccagtttttttgaacagttttggagaacatctccagaaagaagggtcaattttagataacctaaaaaatgttgcattatacgttaatgattgaaaacaaccaaaaaaagaaaagaaaaatgatttcattgttgttacttttcaaaatgaacctctttctgaaaaaatcttcatttctgctgctgaataggccctgtgtggttagagttgggcttatcattctcttggtttgttaattgagggttttgttgaatttgagatggtgggtttatttcaaatttcagaagaaagctcaggaag

SEQ ID NO: 99739 - DNA, 703 bp, Vitis vinifera
  Intron number 1 from transcript GSVIVT01031256001 (locus G SVIVG01031256001) derived from phytozome v7.0 (chr-ID chr1 4; pos 749805 to 750507 reverse strand)
ggtttcttcgctgtcactctgtaatcaatgtacgtactgtggatttcatctcggctttgtgttcatttcttgatattattcttttttatttttgggttttttttggaatatcctatgcttcatgatttcgttccaggattttgtttggttcctgagagagatgagaaaaagttgagaaaaggagagaaaatttggagttctgtgttttatggtgttttgatttgaaatgcagaatttaccctagcggcctagccaagctaaatggttgtgctaagctaagttgagtagtgctttttgcttagaatctcaacttcctttttcttttcttttcttttgttttcccacagttttctcagtaaccaaacagtgtactaggctagttgcttgtttgatagtggttttttttttctttgatgagttgttggttatgactcaaatttccagcaaattgtgaatgaaatagttgtaaactgcttgtgataaaagaaaatcatgttggaggtgatcatggtgttgaatatccattgaaaaacccatatctatatctcaaacactcatagatgtcagtatatattttttttgaaaatcttaaccaaatctctatgttttgctttttttttttaccattttcctagatcagtatcacaattcaattatctctatattgtcagaaacctgataagatgcctggattttttgcagg

SEQ ID NO: 99740 - DNA, 839 bp, Vitis vinifera
  Intron number 1 from transcript GSVIVT01031926001 (locus G SVIVG01031926001) derived from phytozome v7.0 (chr-ID chr3 ; pos 5453152 to 5453990 reverse strand)
tctcaagcgaggtgagagccttcgatcttaatctttctctcagagtctgtttgatttcctacaatatgtaggaaagtaatagaatttcaattctgagaatcgaaaccctatttggcataatttttttttccgctcaaacatctttaaacataaaatcgaaaatttgatttgtttcgttttggctttttttctttcgccttcccagcaaccaaacgaagtttaagtctgggatgggtatccgtctcgattattattattattattagttagtagtatttttttttttacaactatttgtggtcttggggtttttaatcagagtttaacgttgtggatcggtatggccttcgtttgttgttgagaaaactgtggaatgggaaaggttaaaattttgaagttgatggcttgtgttgtttgattttgattttcaataaaggaagaggtcattgtagccaatctggaggactgtagtgttctcccttttgagtggaggtttttgtttatcatgttgcacatattgaagaacctaacttttacattttttattttaatctttccccccctttttttttcagcaaccatttgtttagagtatttgaagattgggatggtttactttttgaattttattagtgctaacctgtacaatttggatacagtgatgactttgatgcagttagagtgaataaattttgttattatttacccatttgttagaaaaaaaaaccttgttgtctcacgtatctttctaatttttatgatgttgagatggtgaaacttgaagattatttaccacctatgcaggttggattgcggttgctcctttgtccacttggttc

SEQ ID NO: 99741 - DNA, 932 bp, Vitis vinifera
  Intron number 2 from transcript GSVIVT01036716001 (locus G SVIVG01036716001) derived from phytozome v7.0 (chr-ID chr1 9; pos 23399757 to 23400688 reverse strand)
aaggcccccaccgccctctccggcgcatcattcaggtacatagatacatacaaatttcctcctacaattttttttttgtttgtttggaaattaaatttgaataaagaaagaggaggcggaattgaagaaggggcaaacgaatggaaatggctgacaatgatagagaaactgtctccttctttacccaacactttgctttttcttttctttccttttttttttttttttttttttttgtctgagaagctgagagtgagtgatggagggcacgtggtccactttattacgtcaccaacgatcacaaacctcgggatttccacctcttattctgttaaagtgttccgcgtagtatcttatcatatcccctccctttcacttttccttttttttaacactttactgcatcgtgtcggattttattgcattttataccctacttcttttggctatttccacttgttcccttcttcattttgtcttattcgattaattcccaattgtaaccacctttttcagctttttcttctgctacgcccctcaattactcctactatgtttttcaaatttacaaatttaacacaagaaattatatatatgacaagaaaaaatctgaagaaaaaaaaaaccctcaaataacactataattatacaaatcatgatggtcgaaactgcaattattttaggatattgaaatataaatctcaaaactgtaataattgtcatttagctaataagttcatggatattaaggtttaacaaatggtgcttgcaaatgttggaaatcaaattcaaataactattaattctaaggtttttctagtccaagaataattgtacatttttattaggttgacttgaaaggtttttctaaccctaccatgacggtaaattgtgtagggtttggatccaaagagcacggctagcctgttcgc

SEQ ID NO: 99742 - DNA, 975 bp, Vitis vinifera
  Intron number 1 from transcript GSVIVT01037749001 (locus G SVIVG01037749001) derived from phytozome v7.0 (chr-ID chr1 9; pos 7492553 to 7493527 reverse strand)
agcgattgctgctgggttgtttgtattctgataaggtaaacccttttccggcgatgagtcgctgtttggtttctgagaaaaggagagaatattgagagagaacaatgtgtgcttctgctgggttgccgagaaaatagaggagaataagggaatttttatttttattttttaatcacatctaaattccacccaaccgagcgttttacaattgtttggcttcgtctgaggagaattttggtatatgggaaatcaatatagctttaaaaagaggattttgaagatttcatttgtttttgtttgttttcctgcgttttctcaacaaccaaacggaaggaaaaatgggatattcgtccagaatagcaatgaggagactgggatttgtgaatcacgttttctttttatttttgggtgtgctttctcatcaatcaaactggctgttacgctgatactctcggtcattgaaaccctagaaagtcaatgtggcatctaaatttcttatatatacattatttttttgcatggaatgtgaagtaatttgtgactgccttgtaagtaccagaaccataaccctctgtttagttgctgtgaaaattgaggtagaatatgtttgaagttggagcaaagatttctgtttttttgggtccctaaatttgaaaatttttaggattcaaaatatgaatttcttatattccatgatattgaacaaatggaagaaaaactaccagccttccaaaaataatgacatatcaagtgtcttaggattttatgaaatcaagttgttttaattttctatttccatttgccgattttcatatcatggtttcttttgaccaaaaagacattaaggcgaatctggaccaatttgatttacgctgaaagatggaattgcattcattgtctcttcactctcatatttttttattctctgtccatgtgttctgttaggctgtgaggtgagcttgtgaattaaagaga

SEQ ID NO: 99743 - DNA, 648 bp, Vitis vinifera
  Intron number 1 from transcript GSVIVT01036485001 (locus G SVIVG01036485001) derived from phytozome v7.0 (chr-ID chr1 4; pos 22586385 to 22587032)
accttcagtttcagacccaaattcttctgaaccaggttggtttttctcaattccttggctaatgcataattatagaatcagcccctttgatattttttgaaaaaaattcatgggttatgaacctttttctccaacattttcatgtttcactgccaaattctagatgccgtcttctttgtttcggattgcagatattgtgagtagttataccgttccccttttgtcctgtccagtaaaaatttcccttctcatcgcgtgacctagttggggttttggattacatggcaatgattagtttggaattatgcttcatatgggttctcctgtgaaggatatccattgtgttgtcttgttgtagcataaacacagcatgttccttcgcggcctttgtaatattctccttagcttgtcttttgtttcctggattttacttcctttgtggtcaatgggattcatgaatttgttattgtatttattattacttttaacagctacagcatttctctgtttttcaattcattgactcatagaagttgtcgcaacttgattggatcagttatgcaattcactaccttcatcattgggaaattgttttttgactaattaagcttttttccgaaatttcattgggtgttattcctttaggtt

SEQ ID NO: 99744 - DNA, 652 bp, Vitis vinifera
  Intron number 2 from transcript GSVIVT01032129001 (locus G SVIVG01032129001) derived from phytozome v7.0 (chr-ID chr1 3; pos 22381539 to 22382190 reverse strand)
aagagctcgggataaagcctattccaagtaaaagggtgagcctcttttgattttttttccatttttttttctttctttttttcaatattttctatgatgaaatctagttttatttaactgtgatttctatgtaaagaatttggatgaggagtgacaacatcattcagtgccaaacccatcaattgtgtttatattatgcatgaagggaaacataattccaacaatgctcttttttatcttgaatcagtgcgagaaattaagaagatagagaaaaagaaatcagtttctgttgtttgtttgtgtggaaaataggaaggacaagagcatgcaagaaaaggaggggattttctgatgtagtgtagcaccttctgatttactaggtattaaaaacatcttcaaagatcgatcgtactctgccaaacactacaagggtgttctatgtgcgtcaaaggttcaaattgtgaagaccagaaatatgacttacaagtaacattattatgtatcctagtgggcaagaggggattatctggtgtttcttgcacataataacaatggattttttttttttggatttctagttgggtaccactgtaccttgtgttcttatcttatgttcatcttgatacttttttcagtgcctatcattaattct

SEQ ID NO: 99745 - DNA, 868 bp, Vitis vinifera
  Intron number 1 from transcript GSVIVT01037393001 (locus G SVIVG01037393001) derived from phytozome v7.0 (chr-ID chr6 ; pos 14460608 to 14461475 reverse strand)
agctgcgggaacttttcagtttaacaatacaccaggtttgatcctctctttcccctcctctcatgctggtttcaaactgttttccctttctcctccaagaatctagttcttttcggcttttccctttatatccattaccatattttctttttggaaatcaagattttccaggaaaatttctccatttttgtggttgccttgggctccactccaggacctgttatctaaaggcgggcgttgaaattcttttgtaattaatttcaacgctaaggaagataatatctacttcgattagtcgaaaattcgtaagaaaatccctatgattcgaggagctattatctgtattttcaattcattaatcagctgctaattccaataacctaatttttcatgttcccttagatacttgctttaacatattttctgctgatgaaattgcagaaaatctatagtctatgaaaactagatcatctaggagatttaaattgaaccgaaaaaaaaatgaaaaaaaaaaaaaaatcagtaaaatctggagttttccattatcaccatcagataaggtctcgtaattgattcatggatagactactacaagttaaattttttgcattggattttttgcttgaaaatgcttattttggtggtcctcaattcaggttgagaaattcaaatccagatattttgttggcaactttgctgactgtgaaagggtagattgtttgggaataagcttgaaactgtctctcccaattttgaagggccaaatgatctttgattgtgatatgcagacggttttgttgtttgtccaataggccatatgatatttgacattttctgtttcttgtttcatcaacagcaacatctagcc

SEQ ID NO: 99746 - DNA, 910 bp, Vitis vinifera
  Intron number 1 from transcript GSVIVT01032983001 (locus G SVIVG01032983001) derived from phytozome v7.0 (chr-ID chr1 4; pos 24815613 to 24816522 reverse strand)
gcttatctcaacctccccaagatcgaggtaaattgctatgaatatgtttgattcggaaaaatgcaaatgaaaggaaaaataaaaaataaattttttttttctaatatttggattcttcttgaaaactaagaagaaaatcaaatataattaaaatggttaaaaattatttaatctttacattacaaagaaaatcttccattttttttcattcaaaatttttttttctttttattttttctcgtatttttcctcaaattttccgagtaccgcttcatctttttctcgggatggaggtttctttgatgtagatgccttattatcttatataccaaagttgtccaaacctaaacttccgatcgtccattctgttgtcttacattccaagaacaaaaaacactaaattattaatatgtaagtgcatgtccttactatattatttaattgctttgaaggaatcatcttgttatggaatattgatttttatgtatacttttcctttcagaaattacaatatctatattttgttataaatgtctatccaataacattcatctttgaaattgtcttctctcaaagaacttaaagctgccatagatagtttttttctttctgcaggaagcatgcgtttttatgcatggaaaacaaaggacatgcttgctagttttggcaagttctggtgatgaagatcacagaggaataaacaaaaagtgcttagtaactaatggttaggtgaagtaggaaagaattttgagtttgagtttggtagttccaatgtttttaaactccattttttttttctttaggattgaatcctggctttctcagcttgactttatgctttaaccaacaaatattaaattatgtaaattggccaggaagagaagggagcgcaaggaaaagacattatagg

SEQ ID NO: 99747 - DNA, 1041 bp, Vitis vinifera
  Intron number 1 from transcript GSVIVT01035906001 (locus G SVIVG01035906001) derived from phytozome v7.0 (chr-ID chr4 ; pos 5638300 to 5639340 reverse strand)
ggcctcctaatcaggtatttcccaccccctgtttggctccgagaaatgaaggaagggaaaagaaaattgcaatttttaattatttaattatttattattattattattattattattattttttttttttggtagttatttgaatcaactcgcctcaggccaatataacttattagagttcttacggagtttttggcgacaaaaatgaaggaaaagaaaagaaagtgttgcctatggttgttgttcgtctgcatgatgtcttaggctccagaaaataaaaaatcgaaggttctgtttggttgctaagaaaatgtaggaaaaataaaggggaagaagaatgtctttttgtggttcaggtttcccagaaaaagtattcaatgcaatgtacttgaccatttatagacatttgtgctcatggagtggagtttttgttttctcaaatatttgatctctcgaaaatgaggggaaacagtgataatttctttttgtgcctcttgagcttctccaagacgtcgctacttgcatggttgatgggcttggtttgtctccagtgctagttgttgttgttgtttggttttttttttcaagaaaaatttgagcataatagaataaaaagaaaatttcgaatccctggttttggcattttgattaagaggaaaagaaaaagtgatagtgccaggtttttgggtctctggtgtcccaaattaaaggttcaaaaattttaattcattattaaaataagattcaaattctacatatcttggggcagcaaccaatggaaactatgataaagctttctgtttcttttatcttatcctacattttcccaagagaaaatatggttcaagttttttatgtcttttctcttaccccacattttttcagaaagcaaaagcattgacaatttaaaagtttcttgaattgttgtctcataatagtaagattccaatctcaattctaccttctttttcttacttgtatttttttgtttttggcattgtaatagcctcccaggatattcaattcctttactgttgaaga

SEQ ID NO: 99748 - DNA, 552 bp, Vitis vinifera
  Intron number 4 from transcript GSVIVT01038142001 (locus G SVIVG01038142001) derived from phytozome v7.0 (chr-ID chr5 ; pos 23818721 to 23819272)
tggagtacataagattccttcaggagcaagttaaggtcagactttctgtcactgtcaccccccttcaaaattgcccattgtttgaatcaccataccaagaggaatcatattttctggttgattaagaggtctgctaattaggatcttgtagtaggtcccttcatctacttttcttgatttgagaccaaaatacattcacactttgtagagtggttcgacttagacctatctacttgccataaatctaaaccgaaatcttcaacaacgctgtttttcaacctccctgaataggttgttgctcgacatacagcagcggtgcttggagtctattgaccaacacccgactgcgattgcatcctcaacattcatgtgtgaatgtttctggaacactattgacttttttgtgttgaatgttttgccaacaacatggaatttatcatcttttggttactttgccactagttgtttgactttatcctcactgctctgcctttttttcttttgggggtgggtttaggtgttgagcgctccataccttcagagtacaacaac

SEQ ID NO: 99749 - DNA, 851 bp, Vitis vinifera
  Intron number 3 from transcript GSVIVT01032414001 (locus G SVIVG01032414001) derived from phytozome v7.0 (chr-ID chr1 4; pos 27143693 to 27144543 reverse strand)
ttattgcgttgaagaagattaatatttttgaaaaggtttgtgtatctcacttgttttttgaatgtgcattttattacttctggctcccatagttactggacagaattatatgggcagcatggtttttacatactacttttagtagtgttagctcaattggttgagatactgtatcactactctttaaggcactaaaaaaatattcaacttccatattgccagtttcaggatttgtttggttttgtttaacatacagttaaccaaaaaaggaaaaaaaaaaaaacacacttaggttcttggtcctggtgttttgccatgctgtgaagggaaaggatttttttttgtttcggtacaatttgagaagtacttcttctgttcaatgaatttgtcagagttcttaagtgctacctgcatctataagtggtaacataaaactcaatatgattgacagcattttggctactgttttacatcccactagttttgattattacaccaccacatgaacaatatcattaatatctgtcttgaaggatggcaatgtttggattcctgacctagaacaatatcaatccctgtgatccatgaaaaatatctaaagagtcagcaatgctaacagaattctgcttattgacaatataattagtagattagattgcaaagggataccagtcacatgctgtcttttcttacacagatattctcatttcacaaattaggagaaaaggcagaagcttcttactgagatgtggatgctgtgcgatattatgcacttatcatattgtcttacataaacattcctattttgcataccaggagaaaaggcaacagcttctcactgagataaggat

SEQ ID NO: 99750 - DNA, 866 bp, Vitis vinifera
  Intron number 1 from transcript GSVIVT01032414001 (locus G SVIVG01032414001) derived from phytozome v7.0 (chr-ID chr1 4; pos 27144950 to 27145815 reverse strand)
gaaacctaactgttactgtaagtaaaattttgaaactttgattgtcaattctatttttatttttttatgcaaataaaattttcaataattttattttttgaatttttagggttttattgataatgaattgtttgatgtaatttttgaatggaaaacattgcctgatttgattgaagttagggtttagggtttttaattgtgtgtgcgcaggtcatgattagatgtttagttctacaagaattgtattgggggttttgggatattcatagatgttgaatcattttaattgtgtgttgataagcaatggaatcaattgataacgttatttgggtatacagccaatgtgatcgagctaaatggggttgctcttggaaagcgaaaattggccttatttaaagaattataatttctgataattttactgctataacgaattcgaagttccaatcacaatagtttttgtaaatcacaatagaattgatggaattattgtgacttcacaatgtcacaagcatggagcatggaatcagtcgcaaggaaatggatttgatgctctgtttggttgtgaagaaacttaaggaaaataaaggcctagttgagtcaaaaagtggcgcgctttttgggaatgaaagcatcagaaactgtatgttttcaagtgttacttactcttttctctttttgatttcttagcaaccaaatggagcatgattgaatataagataatgttgaagcttgtctggttgagatggctcattcatttttgtttcatagattggcttcaccatgcacagtatagctatcaaggggcattgatggttttcttttgcttttcttaagggaaaaaaggaccagtatagtaattaatc

SEQ ID NO: 99751 - DNA, 966 bp, Vitis vinifera
  Intron number 1 from transcript GSVIVT01035892001 (locus G SVIVG01035892001) derived from phytozome v7.0 (chr-ID chr4 ; pos 5409439 to 5410404)
ccgctaattctgaagaagttcaggtgcttaaactttttttttcttttatttatgatttttaatttggattatttgttgaggttgtggcttgtttaattggtgacatgggaaacgaaaagagaaggaatcaatgcttaagggtctgtttgcttgctgaatgaatgaacggaattataaattgaaggagatggcctgtgaaagttcatgagaggatctgaaatagaataaactcagttttgtttccaggagatgaagagaagattaaaaatatacatatttttttttaaggcgtttagttgtgaaaaaattttgtttggctgtcgggaaaatgaaggaagggaaaccaaatgaaatataagagtaggttttgaatcttagaaacacacagatatataattattattatattttttttcatttagtaatcagaaaagaaaaatgtctgagaaaatgtaggaagagcagagaatctaaaattttgaatacaagaattttcctttttggtaactgagaaaatgggatagctgagaaagataggaaaatagaaaattaaaatgttcaatgttagaagttagacgttagaatgtttattctttgggacatgagggaaaagaatataaatattgctaggaaaatgtcgaaaaagaaataaagtgaattttgaatccccttttttcatatggtgagtgggagaaaaacaaccaagaggatgtggaaaggaaaaaaactcttacatttatccttctttggtgcttgggagatacaattctccattcaacaactgcacctaaaataagtatttgctgttaaggcaagtgttttatttaaggaagtaaaacaatgcaaaacatgagatagaaaacaatatttccattaatttgctcaaagttcttctcttcagtactcaaacaggttaattgaactggcagatttcaattttcagttttttggcttggcagattactt

SEQ ID NO: 99752 - DNA, 646 bp, Vitis vinifera
  Intron number 1 from transcript GSVIVT01033780001 (locus G SVIVG01033780001) derived from phytozome v7.0 (chr-ID chr8 ; pos 17883040 to 17883685 reverse strand)
catgtagggattgcatttcccccagtttctgtgaacctgaatgcccttgattttattttattttatttatgtgacataatctgtgatggcattttgctatttttagaccccaactcttcgacacgacatacacgccttcgtctttttcctgaatttctctggttttgctacaatatgtttaatcaaatgtccaaattccaaatcgtctcctgacaacaaacccgtgctcccttatccctacagcaccaaaattccaatttcctttattattgttttgttcttggtcattgctcagaattttcataattttaatttccccagcacagttctatacttgacaatagtgtcatctctataaaattgatggtagtttgtcacaagcttgattgacttgctgctgatatctctgttctacaactctatattatatacgtggatagatttggtgtgttaatattgtcttgacaaacatgaatcacatgtgggaatgttgggggagtaggtactgtgacactgtattttctgttcaagtctaagacattgtttctcctgttggttaatttcttgaagttgttaaaaattctgacactgttttatgtaattggttgcagagtcattgttgtacatttttctgttctcattgtca

SEQ ID NO: 99753 - DNA, 537 bp, Vitis vinifera
  Intron number 2 from transcript GSVIVT01035172001 (locus G SVIVG01035172001) derived from phytozome v7.0 (chr-ID chr1 1; pos 12680824 to 12681360)
ggatttgtccattgggagctcatattgatcatcaggttagtttggtattttttttccttggtgaatccaaggaattgtaagatttgtataaattaaattattgattaagggctatcaaaaaaaaaataaaaatcaattattgactaagagttttgtatggattattgaaaagaataagacatgtatttggatgtttctcttcaactccacaatattgtcccacatttgcacggtatttcctacatatctccaaataattttggttatagtcaatgtgaaaagggtatcgatctcccagaaaattaaatcgaaatggttgatcaagattgcagcaacatttgtttgccttggccctacttagtcacatttcaactagggcatttcatgagttgaatttatttgtttagacatgctaataaatattagggatttctgaatcctgtggattctagatcaagcattcaaagtgtgttctttgtatttgatttttaactttttgcagggtggagttgtttcagctgtgacagttaataaagg

SEQ ID NO: 99754 - DNA, 776 bp, Vitis vinifera
  Intron number 3 from transcript GSVIVT01035172001 (locus G SVIVG01035172001) derived from phytozome v7.0 (chr-ID chr1 1; pos 12681363 to 12682138)
tactacttggatttattccgtctggtgactctcaggtaagtttgtctttttccttcacaacatcatgaaaatttagggatgtctcagtaatttctaactggattgctataatgtaggatggatatggacaagggacacgggaagtgtattaaataagacaagaacattccaatgacaacaatagatttatatatttttatttttatatatagcaatatgacatgaaaaacaaatgattttgattaatttatctaaatttctatactaagaattgcaatcattaaattatattactgtgtataagaagctcaaaaaaatgttctatattattatattatatatgcacttgaacaatataagatataaaaaatatgttatattcatagtttgtctaaaacatgatccagaatttttctttgagccaaactttcaatgtcaaataattattcctatttttggcacattaaaggacctctagcatgaatcctagattgtcagaggacatttcatgactgggttggataggactccttaaaaatgccttagctatatcgattatggttatactagtgggaagcataccattaaactatgatcttatttttggagaattaactattttttatgaagttataaaataaatgcaaccaaatctcatccctaaagcaatccttcatgtaggtttcctctgatcagtttccttattgttttctttctaatcagttgaaacttcttatataggttttactgcagtcaggacagtttaaaggagaagt

SEQ ID NO: 99755 - DNA, 459 bp, Vitis vinifera
  Intron number 3 from transcript GSVIVT01033703001 (locus G SVIVG01033703001) derived from phytozome v7.0 (chr-ID chr8 ; pos 18473440 to 18473898 reverse strand)
taaggttagcatttcgtttatctcttcacttgtaatattcatctcattattattattatcatcatcatcatcaatattcatggctgatcatcatatgcccatccatacacatcatgacccacattcataacccaccaccaccaccatcacccatcattgcaaacccgacaatgaccaccattatcatccaacacatgttatgctcatcatgcatacatcatgacccacatctccatacataataatacacatccatcactatcatgcatatgctcatcattatcaatgccatagctattacctatctacctatgtatttcttggtaggaaaattttgtatcaaagagagtttagaagaaagaagattcgatgaattattgatacaatgtgggttggttggttggatggattataattttgtttttgattgaaaaacttagcttgtaggaataaagagaa

SEQ ID NO: 99756 - DNA, 1002 bp, Vitis vinifera
  Intron number 1 from transcript GSVIVT01031574001 (locus G SVIVG01031574001) derived from phytozome v7.0 (chr-ID chr5 ; pos 18369036 to 18370037 reverse strand)
ccatacctgcgtttcgatccatctctgagttcaaggtactgctccaatctatattcccaattcaatcaatcgaattctaggttagatacaatcgtttggatgctgagaaaataatgagaaacgaaagaaaattttgaatcttaaaattttcaccatcatggtagtggagaatacagaaattgacactttaccttaaaatcgtgtgattctttggcttagttgatctgaattttggatttttgacagcaaacggagtgaaagaatacaggtatcaaaaagtggttttcttttatttttcttctttttctacttaaaattggcttagatgacctgatttttaatttttcggaagcagaagatgagagatgacaaaatttgtgttcttttatttctctattttattggaatccaaacaaagatttagggtttctctttgaatgtttttaacttgtcaatgttattgctgaaaactttgaaatctaggattttaggttgaagctagaatttttataaaattaactatttggaaatattatcctgtaaaatcatacgtagaaaagattttggcttcaattattgttgactaattttaccatggaaagataaatggtacccaccatgctgccaatgaatcccattgtaaatggaagcctacgtaggaaaaaaggaacaactacgaaaaaaaaaatctaaaaactccttattgaaagaagaaaagaaagaactttaaagtgcaaaataagtgaaatgaatttaattttatcatctataaccaataaataataaaaatttattatgatctttaaggtgattttagtatgatttttgctatcaaatagtaaagatgtgggacacaaggggaagttagtgatatagttggagtactttgggcagcaaaaggtttacaagctctttgtagtattttaattttttttattagtgggttagttgcattctctgttatttatttaaattgctgttgcagttgaattttcaaaagca

SEQ ID NO: 99757 - DNA, 768 bp, Vitis vinifera
  Intron number 4 from transcript GSVIVT01035138001 (locus G SVIVG01035138001) derived from phytozome v7.0 (chr-ID chr5 ; pos 1786647 to 1787414)
tacggctcgcctctagctgccgtgagaattactgcttgctcatcatctatatttgcagtcactgagatttttctttggtaattgggaattaacgacacagtgatttcgatggggtgatccagttttgatttgggagcattgaactggatgatcttctgatccaattaaaacgaaaccttagtcttcaaccaaaacttaacaaataattagctaacatgaatcatttcctctgaaaagtagtctcagtttgtcattataatttttatttactcgtagactttcatcctcctcttcattccaacaaggcaggttactgtgcagtgggacacttcaacttggtgtaaggatggttgtagggatttggaagtggctcttggtatatgccaggagataacctatccagatttgtgtggtccgcaatctatagtaatagaatagtgttttcggacgtggagggagggcggccacatgccattaatgtactttaatacagtagttgcatagggaaatgagggagagagggggttgaagccaaagttacatctgctcacttgcaatggatggccttttgtcaatccaaaaccctcagcatgcatcttacctttgattcaaaataaatttctttatttactcagatttggacaaaagatgatgaataggattgtagcagatgcagcttgtatatggtgagggattaatgctaaatatatatgcttgtccaaatcatgttcagaaaacagtggtgacaaccaagagcgtggagttcat

SEQ ID NO: 99758 - DNA, 874 bp, Vitis vinifera
  Intron number 1 from transcript GSVIVT01031295001 (locus G SVIVG01031295001) derived from phytozome v7.0 (chr-ID chr1 4; pos 574605 to 575478)
tctcagtaccatcagccgccatttctcgttatccggtcagcttccgatcattgcttttatctgtttgtttttgttgtttttttggtttttatgcgggttgggtagtgatttggagttgggattttgttcgaagggctctgtttggttgctggggaagtgcagtaaaagggaagaaatttgaagtcttggaaattgaaccagtcgtttcgtttccgtttccattttcttggggtttctcggcaatcagatagaggttaagtggtttcttttgggtggtcgtagtttagttcataagtgggaagtggtggctgatgtcttgatttgaagaaaatttttacatcattcatttgaagcatgatccagctaattttgcttgtaagtagccagcggctctggagtctgggcaagagagagaagtacacccacttccagttgggaaatttttgtctattgagcagaagattatgtgaagataatttgatgtgggttgctgttatgtgcactacagggtgcatgtacaatgtggaaataggttataaaacattggtgtagtgtttgattttctgagggaaaattttattgatatgttcgctatagctaaaactgaataaatgttttggcattatggggtaatgaggaggagagatgtgggcagtggtgggcttatggttgtagttctctgtaagcggctcttccatccgcatacagggaggggcttttgctatcaattttaacgactctactctttcatttgaattcatatcctaatccatggtatagataaaccggccagtattttccaacagtataaggaaattccagtgcattttatggtgtggataggttgcaagaaacaattttcctgcagtggcag

SEQ ID NO: 99759 - DNA, 819 bp, Vitis vinifera
  Intron number 1 from transcript GSVIVT01031524001 (locus G SVIVG01031524001) derived from phytozome v7.0 (chr-ID chr6 ; pos 17651855 to 17652673 reverse strand)
ccagtggccctgacgcaaaggtgtcatgaattgttattattatttctaattattttttctagttctaaagatttttcttgtgtctgagtatttttatgaatttgttgagtattggttgtgcttacagtagtgcatggattgattgacagtggttgtttgcgcatgtagcatcatcaagattcacatgcaaatgcacggtggtgatgttatctctgccaaacttttcaaggatgagaatcttgatgatgctgcatcggcaataaactactatacaaagggctctctcgtcacttgttgagcaaggtgattctttctttttggttttctgttaatgtctcaggtgggtttattgtatttctttttcgtgggggattctttatttggagcagtccatctatggattgtgcagtgcagactttcaatgtgttttttccagagatcattttgtagacaactacgaaagaatttaatgcatcaatgaccattcaaaggtcacttagctgtgctgactttgtagatctgtgattattcttctgagccacaaaaaaaaaaaaaaaaaaaaaaaatctgatgtgatggaaatggcatctctttattcagcttcttgatgagatgggagttcagaccatgtctaaaaactgtgcgcagagaaagggcttcattctttaatcatatgagtgtttgatttataatttttcgagcttactggcctctgtagatctttgattttgattattctttttgagatgaatgttagtggggtttcatcgctcaagtactgcaggaagacaaaggagcaactatcacctggaggtaccg

SEQ ID NO: 99760 - DNA, 1020 bp, Vitis vinifera
  Intron number 1 from transcript GSVIVT01030569001 (locus G SVIVG01030569001) derived from phytozome v7.0 (chr-ID chr1 2; pos 6822363 to 6823382)
agattgaggtaaataattatagccttggtgatagtttatttctattttaatccattgaaattgtgctgtattttataatacataataaatgtagtgcgcattgcctaccagaaaatgaatgtaacacaatttgttgcatttcatatgtcatgcacgtaatttatggacacttctttcagtatcattgctccgttagatgtttccgaaatgacttagtttaattattgattcttcttgttaacttttttaagatcatatgcatgagatatttatgcaattgtctagttatttgtttgtgggttaaaatacaagcattaacttgatgggttgattgtgtgtggtcctagagttctctaggagaataatttggttagctggggctcttatagcttgcagctgccattaccatgcagtaggtatatgtaactcgtctttatgggcatggaaagggtaggaaagttctactaatccatttgagtaaacaagaacaaggagggatcaatggatgaagctagcttctggttacctcttttgaactttcagaggatagcagtcatttattcaggattatgtaatatcaggattatgtaataaaacatcttcttccccacattttaaatattatattgttatgagattctgtggttagcgtatgaaatgtagcaccagctagttgtcgttacaaatgccttggatttgggttgacttaggctatttggacctgatagtgcattgacattggctgtgtaaactgtgtgtgagtaacaaatacagaagttagtactttttgaacagctactttgataatctatgacatatatttgtgtcttgaactcaattcataaagatgcgaaagtacatgtgtaggagaaatctctagcctgttttaccatgtctaaatattagtgaacctctatgtttggtatttttgttctttcattcatagcatcgtgcaattcgatttttctgataataatattgtcattgtcctgcaggctctccctccagttcctccattgg

SEQ ID NO: 99761 - DNA, 765 bp, Vitis vinifera
  Intron number 1 from transcript GSVIVT01038120001 (locus G SVIVG01038120001) derived from phytozome v7.0 (chr-ID chr5 ; pos 23633581 to 23634345 reverse strand)
tcacgagtttgactgaccgtaagaattttcatatggttcggtttggttactttggtaactgttttttattttaaaatatatttcacaatcaaaaaatagtttttccttgtaagggaaaaaaatatgatgtttttaaatttttagttattttgagttgtttttacttaaactcctttcgattccattgacaagataaaatatctatatcttaccgtatcatatccatatattatattggttacggatagatatgttatattatattatggttatatttaatttataaaattaataaaaaaatatgaaatatatattatttttaatatttaaaataaaaattatatttcattttaatattttttatttaaaaaaataaaattccacttatgtttaataatatttatgattaaaatatttaaactttataaataaattttttatattatgttatttaatatataaaaataatttatgtcatatattgatattaatttataaatatttttttaatcataaatttaatttataataaaaaaattattttacaaaataagtatataaaaaaaataaaaaaatttaaaaaaaattaatttatgatacataggatatgtatattcatattatagtatgagattaacatatgtagaaggaagaaaaaaatggtggataatttaagaatattgtcggttgttatagacttttgttctaagaaacattaatgaaaatattttttatgtgtagacttttgtagcgttgaggcgacaa

SEQ ID NO: 99762 - DNA, 343 bp, Vitis vinifera
  Intron number 2 from transcript GSVIVT01033236001 (locus G SVIVG01033236001) derived from phytozome v7.0 (chr-ID chr8 ; pos 22328910 to 22329252)
tagccaaggttatccaatcatctcttgtcttctatttagatgtcattgttttttattttcttttttagagtaatcaatggttcaactgagaaatacatcatcactgttagcaattttatctaaataaattatggcttctggtgttgattggaaaaattgcttttcagttgcacctgaaagcagttaccctatgcaccctggatggcagtgtgacttttactttggttatgggcttggtatttttatgccttttagcacttgatttttcaattttgatttggacaggctcatattatgattacctgtaactccaatgtttaaactagctactttccttttgtag

SEQ ID NO: 99763 - DNA, 647 bp, Vitis vinifera
  Intron number 3 from transcript GSVIVT01033236001 (locus G SVIVG01033236001) derived from phytozome v7.0 (chr-ID chr8 ; pos 22329583 to 22330229)
agcaggtctgcctcttggaacattcgcattataactttctcaaaaatgaattatgattcaaatcatatattttctatgctatgccctgcaagcaagttattatagaaagagagcttgaagaggaaaaggaaccctaaaacaaaagttttaccagactagacagtatgcaatgatttacatttcctaagccgtattcaccctccaaatgcttagctagaagtgtcacccttgaactcagagttaggtgattgaattgatattgctctctaggtattactgaaccaaggtactcccattaaactaaagggcatatttattagacaaagaaaaaggaagaaatgaatgctggttgcctggtagtacatatgtgtagggtgagtagaaaaagtcaaactaattaaagctaagtgaaattgtgactgtacatgccactgactattaatgtgtgaattatgaacaatgtatcctattgtattctctcctttttgcttcaggattgctagggtgctccatattattttgcattattactgaaaggtgtattttgatattttaaaaaaaagcatgatctaaaaactgatatattttatttcatgtttttccttctacaaggagcagcgtccagttattatcatcaaacagtcaag

SEQ ID NO: 99764 - DNA, 689 bp, Vitis vinifera
  Intron number 3 from transcript GSVIVT01034272001 (locus G SVIVG01034272001) derived from phytozome v7.0 (chr-ID chr9 ; pos 13924660 to 13925348 reverse strand)
ctcaggtttacttgcaaggcgccttacagtgcaaggtaccactttctctatagaagatttttctgtagttttggagttgaatcattgaagttaagaactgaggtagattctggcaagccaaggagaaaccatattaccataaattcttttttttttttttttttctggattgttttacttcttggaaatcctgtttctcaatttggtcaggtatatggaaattccgaggaaaatatgttttacattgccataattggaaacagtaaggaatttaggttatatttggttccggaaaatgtgagaaaaaatataagagaaaaaaatacaaagaaaaagttaagaaaaataaaaaatagattaaaacccaatacattatttttattttatattttagacttattttatttattttaactcatcgatataatgattaaataaatttaaaatgcataagtttttaactagttttaattatatttgattttctttagtattttttataggacaattaaacatgagaaaataattttccttattattttttttctttggtattttctgagaatgaaatataaccttgatattttcctttgaaatagcaatggtgttctagtaacaacatttgttttgttagtttcacgttgaatatgagcaagaaaatgtctttcttacctgttcagcaactaaca

SEQ ID NO: 99765 - DNA, 994 bp, Vitis vinifera
  Intron number 1 from transcript GSVIVT01035352001 (locus G SVIVG01035352001) derived from phytozome v7.0 (chr-ID chr4 ; pos 697835 to 698828 reverse strand)
tcctccctccctcatcaactactgagaaacttcaggtattaaatctcattcctaagatttataagtacctgctcgtttgtctatttgttggtggtttgattagggtttgtgacttgaactataagattcttgaaatgaaggtctgatatattatttagtaatgatctgatgtgttggtttgatgaatgtaatccacaaattttgtgtactgactgtttgtcgatagtttcaaataatgtaattcacaaatttcgggtactgactatttatcgatagtttcaaataatgtaatccacaaatttcgtgtactgactgtttatcgatggtttcaaatctttgattcattgttgtccgcagcttgatggcttgagaactcattgtttatttttggcattatagtgttgtaatactgaatttttttttttataaaaaagaaaatgtattgtagataaaaggttgttgttgttgttgttatatcatataattattagaaaatgcccgaaaatgtgttagatttggtgtcaaatcttccttcctaaccccaaaagttgggtaccaaattttttgttcaggcaccaaatcttgtagagcctgtgttagtgtggaaatgaaaatgttatttcagagaaaatttcctttttcaaagaattgaaacaatgatgagtttgttttttcaatcattttcaattgctaatgtgcacggttgaagcataaaaaacagtatggtaacaatttttaagaatgattaattttttttttccggtaaatatttttgaaaatgtgttgcaaaacttgttttctatgtttggttttttctgttttcgaaaacaaagtctttaagtgaaagtcaaaataaaacactcttaacaataagtgctttccttcattttctccacaaagcatatgaatgattccatatatatgggaattttttattttttatggttacaatatctgaaacagtgaatgactatgtcttcttaggtgggaattc

SEQ ID NO: 99766 - DNA, 452 bp, Vitis vinifera
  Intron number 3 from transcript GSVIVT01037685001 (locus G SVIVG01037685001) derived from phytozome v7.0 (chr-ID chr1 9; pos 6876262 to 6876713 reverse strand)
caagtcaagccaatcaagcacctacaaaaagagtttgttttttctccctatttcaattcagtattcaactattcatgaaaattgtctcccctcaacactattagggtgctatgcatgaatgtcaaaatatgctatctttggctttggtttttgggtccatatctgtgtagtatgatttatatgttttcatgtataatgataactgcagacgtatggttcaattttatttggaatatcaataaaactatgcatatgagaaacaaatgctagtgcaggattgttgggatatggttttccttcttccttacctctccttacacctactcccctctttttgttatgtgagggtgccatctccaatggatgatcttgatgtgtaggtgcccctatatcaatattcaaaaaattgtttggtttcatctatcatgcagggacatcagcagatatccatt

SEQ ID NO: 99767 - DNA, 776 bp, Vitis vinifera
  Intron number 1 from transcript GSVIVT01037685001 (locus G SVIVG01037685001) derived from phytozome v7.0 (chr-ID chr1 9; pos 6877230 to 6878005 reverse strand)
ctcgccttcctgtacttccatcctcatacgtttctgtaagattttccctctccattgttctttttctctttgtaatttctagctgccttgttgtttgatcgaaatcgtagcatttgctgccgtttggcgccaagaaaatggaggaaaggaaaataactcaagagttttgaacgttagggttttaagttttcatttgattgttctttgtgtcagttcctgagctagttgagctgacttttacattttggaaagctaagcagtggagaaaatgaatttttgttttcgtttcttgtatttgcctgcattttcgtgtttttcttgtttgagtttagtggactagtttgaattacttaattgggttcatgctcttatacttgatcgagttcattttctattaccacgtaacggagattgtagttttcggtgctgcttggttcccgagataagtggaggtttaaaaaagagaattagaattttgaactctttcatcaatcactgggattaattgagtcgactactccatttttggaaagaaaaaattttctagacttcacgtttttttggtgtttggagtttaatgaacaactttgaatttctttggattcatgctgttatgctttttctgttttttttccctttctttttttatttatctttcagtttgaaatgtttaattgttagtttatgattcattttttatggtttcaattaaacgagattgttcccaagtgttttcttagacacggattgttctatgtgcattgacagttggcaac

SEQ ID NO: 99768 - DNA, 795 bp, Vitis vinifera
  Intron number 1 from transcript GSVIVT01032759001 (locus G SVIVG01032759001) derived from phytozome v7.0 (chr-ID chr1 3; pos 963838 to 964632)
attacgtgagttgatttggttcttcgtttttttttcttaaattattttttcgctaattcttgattgaattttaataaatcggagatctggaagttcggttttcgttttttgtgatttcatcgtaagacaatgtggtgatctgtttggtcgcgagaaaatcctgaggggaagagaaaggaagataggaattttgcgttctacaattttgaatcaactaggtctggtaaaactagttggcgtagtttgagtccaatatcgcacttttttaagaaaccaaaactgattgaaattctatatgtatttttttattctaggaaaatttgcaatgaggtgagaagaagatttgtaataatattgataatgaaaaaaccgaaaaaaattgaacgtgcggtctcgttctgaattgtgtggttgttcggttgaagatcttatgtataactaagcttataactttggtcataagctctgtttgtttggacaaaatactttctgggaaaatttagattttaggtttaaaggggaaattttcctttttccaacatctaactaaatagccgagataaatgtttggctaaattgaagaagccgtaaatggaaagatgtttccagggaaaaaaatttcctcttaactatttctgtcaggaaaatatgaaaaacttgaaattgtaggatgatacatttttttttttaatttaaatgtgttttttccttttgtgtttgtgttatacaactaatgagttcctgttattcaattttgcagtctttgtactctcaagtagcacctcagttgaagga

SEQ ID NO: 99769 - DNA, 1005 bp, Vitis vinifera
  Intron number 1 from transcript GSVIVT01035670001 (locus G SVIVG01035670001) derived from phytozome v7.0 (chr-ID chr4 ; pos 3178653 to 3179657)
aacggttcaggtatgccctgactcttctttgtcgaaatcttcgttacccagatattatttagctgatgttgttcataattagggacccagagttgttgttggaacttttcacgaacacttggtttgaaattgactatgatgggcgttagtgattgggtatgtgaagattttggatgttgggaaaatgaaggaaaaggaaggagaatttggaacgtgtaggttgtgactgaaatacccaattgtactaaacacacaaaaaggccattgcttgttgaggtcttttctttaagtcgtgtttggaaccctggaatagagaaatgggaatgggaaattaattccattcctattcattaatgtgtttggattgtttttcagaacgagaataggaataaaaaattcatttgtagagaaccaaatcccactctcactaggattttgattcctcggttctccatggtattgtgattcatcccctttccatcttatttcggttcccattcccacatgccaaacgcacaagggtaatgggagggctgaattgaattcgtgacagacctaagtttcgatatatatatatgtgtgtgtgtgtgtgtgtattatgtagtatctagtgtcctcatatcaaattttgtgtctttggagaatcatattgatcggtgtttcatgctatctccagtgtattttacagtgtatttaaccgcttctatgttctacatgtatggtatctcaacatttctccgcttgctgtgactagtttggctgaatttcaatcctggccaggggccgaaaaggcaccaagatcgattaggtaaaataataggcagcaattccaaaacttagctgaacaatgatgagtttggaaaattggtttttgggaataattgaagtgagtattaggaaaattgaatgaattattgaatttggtttcaagaaagcatagaccatattgtgctttcagtgtgacatgaaagccttataatttgtttattagatttgacatcgcag

SEQ ID NO: 99770 - DNA, 725 bp, Vitis vinifera
  Intron number 1 from transcript GSVIVT01036477001 (locus G SVIVG01036477001) derived from phytozome v7.0 (chr-ID chr1 4; pos 22549321 to 22550045 reverse strand)
actttccatttcttctccaagcttcagcatcaaaggtatctctttttactttcttggggttttggttgataagggttgatggagatgtgtttgttgtggaataagtgtttgtcttctgctgaaaatttggtgggttgtgtaaattcctagcgctttcctttctggggtttttgaacccagtctgatgtattttaggactccgcaactgtattttgaatgctgctttttgccatgggcagttttgaagcttcactttggaacaaggaaagggattttagatatctgtggttctttttgtaaggttttgatgggtgtcttgttgaaaattttgatttatggacgaccatttgatgggtcactttaatgtagcagagatgatcaagattacatttttgatcatctgttatgggctttcttgtttgcaaacagttttaagaggcttccatgttcatagattttagccacagattttattaagatagcatgttaattttattcaatccagctgattttcacttcagaggatctagtaatccttcattctgtagatttgtactttttgatactatatgacaaggttccagcttcaaatttagtttctattgcttcatcagtttttgtgttgaaagacccatcgacaaaatcagacaagtttgaattgaattttatgacagtctatgagttcaatcttttctttgcattcagttggggagcaagggaagcct

SEQ ID NO: 99771 - DNA, 995 bp, Vitis vinifera
  Intron number 1 from transcript GSVIVT01032169001 (locus G SVIVG01032169001) derived from phytozome v7.0 (chr-ID chr1 3; pos 21855122 to 21856116)
catcagttcgcgacccaggtatgtattcaatctctcctacaattcccatatttctgtcttatctagctatatcaaataccctctgtttggccgcccagaaaacctgggaaattgcggtaaagagggggttagtttccatttttgagtcttctgacccgaataatgaataacccaagattcaatatttagcttcttttctttttgtcgccatttcagcacctagccatagttaaaaggcattaactattttagatttagttcgaatttcaatttttcatagggcgattcctattttgatctaagaatatgaaggaaaaggcaaagtaaaggagggggtttttgtgcttggagttttttgaccacatgatgaatgacccatgattcaaaattttaatcagagacagaacccgagtgttaattacttctataattgtaaacttctctgtataatcccaattttaatggataatgttttgatgccaagaaagtaaaggagaaggtttctgtgttttaagtcttttgaccaaatcatgaatgacccatgattcaaatttaaatgattagtcctgattttgatctgtcaacaattcattgtttttatgatttttaggatttaattgcagccaccaacttgaaaatgcatgtgacatagtgatttggctaaatttttggagaattctcattgggaaggaccttgaaggcatattctttgatgtgggactcacaacaacatgacaattttacgattttagtagttttgatactggtttgtaatgactatgaatgagagcttgggttcattttggtttttgaacctgttagtttacccagcttgatcaatggcttttaggaatcatgtatacaagtcacaaactttgcttcagcgctctttcatgaaatagttctttacacgccctttttctgcatgattaacaggcccttttttctcattgattttctgtacaatttatttgttctattgatcaatgcctcag

SEQ ID NO: 99772 - DNA, 880 bp, Vitis vinifera
  Intron number 2 from transcript GSVIVT01031306001 (locus G SVIVG01031306001) derived from phytozome v7.0 (chr-ID chr1 4; pos 510893 to 511772 reverse strand)
aattgattgggaatcgttttgtggattcgtttgtaatctatttgtattgggttgtttgacatcacttttgattatgttttgtttcattgtttggatgctgaggaaatgtgcaaattttcgtagaaaaagtggtgaaaggaaaagcgttaaaaattttgaatttttaggtttttcttttttgcgacctgagaaggcgaggcttttgcctttttaaagggtgaaattttattttattttattatttctcaagtttttctattttcgtaatcttaagtggcatttcaccaattggattatggactttcggaagattccaagttattctattctgcatgatatttgtgcataagtgcgaacacagaggtgttgcttggggctggcataaaagtttaaaattttgatctaatggtctgagtggttacgtagaaatgaacgaaaatttgaataaataaataaataaataaaaatttgggatcctatgatacccatttcagccgctacatattattagattccaacttttcattatttttctttgtaacatttttcaacaacccaactgtctgtgaagctgcatttggatgcactggtttggatcgatttggaatccattgctgcaggattcaaaacctttgctttaactgttctgtggacttgagggtgtgaggggtctggaatttaaatatatttagatttgattccagattcattggcatatgaataagctatgttgtggatttaagttattttgatgccctttacatgtaaatattgctaggagttttactattagtttttgtttagtttgttccttataatctgaagttctcatggagagagaggaggggaactgattattatttattaatttccgcagttt

SEQ ID NO: 99773 - DNA, 494 bp, Vitis vinifera
  Intron number 2 from transcript GSVIVT01032376001 (locus G SVIVG01032376001) derived from phytozome v7.0 (chr-ID chr1 4; pos 26805881 to 26806374 reverse strand)
atcaacgagttgttcttgtaaatcaagtaatttcctatttttttccttgacctgtctattaatgttcgaaccacttctaatttgtttttcttaattggaaatgcatatggtttatagttgtagaagatttataaattgcaaggagatgcagcattttttattatatagcttaggtcacttgatttgtttttttgttcaccttgcccagaacttctttcagtgctcactgtacctgaaatagatgattcaattgtaacaatcactcatatattcctcacaaccaaagccctatgcaggggatgcaagatttttgagaattcatactgcaaatcttgcatattaaagaatttaattctagagctcccacctgctctccaacaatcaaatggaatgatcttgtaacttaggctttcatttcttcagaaacttcgttttatgttcttaggtttgtttttcacaaccattgcaggattcattttattgcccgctaagtg

SEQ ID NO: 99774 - DNA, 813 bp, Vitis vinifera
  Intron number 1 from transcript GSVIVT01038605001 (locus G SVIVG01038605001) derived from phytozome v7.0 (chr-ID chr1 6; pos 21544368 to 21545180)
ggtaaaaattcaaatcccaggaaaatggtttctagatctgactagtgttttgtttttccattgtggatcttgcgcaattgcggatctgctgtgtcatgtgtgtggtttgttagatccgtttgttttgaatgtgggatctgggtttggtgtcggatctgggtgtttggttgccaggaaaatgtggggagggaatgggagttttgggtttggtgtttgtgtttggttttgacaaatgggtgtcttattgtggtccttttcagattcaaaatgcatattccttttctcttggcaaccaaacggagcgttgagggtgtgggttgtgaggccattagctagtggagtcactggttttgtagatcatgtgaatgctttttaataattaattccttgtcaattccgcttcattatgtaatgtatttctttgctttaattcaatccatgtcgttgatgacccactaaatcatagctggtattaaaaagtcttcacgatgataatcattttgctttggagaaatgttttaaattgaatggatttttcattttgtctgcatcctaatatacattctagattttggaattcctttgattgccagaggaagccaccatgtgaagctaattattgattttgattgtatagaataattgatatttatcgaagttcttaggcatgttcgtctttccatctgatagatttgtgtttttgggtagttttgctataaaacatgagttgaaattttcggccatagttctttttccatgtctgacagattgatgtttatgtggcaatagccggggattggttgcagggtcctt

SEQ ID NO: 99775 - DNA, 343 bp, Vitis vinifera
  Intron number 2 from transcript GSVIVT01035421001 (locus G SVIVG01035421001) derived from phytozome v7.0 (chr-ID chr4 ; pos 1191836 to 1192178 reverse strand)
aaggggttctacagaaggtaattggtttaaaattctgttctatttctgagagaatgtaacctcagattcttaattatttgtgacctaacaccaaactttcattcaactgagtgtagtcttgtttaattatttttcctggtttagcatgagtttttccattttctaggaaatcaaaacagcataaattctaaggtgtaaaggtttctttcttgttcttttcttctgttttctcatatatcttatggagggtgaattcatatatatatatatatattttttttgttagatctgtctgtggattttaatttgggttgtgatattattatcagcacttttgagcata

SEQ ID NO: 99776 - DNA, 248 bp, Vitis vinifera
  Intron number 4 from transcript GSVIVT01032163001 (locus G SVIVG01032163001) derived from phytozome v7.0 (chr-ID chr1 3; pos 21943639 to 21943886 reverse strand)
gcaggttagttctagttcatttcagcaatcattttggaaggaccttttgtttggtttctaagaaaatataagaaaatgaaggaaaagaagagaacaacttgaattcacactttgttatgcacattttctttgcattctatcagaatttcgaagtgggcaactgagaattttgatttttttttttttgttgggttttattttgtttttcctcagaggttgagcctatatcaactttccttgaatttgga

SEQ ID NO: 99777 - DNA, 659 bp, Vitis vinifera
  Intron number 1 from transcript GSVIVT01037652001 (locus G SVIVG01037652001) derived from phytozome v7.0 (chr-ID chr1 9; pos 6575545 to 6576203)
aacagattttggattgtcggttttcattgaagaaggtataattctcgaactcttatatatcattgtcatttatttcgattatctgaataatcttttggttaattggtttgtatttgtgtttctgccctttttaagatgttggagtattagaagatctactgaaattcctccatcttaaataaatattttgtattcttgaagcccatcgatcatatgctgaattgcatttactattctggaacaatacattcaaagaagaatgaagcattaatcatttcttatcatggagcatctgaagttgccaactcagctggtttttggggtgtcctcatttgtcatgctgtgactttaaaatgattttcttgaatgaggaatgatcatattacaattaatgattgcaaggatcaaaattcttgctttcatatcttcaatctaacatggcagcattatgcacacaagtttcaacaattgtttcttggaagaagaagaatgtgtagcaactcttgttcattaagcaagaagtatatgtttgattggaaaatgaaatttcatatgtttccacctttgatatgggtgtctagcgatttaaatttgattatgactaacctatgaaactcttaacagggaaggtgtatcgagatatcgttgggagtgcctac

SEQ ID NO: 99778 - DNA, 803 bp, Vitis vinifera
  Intron number 1 from transcript GSVIVT01031272001 (locus G SVIVG01031272001) derived from phytozome v7.0 (chr-ID chr1 4; pos 664430 to 665232 reverse strand)
gcatcagactcactaatcacattcaggttctctcttttcctcaacccttttgtagaaaactttggtgatttcattgacattgtgtggttttgttgggggacttggtgaattgttgctgggaactttgcaaaatcattggaatacgtgtttaggttttaattttcagcacatccacttgttcaaaaacacagaaaacccattacgtagtttgaaacaattgagttgattcaacccatcatttccatgaattgggttttgagtttgcaagtagtggaaggtatcttcaagccttgtggacggtataatctgattttctttaacttctgcagcttagaactcgtaaattttttatatgtgacaatctaattgtaatatcaataggggtcagaatggtttgtgtatatgtctcaaacaagtgaaaaagaaaatcaaaggaacatatctttaggttttagttttcagctaatccacaagttcaaaacagcgaaaacccttcacttgtttgagttcaatttgcttgaaacaactgaattgattcaattcaccatttccatcaattgggtattgagtaagtgaatagtaaaagatatcaagtatagcaggaattcagcttcccatatgtggagggtgggcttataatctgattttctttaacttctgcagattagaactcattaagctttccggatatatcaacatatttcaagtgtcagaatggtttatctatctattttccaatttgctttgtaataataacatgtgttttgtaatatctgtgtttggttgcagtgtaggagaaaggt

SEQ ID NO: 99779 - DNA, 711 bp, Vitis vinifera
  Intron number 4 from transcript GSVIVT01034965001 (locus G SVIVG01034965001) derived from phytozome v7.0 (chr-ID chr5 ; pos 500269 to 500979 reverse strand)
gcaggtattgtatgttaaaatattatgattttttctcgagtgatattttctttattctgaaccctttgtttggttgatagcaaactggggaaagtatcacaagtaaaactttgattcttatgtttagtctatgttttgttccaaaaagtaccaaaggaaagaaaaataacgctaagcaaaatgattttctcatttttattctgtcataaaaatatgaaaggaaataaaatataattaaaattagttttaaaattatttaatatttatatagaaaagttaaaataaatgtcacgagtatgaagtagcaaatataaatgatttattaattttaaacctaatttttattgttatttactttttcttcctttctatttttcctttgatgggaaccaaacattgtgttgatgttttagtttattggaaaactaaaaactttcctcacctaagatggataaatttgttgggctatttggtggggcagtttttattttagggttccaaataatttaagaaaaaaacaacattagactgaaaagttaaattccttttacttctaccaccttttttaagcatccaaatggagcataaggcatttgtatctcaaatttccagaacatcgtcctattttttttttttttgtttgaatgcaaattgagaattatataaatttcattagggagtgggaagacaacgtttcttcaccggttggtt

SEQ ID NO: 99780 - DNA, 680 bp, Vitis vinifera
  Intron number 1 from transcript GSVIVT01030833001 (locus G SVIVG01030833001) derived from phytozome v7.0 (chr-ID chr1 4; pos 17264191 to 17264870)
tggccgcaactgccttggacactgctgcttacctggtacctttttcattgcctccttttttttttccttttttttttttctgtttgtttccattgaagtttggaaaaaattactccagtagtaaatatggtattcatgtaacagaagttctcttcggaggggaaaattaactttagggatttctgtacaatcatgaaaaaggacttagataattcttgaatcctgtatggctcaaaaacagaactgaaaccttcataaagtaattatattgctgagagaacccaaaaaaaaaaaaactgtagataggggaagaagagtaattggagattttgatttttattcatgtgataagcataataaaatcttccataacaagtatatgttagaatctggggtcatactatcagctagctattataaatagtcattatgagaaagaggacaaaagttttatttcttatggtcatgcacacataaagtgacggaacagagtttttttcctttctttttctgaaaatattgattggaaatgcttttctctggaaatttcaaaaactgttggaacagatgacgcatgtctgtttttcttctgttaactgtgttcctgaccatgtgttggtacattgaattgattgttggtttcagtatcaaaacttcctttgtatacattcaagaaaaat

SEQ ID NO: 99781 - DNA, 376 bp, Vitis vinifera
  Intron number 2 from transcript GSVIVT01032997001 (locus G SVIVG01032997001) derived from phytozome v7.0 (chr-ID chr1 4; pos 24957976 to 24958351 reverse strand)
cttgttgctattctttctcggagctttgtttcaaggtacgctccaatgtctattgctatctcgttctttcattttatttcaatgcctggattttttggaggcttcttcttttttttttttcggcatttctgtgtttggttgccgagaaaatggcggaaagaaatgaataaaccaaatgttagagtcatgatttatgtcgttttttatttgatagagaatcaaaagttctcaaaaagtccttgcagttgtaactcagttgtttgaagatttttgtttaattttcgaatttctcctttagtgttcattgtgcaaatctattaatcaagtcgcggaatgtgcaggtcgtctattagatcgaacttgaagacaggtctcc

SEQ ID NO: 99782 - DNA, 432 bp, Vitis vinifera
  Intron number 1 from transcript GSVIVT01034943001 (locus G SVIVG01034943001) derived from phytozome v7.0 (chr-ID chr5 ; pos 330544 to 330975)
cgaaggccgctggaactctctcgctcgctgtgcaggtagcttcttcttcttattcttccttaaaccaattcaattcagtagaaaccaaaggaacccaattgctcaatttctccactttccttttttcttttttcttttctttcattcatctcagatgcaaaaaaacctttgatttattgcttaaaagaatgagatacacccacatcattattctttagcaagccgtacccataaggagattaaaaaaaccaagcatattgcggagctaatcatagcatatttatatgtaaagtataagcaaaagcacagtataagggaattgttgtttgtttctatgcatttttctttttctgttcctggaaaaaactttaccaaaacaacttcatcattgaaacaggcctgaaaagaactggaaaaagctgcagattgagg

SEQ ID NO: 99783 - DNA, 666 bp, Vitis vinifera
  Intron number 1 from transcript GSVIVT01036958001 (locus G SVIVG01036958001) derived from phytozome v7.0 (chr-ID chr3 ; pos 9539184 to 9539849)
tttcggcttggcatcaactttttcgacacctctccgtgagtaaatttttagtctcaagctctgtttggtttccgggaaatttaggaatgggaatgaggaagggaaaggagaaggagaaatatgatgtttttctgaaggttggagttcttagtgtagggtgactgggaaaatgtgtttggttgctgatgaattgtagggaagggagagaattagaatgtttttattttagtttttttccgttgtttgggactggagaatgcctaagtctccactcacccgaacttaatgcaaattgcttggatcagtggaggtgagcttttgactttcgagaccaagaaaatcagaattttaggacctgttcggtagcgccacgagaaatattgtccctttccaaaaatagaaaaaatcaaaatcaaaatcaaaccaaaccaaaacatttttggtatgaaaataaattctcctaaccttagtttcttgggatcaatacgaggataccgtatttgagtattctgagcgatcacctgtttttcttcttaattttgtgtttgtttgctaattttattgcttatgggttaaatcgggggaaaaagatggttctctgatttgttctgatgatttcaacttcttaaggttttgatcgtgttcttacacttgtcattaggtatt

SEQ ID NO: 99784 - DNA, 904 bp, Vitis vinifera
  Intron number 1 from transcript GSVIVT01038340001 (locus G SVIVG01038340001) derived from phytozome v7.0 (chr-ID chr7 ; pos 13258993 to 13259896 reverse strand)
tacttttgttgaagagaaaaaaatagttatgatgtaagaagtacgagctcctcataccatcaccccgattgagaccttgtggttttccatgaagtttcccacatttttctttggtgtgacatgctttcttgttgtacgagcaccatagtttcttctttattaagtttttcattgactcctgtcttccttgctccatgctaacattctgatttgtaccatttggtttggctcctccacttggtttctttacaatcatggttgatccatccactggtggtggatcaagcatcaccctttttcaactttcttcagtatggatgatagaaaacacttcatttgaatgtttgattatagtccgcctcttgccatagactcttcatcacattgtaatactcaataatcgatcaactaccctatttcgtaatggagattttaatattcaattcacaaattcaggtagtatcttgtattttttagtacctttgccaaatggtttcccaaattgcatcttctgttgatttcaagtaacattgaattccataactatgacataatcataaaatcttctttgtcccaaacaatgaataatggatcttcatgttttaagcctgttccaatgagatgactcatttttcccttgccctttaaaaccatcctcactagttgtgaccactctagataattccttcttgttaagcagtatacaatctgaatattatgtaattctctaattatatagtattgggatgcttctacaggtgtgtttttattttgtttttttaattttttttccttctcactattttatttaaaatttttgattttgggtgatctcttattttctaggatcattatttatttctctatagagtcagaagttttcgactcaaggtcttttaggaaa

SEQ ID NO: 99785 - DNA, 692 bp, Vitis vinifera
  Intron number 6 from transcript GSVIVT01037165001 (locus G SVIVG01037165001) derived from phytozome v7.0 (chr-ID chr1 8; pos 28415855 to 28416546 reverse strand)
ttgcaatttgctcttacaggaggagcaagttacaggtatgtttcctcttgattctttcatcctctgttcccatatatttgtgttcctaggtcatgtttcaggatgaatctatgtcgatatggtactctggcaaaaaagtgaaacaacttaaactaagcaatgtttcaagaattattcttggacagtgtactgtaagtttctataaatcggaacaagagataacttttagaccattcttgaattcaaacttacatcttgttcttatgttttccattctgttgttgtagttcatccaaatctctctctccattcatatctactcttgagttaaggcctcaacctttcaatatatgccaccgattttgaggatggtttcttcttgaaagttgctgctagagtaaattttgttgctccataactactcttcaatgtttattagcattacttatagttagttccacaataatatgactaatatatatgtttgtgtttgtgagagttttttcatatatacaaatggatctagaaggaattttttttctttttgaatttctatcatattctgatttggatttatttatttctttttcttggctggttgcaccttctgatttgcaagaaaagaggatgaaaaagaataactcgagatattcttattaatttaaccatctgattctctttcagggcggaat

SEQ ID NO: 99786 - DNA, 568 bp, Vitis vinifera
  Intron number 1 from transcript GSVIVT01037165001 (locus G SVIVG01037165001) derived from phytozome v7.0 (chr-ID chr1 8; pos 28417350 to 28417917 reverse strand)
ttaggggtatattcatggcagcttatcttggttctgcataagctaaaagatttttttcaatacaattaaatacttccttgacatgcaattctctctcaaacctctgattttcttcttttctgtattgaaaaccatgtgggagattaaggtaatctctggaaatgtggggagacattaatcacactactaaaaaagtgagatatagtcgcgtaattttaggaagggtcgacaacatccgcaactaaaaagtatatatataatctcacagctacgcaagtcgcagttgcagagtggttcccaccagacatatagtttgcaggattaattggatgctgctataaacatcctatagctgtgggataaaattggccgctaccatatatggcccaggacgccaccagaccgctaccataaaacccatatataaattgcaacatttctctcctgcttgccctcgttgccaaacccacttctctcccgttcacctttgattgccaaacccatttcctctttcatcattgtcggtaccgaactcattgtttttttttttttctcttgtaatagctgg

SEQ ID NO: 99787 - DNA, 505 bp, Vitis vinifera
  Intron number 2 from transcript GSVIVT01030616001 (locus G SVIVG01030616001) derived from phytozome v7.0 (chr-ID chr1 2; pos 7191028 to 7191532)
cagtttcagtataccaatgagtccttaattcaattccacactaacatcaaattgaatatttcactctcaatcatgtagatattatcagtttttggtctaataaattcttataattttaaaatgtgtctacatagttaaaatgagcttatacatatatagtttcatgaactttttcccgttatccgatgtaggagtttgtttgactcgataagaagtgtttatctatttgactctacaattctattgataaaaatgttgtgtctgcataagaaatgattatgacattcaacattagatagggaaaaaagttctgaaaattatacatgcgtgaatttctcttaattgtatagacgcattttaaatcgtaagaattcattgacccaaaagggccaaaacagataatatctacatggccaaaaacgacttattacaaaatgactatcatttataagaaagaactaggttaccaataactaatacatggtttccatcttatatcagatca

SEQ ID NO: 99788 - DNA, 457 bp, Vitis vinifera
  Intron number 3 from transcript GSVIVT01031122001 (locus G SVIVG01031122001) derived from phytozome v7.0 (chr-ID chr1 4; pos 1966294 to 1966750)
tggtttgttgtatttgtgtcgcgattcagattccagtgagctccaaatattcttcgaacttttatctttttccttattgttttgttaactggaaaatagaggaaaagggcaaaattttctgtgttgttgcgttggtttatggatgccgtgatccggaactaagccaagtgcttgtgttgatcacagatgatgtgaagaaccaaagaccgaatattttgactctgtttggcaagtgtattctaagtcagtttttgagaactgcatgttttgtggaataataattttattttaaatatgttttttcttatagagaacagaaaactattttcgaaaaacatggccttttgactcttctctttgccctcttttctccggacgtttttctttacaaaccaaacagggcttaattcccttgaattcgctaacaaatctagaatgaatttgaatgctagaaaca

SEQ ID NO: 99789 - DNA, 989 bp, Vitis vinifera
  Intron number 9 from transcript GSVIVT01036355001 (locus G SVIVG01036355001) derived from phytozome v7.0 (chr-ID chr1 8_random; pos 4148977 to 4149965)
tcaactgcacattgagcaacacatcaatatttgtggtatgatttaagagcttgtttttatataatgcagaaatctcgttatcaatctagatgttgaataactgcagctaagctctgctaggccttttttagaggaaaaaaatactattaaaaaaattaattataaaatattttaaatatataattaaaaattaaataatatttataatattatttattcaattttatataaatgcattaatggtttaaatttattaaacaaaatatacacaatatttaaatgtgaaaatatattcaaaatggtaaaaaaaaaaaaaaaaaaatcatattttaatacgaaaacaaattttttttaaaaatgtgatttatatatatatatatatatatgtattattttttaaattgcctacttacttattttcttgtaaatattgatataaacatggatgcaacacaatagagtagttatgtcattatgaccttgtggtttgtggttcaaaccctcttgtgtaggaacaaagttggtttttcttttaaatccctttaccttgtcccacatccaaagtaaaaggaaaagtaaagtgctttataaacctcttctcaaccatccaaagccaagtggtcaagctaagtgattgttgggccttatggcacaacctttgaataagggcccattttgcaagctgggggtggacatttaatgttgggccatggagggaatatagcctattttgtcaaaaaaaaaaaaaaagggaggcaattaatgctgggcgggagtggtacacttagtattttattacggaaaaatgatttggtaaaaaataattgttcacaaacttataacaacaaacttgccacaaatatttatttgtgaaaaaaaaatattctaccacaaaatattttcttttaacaaaaaattaatttatggcaaaatctcttatttgttgtagtgaatgtaatgccttagttatgggtttgattgatatctag

SEQ ID NO: 99790 - DNA, 436 bp, Vitis vinifera
  Intron number 2 from transcript GSVIVT01032392001 (locus G SVIVG01032392001) derived from phytozome v7.0 (chr-ID chr1 4; pos 26915134 to 26915569)
gctttggtattactcaatcacatccctataattcttatacgtttttttaaaaaaaaaaaacatttatgaaagacttacagctggttagatatgttaaacagatgaggcatacctgctgaggcaattgatacaactaagataatcatagtatctgttatgatctaacacaaacaattgatcgaactgctctatgatgcaaattcaaatccctgttcaagaccagaccaagaagggaattgatcatcagtccaaactatcataattaactttgtacagccatggaagaagcaaatagatcaaaaacttattttcaagttttcaccaagtttataacaactgaatctgatacaggattctgcatgcagcatgccatacccagagcttgattacaagctaactacccacattattcttcatttttattttgcaggaatat

SEQ ID NO: 99791 - DNA, 947 bp, Vitis vinifera
  Intron number 1 from transcript GSVIVT01032725001 (locus G SVIVG01032725001) derived from phytozome v7.0 (chr-ID chr1 3; pos 1247747 to 1248693 reverse strand)
taaggctgccaactgcttcaaactcgccaaatcctgtattttccagtttctttaaatcccacaaattttcccttcttttttttttttcatagcgggaatttaaatgagagaaaggattagaaatgcttaagaaaagtttccatttttggatttttgtttctcgaccattttcgttggatttggcaaggttatcatttggattttgattggattttctttttggatttttatagtgtttttggatcattttttatttgaagatttgaatttggttgttttggatcgtgatggttttttgattcggtgctttaactgcaaggtaaagcaagcagcttttggattaaggttgtgttagaattgatcggagaaagagaatgcacagttttaattatgtgttttttgcgaatctgtctattttcgaagacactgttaatgtgtttggtcaagctggtttggttgctgagaaaatatgttgaaagaaatggaattgtcattttggaacttaattttcattatttagaacctgagattcaaaactatttggcttattgggttggcatttcttaagaaatgaaaatctttacgggtggaatggattaggaacaaggtggattgatgaatgaatgtgagaccaagtccctgttgatgagcactgcactttttgatgatttctggctcccaaactcatgaaatgctgcatcattgatttttctgatatttctttgttgcttatcttttgctgataatgataatgatgatccaatggtatttattttattctaagttagaaaataatctgaaatcaatttggtaattcaagggggcaagtgtttcaaaataattagcttattgtttagttttatatttcaacaacattgcatatacataatatgtcttactagtccctatgatatatggtgtttcaggggacagagctggatcgactt

SEQ ID NO: 99792 - DNA, 507 bp, Vitis vinifera
  Intron number 1 from transcript GSVIVT01031526001 (locus G SVIVG01031526001) derived from phytozome v7.0 (chr-ID chr6 ; pos 17590104 to 17590610)
tctccacagcgtcaattatccgctctcccaaacaggtatgtacccaactgactgtttctgggtttcggattttctgttgggttgctctggaaacggctgggaaataagataaaatcatttcttgagtcatttgttctccgttgttgaagatgtatatttctccaatagttttgtgagttgtgttatccgttttggaaggtttgggcatttttgctttgtaatttctctgtattgtcaaaaacttatcaaaaaaaaattctgtattgccaaaagggttctatagctcaaccgaattctagatgctcgggaaaattaggggattctctggaagaaatacgggtagcatacacaaaatttgtgcagggtctttgaattgttgttattcccaaaatattcgtttcttcattgggtttaatctcaaaattatcagatgattgatagtattctcattattgctattatattgacgcaggagagcttcagaaggagggtgaaccaacaacaagg

SEQ ID NO: 99793 - DNA, 526 bp, Vitis vinifera
  Intron number 3 from transcript GSVIVT01034504001 (locus G SVIVG01034504001) derived from phytozome v7.0 (chr-ID chr1 8; pos 20209807 to 20210332 reverse strand)
tttggaatcttgggttaatcatcagattgaataaggtgggattttcccttctgatttatttatttttctacttctccccttttgagaggtattgaaaagtttttaggggggtttgacttccatatggagaaaggggttttcagatggttgatttttgaggtggggggtttttgatttcatgagtaaatttctgaatcaatgatttaaatttttgttttctggtcctgatttctgtcaggaaatgcttaattagttttaatttaatcagaaagggtaaataggaaaaatgcttgatacccaggttagtttttgggggagatgaattggggttcgatgttcctaatggagtaatttcttgggtgttttcttccttttgaatgcttgaatggaattatatcttcatgtgatttttagagtaatttcttgctgtactttttcctagttgaatttagttggagtgcctaatggatgttttgcatgctatgtctcagatttaattggcatttaatttagtacctgagaaaag

SEQ ID NO: 99794 - DNA, 229 bp, Vitis vinifera
  Intron number 2 from transcript GSVIVT01034504001 (locus G SVIVG01034504001) derived from phytozome v7.0 (chr-ID chr1 8; pos 20210441 to 20210669 reverse strand)
gtcgctatagaattatctctgcaatcttgaatctggtgagactcttcttctatatctctctctctctccctctttctctctctttttttcctgctcttttatagggttgttgtaagagaatcaaagcttttcataataataacatgcttaatctctagtttttctatgtaaacctctagttttttggcctttactcagttttttttttcctgcttgtagaatttttgga

SEQ ID NO: 99795 - DNA, 356 bp, Vitis vinifera
  Intron number 1 from transcript GSVIVT01037837001 (locus G SVIVG01037837001) derived from phytozome v7.0 (chr-ID chr3 ; pos 7323285 to 7323640 reverse strand)
actctgacctttaccattccaaggttcttgccttctctaatttatccttcttcttatcaccgggaaagcagatatcataatcctttgggtaattaatgtttttatcatcaaatttgtatacttcctctgtactctgggttgtgcctccactaatgtttggactgaagattttcaatgagttgtgctgaatgatagaaacgaccaaaacaacttctgcaatggcctcatgttgattcaattctctgttgaatcaaatttgggaaacccacctgggggttggatgtcttactaattctcagtttggtttcttcaatgtcccagcttgttaggttctacacgagaattgggttcaaggc

SEQ ID NO: 99796 - DNA, 933 bp, Vitis vinifera
  Intron number 1 from transcript GSVIVT01036649001 (locus G SVIVG01036649001) derived from phytozome v7.0 (chr-ID chr1 3; pos 19804713 to 19805645 reverse strand)
aacactcaaaagtaacaaaatcatcataatctcaggtgggttgggttgaaactttgcttttgatgagtaaataatcattttgtgaggaaattttacagtgagtccgagattctgagtaggcgatttgggtgttctaaacactgaaattcgagtttttttagtggttttatcttattttggcttctgggtactgttgggttgttgtcaaaataggtgagtctgatccttgtgagcttctgtagtttaggttttctatggcactgtcttactcatgttgatttgggcttttggtgtaaagcttctggtcttttgacccaaatttgtgaacttgatcttcaagggcttctgtggttagttttttctgtgtctatgttgatttggccttctggaaattgttaggttgatgttaaaatttgtgcttttatgggctaaacggtgattatcttcaggagcttctgcaattagggttcttccgtggttttactttggcttttgcttctaggatattgtcgggttggtgttagtttccagagtttgatcttctatagcttctattgttacttattcttgggcttttatttttatttttatttatttattttttcttttcagtgttcttcatcgatttaggcttctgggtatggttagtggtggtcgtgtagatgatgaggtgtttgtctagttcagtcgctgtcggaattcttttttttttttttttttctcatgaagagaatccgttgaagtaaatgctgcttccagtgaattaggtcttcaattttaaattagggatttttagagttgagtattttatcatttgccatttttccctttatttatttatttatttttgtaatatatctgaggtaaagctcgctgttttgtttttttttttccctaggtttttcttctgggtttagggttttctgaggaacc

SEQ ID NO: 99797 - DNA, 661 bp, Vitis vinifera
  Intron number 2 from transcript GSVIVT01033776001 (locus G SVIVG01033776001) derived from phytozome v7.0 (chr-ID chr8 ; pos 17961015 to 17961675 reverse strand)
gcactcgtctccattatcgctgcagtcattttttttttttgaacatttattttaaaatttcatggtgtctatgtttctgattgtttcttctcaattaagatcattgttgttgtcgtttaattctgtataaaccgtctgtttgatctaggaggaaatttaggaaggaatagatcttgacatttcgaatttaatggtttttattgacattgtttcaagcaagctgactggttgtattaggaaaattgactggacggtttttaattttctttggtgcttaatattaaaagtttgagatgtaaaatcttcaggatgtgttttgctgctcttgattggatttgtttttttggagttccaattattccaaattccttagatttacttaatagtggctaatggttttgggggtaatggaattcaaattcaataccaaagtaatcaagtcaatagcagagttggactaaaccttcaactttcaactgcatgcacccaggtgccgcctcatttaatttatcatgctacatctttcttcgagagcaatttcaaggatgatgtatgacattgtgcttctttgaattttaaaatgcttcactggttctcaaatttcacaattcttttctatttctcaggcttattatctcttcttttgctggttgggctcctt

SEQ ID NO: 99798 - DNA, 676 bp, Vitis vinifera
  Intron number 2 from transcript GSVIVT01035538001 (locus G SVIVG01035538001) derived from phytozome v7.0 (chr-ID chr4 ; pos 2131948 to 2132623 reverse strand)
tattcgattggaaggagattcagctaccatccaaggtatttcattcaagtgtttgtcttctaggagataaaagaatctatcatggaaagaattgatatgaagaaaagtggatgaggtttcttttagaagaaaccactagagaagggaaaagaggagtgtaagaattcaacccaagtaatgaaacccaataaacggggatataaatgccctctaaaatcctcaagtgtttgtttctcaacaagtaggcttccatgttggtggatcttcaaaccactgagaactatctcagtcattagatgaatgatcatctaagagcttggaatgtcggaaagaaaccattcaaataaaaattaaagagtgatattcaaccttttccgttcgacctattcctgtcccatttagtagtttctcttattccttcaaggaggattagcattttgccttgattgtaaccgaaaccttttggcagagtatttgatttgatctcaataataaattttttctactactggaaagttggtgtttctttttacacttttagaagtttctgttactgtttgtccaaatttctgccatgtttttatatttgatcttaatgcttcttgtattctaaagttcaagctcttttatgttaatacaaggggataattttgtttttttgggtgtatttcagttt

SEQ ID NO: 99799 - DNA, 511 bp, Vitis vinifera
  Intron number 1 from transcript GSVIVT01035538001 (locus G SVIVG01035538001) derived from phytozome v7.0 (chr-ID chr4 ; pos 2132691 to 2133201 reverse strand)
ttcgcaaggtaactcattttttttctctggttttcatcatttcatgtttgagatcatgtgtcacttggaatactcacttcttacaccagaacccaatttgaattctttatcatgcacttcatttcacttcaccaccattgcaattagcatcatctgcttcggctgctatagtgtttcactctgatgggatttgtgaataaacgatcagattcatggagcagcattgatatgaataatgggattttcttctttcttttttttagttttgtttctgtatcttggtttagtgagtatttattttgtttttgtttttttttgtttttttttttttttggtgttttgtattgcttgtttgcctttcgatatagtttgtgcatctgggttttgcccatttgtagctattatgcaaatcactctttcacaaactgagaaatggaagtgatggtcggatgtgcttaattgcactgtggttgtggaatttggcaggtgtccggaccagttgtcgttgctg

SEQ ID NO: 99800 - DNA, 971 bp, Vitis vinifera
  Intron number 1 from transcript GSVIVT01031352001 (locus G SVIVG01031352001) derived from phytozome v7.0 (chr-ID chr1 4; pos 125558 to 126528)
aaattgacgcattgatacaattcatccttgaacaggtaagacaatatatagctatgtttttgttgttatttttattatacttatcgatacttttgagaagtcagttataaatgcatcctccagaaactgccaaaagcttgcatactgataggttgcccttggaatattctagcttcggtggtgatatcttttttttttttttttgataagtagcttcggtggtgatatcttgttatcatttcctgatctttgatactagttggaattctgtaaatatcgaatccggattaaattacagaagcactaacatgaaaaaggaaaaaacaaaaaacatgacagaataagtggttcacctgacaactgctacattcatgggtaagatgaaaagtttcactagtaagagatcacaataacatggatttatccataatccaccaagacaggatccaagcaaaacccagttcaccacaaatttccttctcctaactttaactgaagctgcattaagagctgtgtacttagctcttattataattgtctacttgacacccctccttcgaccttgggtacaagccaagatctccctctggatagtgagttgactgcttctatttcaacaaaaatgcctgacgaaatcctcacaaaataggatttctccaagtatgaatttcagacatttttgtaacacaccatatttggttttcatcttttagctgtccaaagagcatatttgtgttattgtttttataattgatgaattccttaagatataagacggggaaattttcagattacatctgtacatctgcacagtgcctcttatttacttcttccaaattgtgtgagcatgcatccttaaatccatgctattttatgttgtgaaagtctttgttattttggccatcctaatgaaggttaatgagcattcttctatcctttggtttcagggggcatcgaaaaatctcaatctc

SEQ ID NO: 99801 - DNA, 1027 bp, Vitis vinifera
  Intron number 1 from transcript GSVIVT01037874001 (locus G SVIVG01037874001) derived from phytozome v7.0 (chr-ID chr3 ; pos 6853520 to 6854546 reverse strand)
atttcaggcacatctcccatcgcgtgtaccgtccggtaagtttggggtttatttttggattgtgtttgtattgttgcgttttcctttttcttttgaaattcctaggtcttcttttatttctcttcatgaattaggcttagataataaaatttttactccatgttcggatttctggaggaataaagcaagataaaatcctgaatcttgtgattaacgtttcccaaaaattaagcattgaccccttttcagtttggccttttctttgctatctcaataatcagctgccaaccctaatttttgtttattttgattatatacatcaaagtgcttggaaatcattcatttgtgtttggtatagcaataacttcatcagtgtttgatatgaagtgtgtcaaccagacgatcgatccagtaggcttatttagattttatgtccgccactttggcttatatgcttaacttaaagggcaccataataattgcattaaattaattcttatgaagacgaatacagtggttgttgctagtttcacccaattgttctggtgggtccagttttgattgggataggcgcgtcgaattgaatgggtgtgaactttgttgggaaccacaaagatgagagcagaaatgtaaagaaatggctgtagacagaaaaagggaaagaaaaggaaagaaacaaatggaaaatggagcaagtgggcggagaaaaagtgaaaaactgcgaaacagatatgcaagatatgatagacatctggaaagttgacatatgcttactaccctttttcttttttcttggttcatcttatgaaactctaatgacaaaacccaatcttttactttattatttgttttcttaacttgatgtaaatactatttttcctgtgaaattattgttatttaaacccttagtaaatggattagtttttgatgagtcaattcatgctactattatacttttatgctcatctttctgatggatttggcatgctcaggatcgtgaaccggttcggctggaccaagctacccg

SEQ ID NO: 99802 - DNA, 707 bp, Vitis vinifera
  Intron number 1 from transcript GSVIVT01031247001 (locus G SVIVG01031247001) derived from phytozome v7.0 (chr-ID chr1 4; pos 842823 to 843529)
actgtcaaggtctgtttggatatgggttcctccgttttgggtcatcttttcttgcatgagttacatgggtttctccgtttttctcttttctgaattgggttggattagttttttcctgggtttgttgagtatcaatgattttgagttacatgggtttctctgtttttctgtttttggaaatgggtcggatcagacttttttgtgggtttgttcaatatctatggttttcggtttgtcggttttgtatttgaggggttttgaattttagggtttgggttttgtttggtgggaaatacttttcttaccatgctaattaatgaagtgatttgattatttggctctgaaaggaaagggattacgattgcccatttttatggttttctagtaaaattgtcgattggtttgcctccatttggattggatgacggatagtgggagaaaaaaaaatgaaacaaaggagagagaaagtggaagcaaataaaaagttcggcctttttccacagggaatgaaaatttgtaaacgtttcaagtttttaaatattttcccttatattccattttctttccttttttggttgcaaatcaaacaagtgaatttcagatttcttcttccttttatttagtgtggctttttttctttttcctggtttttttcccctcttttagggtcttttaggttataatcttcttgattttgtaggctttgc

SEQ ID NO: 99803 - DNA, 747 bp, Vitis vinifera
  Intron number 1 from transcript GSVIVT01034334001 (locus G SVIVG01034334001) derived from phytozome v7.0 (chr-ID chr1 0; pos 17912670 to 17913416)
gggtatgttttttctctcccatctttctctcctcttttctttgaacacagtgggttgaaaattcatgtctctgttgatgctgggaagttcccagagaaacagaagaagacaaataaaattgaaagaaaagaaaattccttctcattggtttatagaccaatgagaaggaatttttgaacacccaaataagttagagagagaaaaaaaaattatatttttggtaaaagaaaagaactttttttatgggagagaaccgaacgtggtgattatcagtaaaaaaaattattttatctcgtcatccttttaagttttaaccaccaatcaccaatggagactcaaattttgattgttcaatcttcacagaaagaacttgggtcaataacgggcccaatccacccaattgctgagttatggacgtcacattttgggctgggcccagaaaaaatcatgggctagaatgtccaaagttgagtccaacacccaaatccaaataagaaattggtttatgaataactgttttcaactttttatgagaagatacaacaaaatttgaagaaacatcatttttataaatagagaaatcataaatacgtagataaattatatacatcaagcatatcaaataaaatctcatacatatataagagtgatttttataatttacttgaagcattcacataaagatttgaaattccccatattccttttgtgcaataatttgtttatatttaagtatatgatgatcag

SEQ ID NO: 99804 - DNA, 943 bp, Vitis vinifera
  Intron number 2 from transcript GSVIVT01035364001 (locus G SVIVG01035364001) derived from phytozome v7.0 (chr-ID chr4 ; pos 785898 to 786840 reverse strand)
gaaaaactgtaagaacatgtgaaactccattgctgcgtctattgcttctatgttttcgagcagttgatgttttcactctatttttttagtacctgaggtttggatgaatacgagaatgagtcaaaaattaagaaaaaagaaggggggggggggggtggtttgatttccataattattgaagcctagctggaacctcatagaacacgtcaattaactgctgtaccgagtctaattactaatcctgtggatgcatttggaaaaattgacaccacgtgagctcaaggagtgaaaattaagaggcaccaaggtctactccccggaagataatcaggggtgattattctgataccatttgtctaactataatggtattgagggaccactttcctccaaaatcaagctggccatgaaacaccctggtaaatacccttcataacttacagccaccaggtttggaaatgttgctaacttcctcagaaatttccttagtttggttctgtagccttttgtcaatgagggtgtgatggctattcattgaatgggctttgaccatcacagagagagatcaatttttaagctcccaggaatttggaaaagcagacattctttgaaccaagtgatacttgaacatgtaccattctgtaacaaaccctcttttccatcttcgtggccatagctatagacatccaataagatggatggatagtattttttttactgtttgtcttatgaagaagctgagtggtatattttatctttgggtaatgatgggaaatgaatgaattttgatgagctctgttggccaccaattgaaaactggaatctctgttgagatttggtcctaggttgcaccttgaatttgaaattgtaattttaatatttacgagttataaatgcaattgatgtaggcacccatttgattcttctaagtggggtcgcatat

SEQ ID NO: 99805 - DNA, 584 bp, Vitis vinifera
  Intron number 1 from transcript GSVIVT01031852001 (locus G SVIVG01031852001) derived from phytozome v7.0 (chr-ID chr3 ; pos 4879842 to 4880425)
tcattgtctcatccgttctacaggccaagagactggtagcaccaactatttgctcttcttgccctctctctctctatatatatatatgaagggatttgggtgatctaggttttgttttggtctaaattgttggaatctggatgaaatgtgggtttcttggattgcatgtatgtcagcattgaaggatgaaatctttttgggttagaaacgtgatattgaaatttcgttttccctgaaaatagggttcaataattttccttcctcttgggtggattggaaagtccttcttgttttaggtctagggtagaaatctcttaatgttcttgacatgcattaagaaaactctttcctatggttatgcatgcagcactctgttgggtggttttgatttgataatgaacgtgaagcttcttgggaattaattatctatattttttatgccatattttcttgtaaattcttagtttgtaattctcatcatagactttcttcccctaatttcatctccactgagatgaacagagcctaacatgttttgggttcttacagaggatcccacagaagtttgtcaagaaatctgggga

SEQ ID NO: 99806 - DNA, 861 bp, Vitis vinifera
  Intron number 1 from transcript GSVIVT01032710001 (locus G SVIVG01032710001) derived from phytozome v7.0 (chr-ID chr1 3; pos 1338185 to 1339045)
aaattcaaagcccaggatttactgtgcccttggaggtattgaattttctgtcatatttggaatttgcaattttttttcttgacgatttgtttgcttgctgagaaaatggaggaaaaggaaaggaactgtaacgttgactgctttatttttgtcgtctgagcgtaattctgctgtttcgctcagttgtggtgaatctttcttgtttagacaaccaaagcagcattaaatttgagatttttattttactttttgttttttagttttccaacatttttctcggtgatcaaacggaatggagctttttcaattaggtttttagagtactctttgatgactttcgtggtgtaatggagttgcttgtgcttcacggaagaccaaagtacggttggataagaattcagctaatgttatgcggaattttcaattatttagcttattgatctcgtaatttcaaccaatagccctgaccatgatttcattttccaagcaacataactgaagatgagtcattggtttgaatcagaaggaaaaaaaaaaaaaaatcttatcaggatttaattttctcaatcatccctttgctctgcctaagctaaaagactttgagggctgcattgaaaaggagtgtaatggtggttgtgtgtgaggtttgaataattattgaatcatttgcgatcaactttgagattttttattctaactaaccagctgcctgatgaaacttcctccttaaggctatgcatttggcttcattttgggaaattgcagaagcttctagttcaatgaattgtccttcgtttgctgcagttttttcttacttttgagtttcccatccagggactgtggcagaaccaataattatta

SEQ ID NO: 99807 - DNA, 1051 bp, Vitis vinifera
  Intron number 1 from transcript GSVIVT01035111001 (locus G SVIVG01035111001) derived from phytozome v7.0 (chr-ID chr5 ; pos 1550086 to 1551136)
actactatatttgcagatttcaggttccttttcctttgtttcctgtatcactctcgtcctccctttcgaagaaattttttttcataaacttcttaacctattttttttttttttgtccttttttactctttattttccttctctcgaatcttcccccaatcaaacattttgaaaaaagattgcaactttgcaagatttatgggcttcgaatatttttggttgaaggatgatcatagttttaatgacaataacaataaaacatttccatttgtgtccagtaaatagaaacagtgggtacttgatgattaggagggacgatggattttgacatgaatgtagaattattgtacggcttaatctgattatacaacagtagtgaattaattctaatggctagtttatgagtctaacttactcatatagtattttagacaaatcatgttaaaagtaagccaaatttgtaatctagaaaaatgtgaagttggtcatgatataactcatatagtattagaattttgttttcaataatatacacatgtgaactgattataaatggggtgaactgattattctggcattattatgttaggatggagtgaaggcgttgtaaagttattatgggaaaaatattatgacaccgatttgatattctacttaataaatactctatcaactacctgactgctgtccaactttttcctatttagtagcgtcattatacatatgggagtactttaaatgctatatagagaatcagagataataattcgtctgcattatcagtaagaatatataccaaacccaattccagttagctttgctttttcttttttttttcttttttcgatgatgccatgacgtgatctgcagcatatgccatgtgacgtaatccaaggtcagcacttcacctggggttttaagtttttgttgaaaatctctttctcatcttctgtaatgaccatgggacaatgatatgaatagggagcgtagctaattggtgaaggtttttattgcaggagcctggggttatagaaactgagtttgctgagat

SEQ ID NO: 99808 - DNA, 874 bp, Vitis vinifera
  Intron number 1 from transcript GSVIVT01036035001 (locus G SVIVG01036035001) derived from phytozome v7.0 (chr-ID chr4 ; pos 7650600 to 7651473)
tgtttctagggcagtggccttcgtgttttatcccagtttgtctagtaaaaattgaaatactagtcattgtagagagtggtgcgctcattccgatggaagagatggtagtcaagagatgcaatcaaattgcgcttgcaattcttaagtatgtagggataaatgtccaagagtttgtcagtttgagcgggtttctcggtcccattaactccatgtttggacagatttggataattatcttttgggtggtttcaatccaacttgattttgattaatacaatttaatcattcaagtctaacttgaacaatccgactgatttcaagcttgttaaaagtgaagttggatggcatgtttctcgattttgttggattaggcacaatcataattcaaccccctccagttgcaacctgtatgatgtgtcactgaacccgtgaataaaaccatgcatattgggaagaagtttgtgagagcaaaaaggcatattatattgacgcccaagctttggattttctaatccacccaatttcttcactcatcgtgtcttttccattcccttatcacacacacacacacctaaacttaacattccaaaaaaaaaaaaaaaaaaacacccttttacccatttcatttataatattttttcttcatcatcccttaaataaataaatatataaaaatctttcctctaagatgtatcttccaaaaaaaagaagaaaaaacctctatttttcctcattcaagctttttattcaacttaagtctcaaaattattccattttcattcttatatatttttttaaaaaaaataatgtatgtgattcatgctcaattttggtataaaaagataaccaaaaaaaaaaaaaaaagattttgagt

SEQ ID NO: 99809 - DNA, 419 bp, Vitis vinifera
  Intron number 1 from transcript GSVIVT01033379001 (locus G SVIVG01033379001) derived from phytozome v7.0 (chr-ID chr8 ; pos 21087061 to 21087479)
ttggatacgaaggtctctctcgctcttctctctttgtttatctatctgcatggcatatttctggttcttgggactgggtttcctgaacccatttaaaccctcttcccttgcattgcctccaaaattattttaaaaaccctaaataaatttttgaagaaaaagaaacaaaaggtaggggaaggctgaagcctggttttgaattttctttctttcttatttttgttaatgcaatttatttgtttcttgacttcttcccctgtttccatcaatatatatacgtcatgacaaagctgacctttcttggtccgaagcaggggatattaccaaaaatattccagagaattccttttttttttttttttttttaatttggatgtaaacatggcagggtccagagattcgtactggatttttgaagg

SEQ ID NO: 99810 - DNA, 226 bp, Vitis vinifera
  Intron number 1 from transcript GSVIVT01030762001 (locus G SVIVG01030762001) derived from phytozome v7.0 (chr-ID chr1 4; pos 15506795 to 15507020)
ctcgccgggatcggcagacttgcaccgccctacaggtgagatgaatcccaccgggttcttgatgatgtcggttttggtttaaaccaagaaaaataatcgggttcttggaaaatttggtcttcgagcccttttgttttttatgatttgttcctttttggtttttaattttgaatttattctctccacagaagaagcacgagaggtcggagtctttaggtttgctgta

SEQ ID NO: 99811 - DNA, 687 bp, Vitis vinifera
  Intron number 1 from transcript GSVIVT01038681001 (locus G SVIVG01038681001) derived from phytozome v7.0 (chr-ID chr1 6; pos 21043209 to 21043895)
ctgcgccagtacgctggagtctcctctctcctcaggtgagtgaccaatctatcagatttctaatggagtttttgctggccactgggggttttccgtttgtttacctagaaagtgcatggaaggaagaatgttattttcgctgcttttcatttagaatctcagtttcatgtttggtattgtttttgttgctacaaggccttcaccgtttctattgtgactgtaaaattgccaatgctcaggaatagggtttcccttacgaatttctctgtagggatagttagttcccccactggaggacatccttcacatcaaaattttatgatatgagattctggtacaagctttttgctcaagcagagaattctgcttgatttcaaggagtgatgaaagcctctctaatgatgcggaattcttgttccaaagctcaggaaatggtccacaggttgggtgcaggcctcccctgcaccctaaccctaccacctgatgaagcctggattgcaggcctctagcactactacctcaaatttagaattttctatctagggtttgcttaggggggtctgctcctccaacttgtgctgtgttagttcttaataaagattctgtgtcctgtatcttttgaccttttctggattttcggattatttgttagatagcagtcatcactggatcagcaggaccttgtcc

SEQ ID NO: 99812 - DNA, 993 bp, Vitis vinifera
  Intron number 1 from transcript GSVIVT01034351001 (locus G SVIVG01034351001) derived from phytozome v7.0 (chr-ID chr1 0; pos 17692246 to 17693238)
aattcaactccccaaagcagaaacgccgcaaattggtacctgttttgcttatttgcttcgtttactttttgatatttgaggacattaactccaatgatgtgagcttttgtaagaaattctatggggttttgttgctaagatgagaatagcgcatgtcttgacatgggtttttcgcttttcattctgtttgcaattatgagaagtaacattttttgttgtttctatgtttagtttgttgggttgtttttatttgaagattttaactcaattttatgagaatttttatgtttatgggttgttcttgtgagaaattatgagagtcgggaatggtatttgcttcccatatgacatgggttttttcaatttttgttttgtttgcaattgtccgaccaatattaggcttgttaacctctcattttccacatagtttgtgtgcttatttatctattttttcatcctgcctgaatttaatactaattgcatactctatctagagaaccttcttcaatttacttccttgtagtgattttgtatcacttactttcatttcgtttgcctatgatttagaatttataattttaggtctcatttcctttcagttgctgcactcaaccaatttgaacatgctcaaatgttatggtgttatacaaatccatttaagaccttcaccatgcgaaatacaagaagatggggctacatgatcaagttggcaaagaggaaaactgaaaactctactttcaaatatagtagcttttgaatttctaaaatttgccttacttttctcccaatgctgtattgttgatgagataaatccaccatgtgtcttgataatgtggcttggttgaaccttaaaaagcacacccctttcatactgttttaggcattggagtctgtatacacatgtttgttttttatgtataaggaacctactggacttgcttttgacatatgtgtaaatgcctaattggagataacttcttcaggttaataaaa

SEQ ID NO: 99813 - DNA, 728 bp, Vitis vinifera
  Intron number 3 from transcript GSVIVT01035414001 (locus G SVIVG01035414001) derived from phytozome v7.0 (chr-ID chr4 ; pos 1117218 to 1117945 reverse strand)
cccttacaaggtgataatctctcttattctatcattcaccacgagtatgaggtgcaatttgggtgagttgatggtaaactcaacctaaatttaaaaactgatcacatcatattcaacctaacttgactcttaacccaaacctagttcaaccttatttcttgaaggtcaagttgagttcaggcttgtcagtttagacttgggttgattaggttgattcccatacataattcaaaatctatctatatagttatttatttaaaaatttaaataataaatatgataaattttaaaatagtaaaaaaataaaaataaaaataaaaataagtttatatatttttagaaaaattgaaaaataaaatgaaataatataattttttttaaatccaaaaagaaaataaattttattatatagatataattaataataagataatatataatataaatattataaaaacattaaataggatattgattaaacttgaattatttgaaccttgactggaaccaaatccaaattaaggtcaagttgaaaaaacctaatccaaatttaacccaaatattgaaaatgattgcctctacatgtcataaagtctgaccgggttcagattgggtcaggccaacccatccgggttgtacctgtaatcacatgttaccaaacacatatgccttggaaactagcctgattcatcttctatcctgtggctgtcacaggaagtttaggaact

SEQ ID NO: 99814 - DNA, 493 bp, Vitis vinifera
  Intron number 2 from transcript GSVIVT01035414001 (locus G SVIVG01035414001) derived from phytozome v7.0 (chr-ID chr4 ; pos 1118033 to 1118525 reverse strand)
tcattgcatatcgagggtattgtgctcgcaaagcggtatgtaatttgcctttaaaaatatagattgagatcgtcacttcaaaccctagggtatgataatcatttcatatagtcaagttaatcatgagcgatacttaaacaaattataaatcaagattcatggagaggtttgacatataaaatcaccataatgaccactattgtgacatcatctaaatgtttcataaaatgtagtttgctaaagatttgtatcaaatgggatctcctctcatatgatcataatctttcttagaagattattttgatatcattctcccatacgaggcttagattatcttaccatgtataagttgatcatcaaaattagggattcaatattatatacatatataaaagaaaaaaaagaaagaaaccaagctcatttcaggccttacttgatcaataatgaatgctggggttttttttgcagattcaactgaaagagattgttcttg

SEQ ID NO: 99815 - DNA, 811 bp, Vitis vinifera
  Intron number 1 from transcript GSVIVT01032782001 (locus G SVIVG01032782001) derived from phytozome v7.0 (chr-ID chr1 3; pos 808655 to 809465 reverse strand)
agcagttgttccacgagaccatcaacaacccagaggtattatttcttgatatgatctcaatcttcttgttgtgggttattctttttttggtttttgaatgaatttgaaagaaaaaaaaatagatatacttttgggtcttatttcatttcttttatgatgttgatttgatttctgaatcaggaaaaagattcacgtttgatagttgaaattttcatttctttcgtttttttttttttttttaaatagggttttggtgatgagaaaattggtgatttttgtctcctatatttttaggggctttgggttttaaatgcttcttgagacctttttctttctgcttctgtgttgaaaagtattcatatattctcgagttttcttctatctctgatttaatttctttacctttatattaggcttcgttacttttttttaatctctcttgttttatacattttcttcacatttgattgattttcgtcattcccttgtttggttgatgagaaaactgaggaaaatataacaaagaataataatttgaatcttggatcatatgccctttaacagagaataataatttgaatcttacatcatatgtccttttggttttaaagtatgaaaaactctccctacccaacctaattggtcttaggacctgtactacaaaggagatcttagttttctgatattcaaaagttctaggatccttcattttcccacattttcttggcaatcaaacagagtatatgagatccccacatattcatattgatgggtatctcatgaattttcttaggggaggcagttgctggga

SEQ ID NO: 99816 - DNA, 503 bp, Vitis vinifera
  Intron number 1 from transcript GSVIVT01033861001 (locus G SVIVG01033861001) derived from phytozome v7.0 (chr-ID chr8 ; pos 17180622 to 17181124)
tgtcctcggacgtggctacctccttggaatacaaggtatttttagttttaatctttaaaccatgttccaatttttttaattaaataataatttaaaccactgatttttttctttttccatattaaactatttttaacagagtgtattttctttttctcaatttttgtttctaaaattgaaaattattttatttttactgtatctttatattaagttttaataacttgtaaaggatgtagggaaggttatttaaatttattaacatatatctcttccttgctcaactctcaactctcaactctcaacttctctgaaaatttgaaatttaaattaaaaataattattaattcaaaataaaatatttaataactccaattctaatccctgaattaaaaagcacatgcatttgtatttattcatccatgggaagattgtgggattcataatttgatgattgaatgtggaaaggaacaagcagaggcgataagaaagaaaaaggacag

SEQ ID NO: 99817 - DNA, 603 bp, Vitis vinifera
  Intron number 1 from transcript GSVIVT01032946001 (locus G SVIVG01032946001) derived from phytozome v7.0 (chr-ID chr1 4; pos 24509079 to 24509681)
tcctctcagatccaccgtcacagaatcgtatccaggtattctcctacctccttttctcaaattctttttttttttttctattttttttaaatacttcaggaaaaaacctgcttggggagtttttgtttttttttttgttttttttttctccaacttttgattgactgaggattgttgtttataatggatctgtgaatttcggaatgtgctattggttttggctttgcattttcgtttttttttgcttttttcagaaagattttgttttttgttggtgtgtttttccttggaatgatattaatgtcactgatagctatggtatagggggttctgtatcgattatgtctgtgttttcttgtttgccatttttgggaattagatttgatgtaaagggaaaatatggaacttctaggtttgaagtttgatttgtcctccgaagctttgctattgagatagtctatttgaaggggaaagaaaatagcgagaaatatgaagattaattaatctgaaaatgcctaaattaatcattttccttgacagttttttctgaaccaaatatagagatagtgttaacttttacattctgcagatctgtgaatcgaa

SEQ ID NO: 99818 - DNA, 894 bp, Vitis vinifera
  Intron number 1 from transcript GSVIVT01038277001 (locus G SVIVG01038277001) derived from phytozome v7.0 (chr-ID chr5 ; pos 24900849 to 24901742 reverse strand)
ttcctcttgaccatcttcaggtacaaaattattgttccggcatgtgtttactgcgcattttgagcgaaagtttggcgaatgcccattatatcaaaaacctcgtttcggttggtgagaggaaaatagttaccctcaaagaacataattcctttcaaaaaagcactataaccagagacgcatatactaacaatggtttcatgagaaaaatcatcctcagtgaaaagaacataatttcttgaaaaaaatcaccctcaatgaaaagaactgaaccattgcatgccatattaagtttataattactgtgtttttcaattaaacctagagaattacattgatcaatctaatgtaatatggttctgtatagataccgaatacaaagttaataatgtttattgtatgctctatgattgtttcaagaagatctataaattaaaattattattttaaattaattatcaaattctcccactttttctatattggttaatcaggatacctgaccccttggccaagaatgaagcctcttcagttgatttgttaatgttgaggttgttgttttatacctatcccttttttcccttcctcactttatctgaaagtacctcgtccttcaaaaagaaaggaaaaataaataaataaataaataaaagaagttgaagagaaagcaaagcaatgcattgtttcatttcagagatcgtcaccattgttggtctagagtatttacagcagccaagtttggatttcataatattgaaatatccaaactctatacattttaatctcggaaatagtttttaagttgaaattttaagatcatggttcatgtcattgtacttgatacagatgaaaacccatgcaggataaaaaagtagttgtccttgccaatctaaaacc

SEQ ID NO: 99819 - DNA, 1005 bp, Vitis vinifera
  Intron number 2 from transcript GSVIVT01037417001 (locus G SVIVG01037417001) derived from phytozome v7.0 (chr-ID chr6 ; pos 14131753 to 14132757)
gcaccatcctctaaaatcgcccaccgaataccctggtattctcccttctcttccatgtgttttccatatttctatacaaaatgggataatggagttgggctcaatttcctttgggtccaacactttttcaccccaaccacaataaatttctttcttttatcattttgattttgagtcaaatgctttggacctttcttcttcgatgaatgctttggtcttacaaatcataaatagtaaaagaaaataaagcatctaaaatctattatactttaaaaatatttccttgtcatgtaagtatcaatttggtctaggagtcttgtgcatgaaataatttacatttgagtttgctaatcaatgtaaatcatctgatttttattatttaaaaaacatacaaattgtattgtgctaattatatgaagaaaatctagttaagttcatatgatcctctaaataatcgaaatctagttcaatcataatcctgtgaacaccaaataattgttattttaatgactgttaacacatttgcacattttctgggtagaaacttttcctggaaaccactagggaaatgcaaaaacaatccaaggtatcccaaaaggctttcttgtttgattaaggtggaaaacaatttttcttgctcatcctcatttccactgactagggtttcataacctagacccatgatcctttgttcgacttgctcatcttctcctcccactgtcccacaacataacactcccatctcatccaacacaagcattttcagcacaataagcccaaggaacagataccctatcttaaaggaccatttttcccaactcaaaattggagttaagccaaaatcctcattcacaatcccaagctgaaccacttcatatatgcttccaacacagagttcagtgaatgagcagattaggaaacatatagatatatatcacatacactacagggaattttctgcataagaagctaatttgggtgttcccacttgttttaaaatgcaga

SEQ ID NO: 99820 - DNA, 1038 bp, Vitis vinifera
  Intron number 1 from transcript GSVIVT01035346001 (locus G SVIVG01035346001) derived from phytozome v7.0 (chr-ID chr4 ; pos 667150 to 668187 reverse strand)
tcgcctttgctgctctgggcaaaaccgcttcttgggtatttgtctctctctctcctttttttattttttcaaaattgactctggggtttttttttctttttgaacgattcacttcggcgttgttgatttttggaaattaggcttcatgggttgctctcgtttcccctctatttctggtttctggtctgtttggttggtgagaaaatgaagaaagtaataggagtgaaatttcggatctctaccaccaaaagaaagaaagaaaggaacttcttatcctgcctggatgaatctgcttttgggtacttcccatttccatttattttgcccatatgccaatccttggtttttgagaaaactaaggaaaagaaaagaaccccttttttttttttgtatttatgttgtattaatcttggaatatccgtaccatgctcaattctagggtggccgtatcaaccatagcttagagtctgtcttttgttaggttccatatgtctactttggattgaactttgattttcctttgattcgcatgttattaattatgaccagggctcttgaacttgtgttctgtgttgtttgactatttataatgttcttatccacctaaaacttgatgttcttcttgacgaagacagaaaacttttgtactcatacattattcgaatcttgagtttctctctggcctagcctaacgcttgattctaattcaataagattgataaagaaaaattctaatcaatcacatttctgcaattctcaaatatcaattgcccatgggcttcatttcagaagggcataacacacctatggcacaaagtgtgctctgtgaaaatgcattttgaaactgcattaattttaatattttgtgaatttaatgcataaatcacgtttaggaactctggggatcttgcttgaataactaagctatttccttcttcttcgttaagggctgttaattgctattaattcagaggtgtcttgtttcttcttcaatattttgaagcttcagagagagtttagcagtgaagttgattctgc

SEQ ID NO: 99821 - DNA, 810 bp, Vitis vinifera
  Intron number 2 from transcript GSVIVT01038252001 (locus G SVIVG01038252001) derived from phytozome v7.0 (chr-ID chr5 ; pos 24715274 to 24716083 reverse strand)
atctttcagctcaaaaggttgttgtccttgtattatttgagttatgggagggaattatattatatgaaatacttctatgtcgaaataaaataacctcatcttgtttctttctttcaatcggataaccaagaaatatatgacactttaaattcaacttctcacttaccatttaaccgacagtaggattttcatcttccatttgtgcaatcctaatacttgtaatatcagtttctaacttgctcaatatctgaaggtgttgcttgcatccttgtttattgctcatttgtgtgttttaaataaatttattgttgagtcctttgaatttgtaaattcctctccatagttttagtttgcaagaacttcctttctagtgtttttggttgatactgcagtatttccaatcttgttttgatgccacagcctgtagcatggaattattttactgaagcttttaaagaaaaaatggatttatgggagagaactcgttgtggatgccttggtattgatgtttcttaaaggataaaattattaaccagaaatatcagtttacttgcactgtggttgtttttgccttatcttcagcttaaggtttggtgatttctggttatccaaggaagagagcctttagaaagtaacataaatggtgatggaaatagttgggaaattcttggagatattttagaaagaaaacggattagccaatgtattgatgttgctgatttattttatgactgatgatatactctgattgacaattgtatcttcatgcttgtaggcaagtcttcttcaaggggtagctgtacaatactc

SEQ ID NO: 99822 - DNA, 814 bp, Vitis vinifera
  Intron number 1 from transcript GSVIVT01038252001 (locus G SVIVG01038252001) derived from phytozome v7.0 (chr-ID chr5 ; pos 24716087 to 24716900 reverse strand)
tcctccgtaagcttcgccattccaccatccccacggtaattctcatcaattccacattaaatcctataaggccaaattgtcctttcttttcttttcacttattttccccattttcttgccaatcaaatgggttttccttgttttcaaatgggtgtctggtgtttttcagagaaatggttgattttgaaggaaaatcgtccttttttttcctttaaatttgaatttgcttggttacgggactattttcaatcaatgtgttcgggtttcctccttttcttaccaaccatgtgggttttgcgtttttaaaatgggcgtcttttgtttttcagagaattagttgattttggaagaaaaacgtgttttttactttttttatttatttattaatctagcttcaatcaatgttttcaggctttcctttttgttactcaccaaatgggtcttccgtttttaaaatgggtatttagaaatggttgatttttgaagaaaagtcgtttttttcttcaaaatatttttaaatttggttatttatgggaccatttcatatgaaatatggaatcaatcaattttattaaagggaaaaagagttcaaatatttatttatgtggttgtttagtggaaacagaactacatttttttgccatagattatattttgtatgtgatagtgtggaaacactaagaaatgtacttctttttcatatatatagatatgaggatgttatttacccaatttttctttatcattttcttgttttattatattacactgacttgcataatgtacttcattttgcaggaaatttcttacagac

SEQ ID NO: 99823 - DNA, 744 bp, Vitis vinifera
  Intron number 2 from transcript GSVIVT01035006001 (locus G SVIVG01035006001) derived from phytozome v7.0 (chr-ID chr5 ; pos 845109 to 845852)
ctcgccagccccatctgaagctgagttttcaggtactttttgtagatgattatgtggatggaatggttctagttctataaagcttgtaaaaaaaaatataatggtcatgcaaccaatctaatttctaacatatacacttttgagctctcaactatggtaaggaaactcttttaaatactcttaattaactcgcttgccttggcttcttggaagagtgggcctgctgcagcttctagtgaagtgcttatttgattttatttgaattttttatatattttattatctatttatttatttatttttattttttgagaaaagctatgcagagaagaggttaccatccaaaaaggaaaaacatttttaagctccaaaaccttgtctccctatctcctgtgctaaagcatcttaactctaccttcacttttttttttttttgcctagaagtggtcaaacacactggaaagcactttggcagcaggaaggattctgggctgccaaaaatatgtgctatacagggctggtctcaatgcattttttttaaacttaattttttccctatataataaatgagtccttccgtccatttgcatgggaaagatggtacaatactaatgttttttatataataacctttattgtgctgtgattgtcatcacataataaattcttcaagtatgctgaagcttctgtataaatatgaatgatgcaggataacattgatagcagccaatccagtgctctaga

SEQ ID NO: 99824 - DNA, 769 bp, Vitis vinifera
  Intron number 3 from transcript GSVIVT01035986001 (locus G SVIVG01035986001) derived from phytozome v7.0 (chr-ID chr4 ; pos 6854973 to 6855741 reverse strand)
ggtatgttgccgtttcctgtttaagatctatcccaagatcggagtttgtcattgccaataataatgtcttattgaccgttggttaaatgagctatcctttgggcatcttcatctttttgaatggcttaataaaaaacagattcataaggagtaaatttacattaggaagtgtaaagtcaaaagttatataagagtcatcatgcttatggtgtatgattttgtaaagaagataaccaaactcaatttagtcctttatttccatagcttttgacaaaaattgtcctatgtgtttttcaaaattgtaaagcccccaattttcactattttagccaatccttcagcagttggttagctactttccacaaaaactatgcagcatgttttgcttttctgagcagttctaggcctatttttccctttttctggtcttattcttttgtaccttttggtaggatttctatgtcatttgttttttactgattcgttgcaatgaaattgttgtttctaatcaacaaaaccaagtaattggcctgtaacattatatcatatgcttagccatttatgtcccctaagtggttctggttcataggccatggtgtattgttttttaagtgtgctcttgttagtaagcaaatgaaattgagatgtttgaaatttgacagccctcaggatggatttcccagagaacaactctatttatgtggtggaggatataatggttaaatgattacttctacttatatatctattttttctcaatttgtaggtg

SEQ ID NO: 99825 - DNA, 570 bp, Vitis vinifera
  Intron number 2 from transcript GSVIVT01035426001 (locus G SVIVG01035426001) derived from phytozome v7.0 (chr-ID chr4 ; pos 1210249 to 1210818 reverse strand)
gtgaagaacagcccaaatccaaggtacagtagcaataaaaatcaacagtaaagaaaagaaaaagtctttatcatcttgacatggcaccttacttctatcgtaagtttccaaccaaaaaaaaaggcatcttctttaatagaagaatttcagtaaaatcagcagttaaattaagtatttcccaaccattaatggagatagctaacatcacaaggaaaaaccccacatccacaatcaatagtttaggcagctttagtagtgatttctcatacgatacctaggcaataaggaaaagaaaagaaacaatgtgaaaatagtgtcattcaagataatgaaagcctgaccttcaacacaacccacatctcctttcctataaaagcatatcgagaattacagtctaaagaacagtatgcaagtattggggatttcatgatatcaacaagcacattagatttgatcattagtcacacacaatattatcagttagaaactgctcaaagattaaatgcatgaaattcttcaaataatgaactttttatttgatgtgcaggaactattacaggtgttcagttg

SEQ ID NO: 99826 - DNA, 308 bp, Vitis vinifera
  Intron number 2 from transcript GSVIVT01031010001 (locus G SVIVG01031010001) derived from phytozome v7.0 (chr-ID chr1 4; pos 20802390 to 20802697 reverse strand)
gctaagcatcatctggtatgcgttgtgttcctagatttggatggttgattttctgctacgtgtgattgctgtggaaatgtagagaaaggaaagaacataatttgtcacttcttaggtttttcatcattaatgagtcaagcaaacgcactaaagtaagcctgattcaactatgtagcttactttggatgtggttttcatctttcagagactaaaataagaagatgaggaaagttcattttttattagtggtttatgcttcttttaatttatttttgggtttttgatcttgtgcaaatgatagattgctg

SEQ ID NO: 99827 - DNA, 927 bp, Vitis vinifera
  Intron number 2 from transcript GSVIVT01035292001 (locus G SVIVG01035292001) derived from phytozome v7.0 (chr-ID chr4 ; pos 123134 to 124060 reverse strand)
ctgccacgtaatcaatcatattcgttatccagtctcatccgctctattaattaattaatgtttttgtttatttaattctgggttttatggttttttaaaatcattcgaaataagaaatgccttactgtggaattcggagttgttttctgtccaacattttttttattgtagttgcagttctgcactagctgttaaagctctattgtttgtttaattaaatctggttccttgtgtatgtgctgtttggccacggagaaaatggagggaaacgaaataagaacgaaagagaagaaaacttgtagccttgtactttaaggggaacgaaccaaacgatagaaaatggaataatttatttttctttattttcatttttttccttataatcagttttcgcagcaaccaaacaggccttggtattatagtttccatttgaatgaaaatgtaaattattgattggtaatttaagttgctgcaaattgatatgacactcatcttttacttgattctaaaacttcgtttggttgtcaagaaaactgaagatttatgagtacaattagaataatttaatcttataactcttaggttttcaagaaaaataagaaatatcatgtttaatgtttttgggtttccaaaaaacattaaaagatgatgatggatcaactaacataggccaccaatatgtgtgtgtatgtatatatattaggtaaaagcaattgtattaaaagcacctagcgaagggtgcacaaaaatatgcacgatgtatacaagttacccaaggccaaaaaagaagaaggatatgaaaattataatatatgatatgaaaattataatatatgtatgtcgtgtttgttttattagtagtttttccaataaaactaatattgttttcattattgttgctcatattctgttactggtaaagtgatc

SEQ ID NO: 99828 - DNA, 768 bp, Vitis vinifera
  Intron number 1 from transcript GSVIVT01038221001 (locus G SVIVG01038221001) derived from phytozome v7.0 (chr-ID chr5 ; pos 24456921 to 24457688 reverse strand)
tggagccattcaagcccggttctgtaagctacgacattttagtcatttttgttgcttttatattatactcctatttggttccagaaaaaatgttaggaaattaatttttttttctcccggttttcgatgcaatctgttcaataatttgatggctaggattttcgaggaactgttaggaaaaccgcaattaggatttatcggtagtttcgagccagaggaaaattttggctcggaaccgatattccgtgtatatcagggacgagatatcggagaaaaaacagacgttttatgtcgtatgtttgaataaaatattgaagaaattggagaactttttgaggaggaaattaaaataatgagataacgctactgtgatcaaactagggcatagcggagtagcatcggttgttgaaacggtgccgctttgaccaactctatggtatttcactgtagaggaagatcacgaagtgaggaagctggttgagctggagcctaactctcaatttgtagatcaatccgttaaatccggatttcacggattttcaaaaccataactagaactctagatccagccttacataattgggaagaaaaagatgagatccataaaagtgaaatgggaattttgattatttggctaacccaaggaaatagattagatgtttcaatgcttacagactggaatttttctgatttataatctaagagtcatgagttttgctctgaaatcacacagcctataactggatacggtgtggcaaaagttttgga

SEQ ID NO: 99829 - DNA, 779 bp, Vitis vinifera
  Intron number 4 from transcript GSVIVT01031168001 (locus G SVIVG01031168001) derived from phytozome v7.0 (chr-ID chr1 4; pos 1553796 to 1554574)
gggggaaaggttcgttttttctctctggatctactctcttacttgttgataaatttatggcgtgtttggattttgctttgtaaaacttgtggcgtgttttctagtgatttcgaatttcttatgtgccaccttgttttttagggaatatttttttcccatgagaaaagtacgaatttcgtcggtgaagtggtgatattttccccgttttagttgatcatacattatacttaattaaagaaataacaggtatttcctgggaagattttccagggctacgttttgttcaaacaaacgaagagcccaaacagtaattagaaatttgaagaaggatagagcctttttggcaggggaaagcaaacaaatgagaacgacgtattacattgtaaaaaatttgtttggtaccatgttttttaaggattgtttatgaaaacatttcctgaaaatgggtcggtttttagaaatctttaagatgtttttctttattttttaataaaacggtttgggaaaccatttttatttctgcaaccatttttatttctgcaaccatttttatttctgcaatcatagaggccgataacatcttgttgatgttctggggatttgggtttttttggtcaagttttcagaaaacattttctgaatttctgtttacattatttctcttttgggtttgactggagaaattttaaattgctaaggactatgaagatttgcttggatctaatcctgcatttgatattgcaggagggaaagattgctgtggttgtggggactgttac

SEQ ID NO: 99830 - DNA, 583 bp, Vitis vinifera
  Intron number 1 from transcript GSVIVT01033321001 (locus G SVIVG01033321001) derived from phytozome v7.0 (chr-ID chr8 ; pos 21526113 to 21526695 reverse strand)
tgagcctttgattcttcgtttctcgaagatttaaggtacccctaataattactgattaaatgtttcctcataaattaatgaaattaaaattttgattcgttacttggaatgattatcctcaaattcgtaattttcttttgttttccttcgtgtttctcggaaaccaaactgagcgttagggttttcatttatttatttttatttattttttctttcattttgtcattttctgaggctttctctctgaaaccctaaatctgtattctattgcaaacttaataatttgtctttaggccttctgagaaatctgagtttgttttttattcttcaatgctaggaaattcatttaacttgggaaatttcaacttctgtggaatttgaaaatattgctgtctaccatggaatcatttccgtggattcgtagttgttgtgtttaaatttgatttaaattcaggtcgaacgcaggcaaggaaaactgtggatttgaaattggggctctgattttatgcaaccaaacacgccattaatctctaagccatcaattgtgattttgcatcttttgacactggcgttgcattttcag

SEQ ID NO: 99831 - DNA, 920 bp, Vitis vinifera
  Intron number 2 from transcript GSVIVT01036874001 (locus G SVIVG01036874001) derived from phytozome v7.0 (chr-ID chr2 ; pos 18362881 to 18363800 reverse strand)
ttttccatcatatcctcaaattcctctcctccgaggtatctatttttctttcattgttctccatttcttagattcatattcaccttattatttgtgtatagaatgacacgtattgatgaaactcttcacttaatgcatcaactctcggtatttgatcatccattgaaattgtgcttgtgaatgaaaaatatttccttttcgtttcatttctactttcatctttttaatatcagttttaaattgattgctgcttggtatatgcacagatttttatcatattattagtttgttagttaatacccactaagaattattttaagaattcttatttgattatttctgggcataaattgatctctgaatggaaaaatatcactgttgtccaactaaactaacaaaatttaaggtggcagaaagaagggttaactaattataatttgtggtcttggtgtatgtagatatgggccctatttcttttattagctttattgattagcttggttctaaattctaattgagggcaggtgatgttttttttgcttctctccctctccctgttgggtgagccttttggaggctggtgtatacttcctgtatacttcggggcgctgttttgacatttcctttttttaatatatacactctcttatcaaaagaaaaagaaaaaaaaggttaacttatatcccttcaattccctttatcaattggctaagtgcttggtagctatgcattccttgttgcgaaaagaatgcaagaaggaacatgtgatgatttttacatttgaaattgcttttgcataagatgttctctgacacttgatagaatgtgtttacattttggttattagttatttcagagtctactgactcagcttatttttatgttaatgatgttttatgaaacctgcaggaccttgttgc

SEQ ID NO: 99832 - DNA, 929 bp, Vitis vinifera
  Intron number 1 from transcript GSVIVT01030815001 (locus G SVIVG01030815001) derived from phytozome v7.0 (chr-ID chr1 4; pos 16580295 to 16581223)
ggcaaacaggtatttttttttttcagctctttcatctcaaagcttcgatctggttgttctgctggattttttagcttgattttctgtgattaattctcgattccatatccgtttttcctctcggaatcttcactcttttctgatcctttaacttcgtcagcttttcaagtttgatcatccagtgtttgctcttatatctctagatgaaaatcagagaggcctggtcaatcttcactctgtattttcttaccatttccgttgttatcaacgctgagaagttaaaaacagaagggaagaaatacgtgaagagggtcaacagagccaaaggctacacaaatcctattggtttaatttttcttggatcttaggctttctatttttattttttttcctttttaagcagtggaatcactcccataaattttccgtttatctgatcaatccatgaaatatctctaatcaaccatttagtttccgtctctctggatcacagtggtttcggaaattcaactaaaccactagattttggtgaatatgtcccactttattctttgtgtttgactatttatgttttagcatggtcatggccagtcactttattttgttgctaaattttcataaatttcagagaacattccttttatcttccttgtatgaagggaactcattaatcaaatttcagaaataccccaaaaaaaataaaaaaataaaaaaataaataaagggaaaaaggaaaaaggaaaaatgcatccaaatggctttggatgtagaaacagtcttattaatgggatgggttgtatatgcgtaggaattgcacttaaatatgatatggtatctgatacgtacccatggctttgttcatctccgttgactttctttaaatctaaccttttttactcagaaactgaagactcgcgtggtgaataaga

SEQ ID NO: 99833 - DNA, 592 bp, Vitis vinifera
  Intron number 1 from transcript GSVIVT01034279001 (locus G SVIVG01034279001) derived from phytozome v7.0 (chr-ID chr9 ; pos 14024389 to 14024980)
gcagaaggcctagtaagggggaaattgtttgctcagattttcatttcagtcgtagaaatctatattattattattcggttttatatttaacaaatttgataattggtttattgttaagtttgatgcattttctatgtagtcacccacatggaaaatatttaatatgatgcaagttcttataagaaaaacaataaaattaataagaaaaacttagtttaaaaatgagacaagttcttgtctcttttttttttttttcaaaattaattttaatttatataaacaaacaaaatttccatctactaaaacatctatgtgaaattgatcttagcaaacatattttcaatcaaaaatttcacaatctgtgtttatttttatttttttgattttcagaaacttaattttaaaaattattttcatagaaaagactcaatcatgctctacagattttaaatttcttacctttatatataaagcaagaacaggattgaagaaatatgatgaaaaaaagtactaaattttgatttgttcttggttttcctttctttttgtcatagaagggatattcttaggaaccagaaactccaatatcaac

SEQ ID NO: 99834 - DNA, 760 bp, Vitis vinifera
  Intron number 1 from transcript GSVIVT01037481001 (locus G SVIVG01037481001) derived from phytozome v7.0 (chr-ID chr6 ; pos 12939339 to 12940098 reverse strand)
gacaacctctcttactctaaccttggagccttcaggtactatttttccattcccatatcatttccttgttgtgtgtagtgttattcatcatgaatgggttttagagattacttcttcagactgtagaaacataataattaaccactttggacttcattcatttacaagaaataacatttagttttcttttgctgtttgattttttgttaattttcatgacttgaaaagttatgaaggggtctcatcttaaagtttctcgtatagaaaatcatgcactttgattcctattactcgttctatttgtttaattactcagtgtggagatttttttggatacttacatgactagtcctaagagggtttactttgatatacttttattcatttcatttagatcacttcttttgaggtttcataagggtttacgtttccgagtttgcatttttttggtcaggagtgaattaaagtattcaatttatttcttaagtataaatagaagggtggtttaaaggatcttagtcggggacacctaacataagtatccacctcatatccatttctatttaagtagaaccaccccataattattggagccccaacccattcttaatcaaaatccaactactacaattagttcacttgaaagctctagtattagctaggggtgtgcatgcaaatcagattatggagatttttcctttttccttctcttttgctttctcaagatgatgatggttggtgtcatgcaagtatcttgtgc

SEQ ID NO: 99835 - DNA, 819 bp, Vitis vinifera
  Intron number 2 from transcript GSVIVT01037228001 (locus G SVIVG01037228001) derived from phytozome v7.0 (chr-ID chr1 8; pos 27676398 to 27677216 reverse strand)
atttgttgggtccatttcaactgttgttgctacaggtccctttatctttaatgcttcctaattattgattgctttggttaagtttgcatatctaatcaacttccctcaatctataaataagttgggaaacaaagcctagtagcctactaaaaaaaattaagaacttaggaaaggataacaaaggtttttcttgcgtaatcaccgagtctttattctaactgctgggttttattaatgttaactacacctttattcatagcttaattcggttattcaatagttgacacaatcaagcacaacatttggggatgcttggatgcttctggcatgccacgaaatccaccagttaaaaatgatggtaattttcttatcactaggtttgctctaaagaaagagagctcattttaacacataggatacttgacaagctgaatctcattatggttctaacgattttattgatggctcaccatttttgtgtgagttcaatctcttgtttccagttagatgttcttcatatttgtctatattttggcggggcgggggaagccaaaataggaacatgaaaaatgttgaggctataatatgcaagttttgtgtcttttgtgtcatactgtcaccttgtttatagcccagttgcatctatcattttgcaatatttaggcttcatcatgccccaaaattatttggctgcgaagactaaggcctctgatgaagagactttaattatttcattaatgtgatttaacctcatattttctgttctttgagtttctcattcacttccattgttctattttgagcagttattttcctggt

SEQ ID NO: 99836 - DNA, 542 bp, Vitis vinifera
  Intron number 1 from transcript GSVIVT01037228001 (locus G SVIVG01037228001) derived from phytozome v7.0 (chr-ID chr1 8; pos 27677437 to 27677978 reverse strand)
tgatcataccagttcgttgttttacctgcggcaaggtctctgcaagggtttctttttcttttattaggggaaaaaatcatttcaatgcatatctgtttttgtttatctggacctttctagggcactgattttgtggaaattggctttgagggtgagatttgagttatgtttttgaaccatttcactggaagaatggcttgtccttgtaattttgttctctgagtcaataagttgtttctgataagaaagacctaagctcatgggcacactcagaacgaactcgttatttttggctttcttaaggaaggggaatcaggcacttgccttccttaaggaatgggatacccacattttatgggtatctcatttatgtggaaatagttatctggcacaggagctattccagaagggatagaagtaatcagacttcgattcccaacccctgattcctaccaatcaaatgcactgttaggtaattgaggatatcactcattttatggtgtctacttgatattaacaggacttctgattgcatccattgc

SEQ ID NO: 99837 - DNA, 651 bp, Vitis vinifera
  Intron number 1 from transcript GSVIVT01032490001 (locus G SVIVG01032490001) derived from phytozome v7.0 (chr-ID chr1 4; pos 27837646 to 27838296)
ttttcagttccgcgctccaggttcttgctactcaggtaatgattgtgcactgctctgggtttgcgtagaaagaaatgattgaaatttgggttgtgtttgtttccaaagaaaaggttttccagggcaatcttttggctcgaagtaaaaatttggctcgtaaagaaatgcttgtttagcaaaacttagcgaaggaggaacccttttcgtggaaagttgctccagtcgagctatttgtagattttgtgagccagaaggaatcaaattatgctcttttatgtgaagctgaggtccctggttaagaaaaaaggaagaaaattggaaattggtgtgtcagagagaattcctgtaaaaacttttggattagggtacaatttagatgtttcagagactgaagactggtttatagataatagtatatctatatgaattgtgcaaagagtattcctgatcaaggttcatggtgtaagtctttttgaaccatagaaaatacaagatatggcttatatctgtaagtaagctttgttgtgttagtctattcatgtgggaatatgtgtcatctaataatttgttaatgcatgcatttaaatggtcttcaatatgttaatttggttttcatgattatttattgtgggaattgtttgatgctaggca

SEQ ID NO: 99838 - DNA, 442 bp, Vitis vinifera
  Intron number 1 from transcript GSVIVT01035614001 (locus G SVIVG01035614001) derived from phytozome v7.0 (chr-ID chr4 ; pos 2730362 to 2730803)
cgtgccggtaatttcatgcatgcaatagtaaccagagagagaatttaattaatattcaaaaaatttcttctgtgaatcattttgccttatcgttttagatttgttttgtttggttgccgagaaatgaatgaagacaatatatatatatttaatttaattatagcttaattgcagttccggaaccaaaacaacaaaaataaaagtaaaaaaaaacttttcttttcatttgttggccatccagtggagggttaagattcttccaattaaaatttgcagaagggatcatatttattattggtttcagctttaaataaagttgagaaaataaaaaaagacacggttcctttaagcagaaattcaaacatatataatcaattcgaattatgaattacgagggaaaaagaaactcaaattgatatattcgatttaatttttttgcagt

SEQ ID NO: 99839 - DNA, 366 bp, Vitis vinifera
  Intron number 2 from transcript GSVIVT01038577001 (locus G SVIVG01038577001) derived from phytozome v7.0 (chr-ID chr1 6; pos 21749668 to 21750033)
tggataaaaaaaggttttcactcctctcagacatgatgctttgctaattttatgccggaagagctccttgtattgatttgtttctttctattctcatcggtgttttgtgcctaggaagggcaagttacttttggtccaaactcatctatgctttcatgaacttcttgatttaacctttcggttggtgagctacgttttcggtggaccatcgtttgattgccttttgtttgccacttttctttcatttatggagttttattccacctttttctttggacttttcctgatttctgttgacattctcttatggattggaaaacaataataggattcttttccaatatgcagggagttttgttgtggttg

SEQ ID NO: 99840 - DNA, 932 bp, Vitis vinifera
  Intron number 3 from transcript GSVIVT01038577001 (locus G SVIVG01038577001) derived from phytozome v7.0 (chr-ID chr1 6; pos 21750111 to 21751042)
gagcaagtccgtgtgcttcagaagtctatagagtgtgttgtttcttcacatcttaaagagtagtaagcaatcaaacaatatgtcactactcctatagaaaagaagtgccatattttttgagaaacaatatgcttgttctaaattatgactttccaaaaaaggggtagctaataagctgaaatccagcctaccaacaactcaaagactgaacccaaataaagcgtttcgagtcaaaatacttgtttgaagtacttaatggttaaatccagattctacccggtgctggttgttgcagggcggtcagcaccccaaggtttgggtcctcatggagagtcctaatggcttagccatggaaggttcctcaattataaataaaaaaaaagttaaatccagattctggacatcattttgctgagaagtactgagataatagagacttagtgatcactttttaaattcagattgtgactccaaaatccaaaaaaaaaattctttgttgaaggaattccaagcattgtattcttttggaccaactgcacttgactgattcctcaattctacagtcccatttctatgaccttatttgtacatacagccgcctgtatgaacctaaggttaagtaaagttgtgagccttgtctcttgtttcccttatggaatgaagcatgcaacttaggaatttggatcagcttgacaacttgttttgttttggaatttatgtgatagttcccattgaaaattttcccaagtagattataattactacttgattgtgatgccaaaaaatgcaaccacagtttggataatgagaccaatgccctttttgcttgttgcagagttggcaaaattttttagatgatttttatttttgcaaggtatatgcttacttctaactctgatgcaggcccgaaatctttaaatcaacactcctgc

SEQ ID NO: 99841 - DNA, 430 bp, Vitis vinifera
  Intron number 2 from transcript GSVIVT01037836001 (locus G SVIVG01037836001) derived from phytozome v7.0 (chr-ID chr3 ; pos 7339025 to 7339454 reverse strand)
aactctctgcctctgacatatctcattatcaagtatggttgcttttttttttttcccatgaatcacaacatattttatggttataatggtcagctacaattagcttgtgccgggtcttcggttaaatatgacttggttgtacactgagcattttggtaggggagcaagaagtttcaaactgagaaaatctttcatccagtgtaattcttattgatcattggtaattaatgtgtttgaaaccccctctctaaggtgggaaccttagaaatgatcattttgactagtttgattatcttgttcaagcatagtacaactcatgctgcttttttcagacaagtttctggggttttgataaggcatctattcttgcacttcatagattatgttattctcaggttgctgataaaagaattttggagctagaagctac

SEQ ID NO: 99842 - DNA, 813 bp, Vitis vinifera
  Intron number 1 from transcript GSVIVT01031342001 (locus G SVIVG01031342001) derived from phytozome v7.0 (chr-ID chr1 4; pos 230834 to 231646)
aacccttattcacgctgctgctgcgaaaggggcaggtacttttttcaaactcttcttctcatatctctgctgcttgatgtagctgtagcttgtattttttttttttaaaggaaaaaaaaaattgccgtgtgaaaatattagattattccatcattgccctaccatacctccaatgagattgcttcaggttggtgggatcttgattcagatttttttttttcaaactttttatttattttaactaatttttcatttaccaaaagcagctctttttttttttttttttttttcccattcttttcctgtgattttttctgctaacattttgatctattacttcctcttttgattgaactccctctcttgcaatcatcttttccaatgagtacactggtctggctgagattttcttttcctttttcgtctcttctcttgtctgtgttatttatcaactatcacaatgctgctagtagttttgcttctattatagtgatggtagattatgttagtctacattttaccacctctccttttgtttatttgaggaatattgacagtagtcacacattctctcatctttctcatctgtttgctcctccagctaatcgcaatcccctctttcatatcaatttagttctttaaaggctaatcccttgtattcgcaatctttcatttctaaacttgtacttgtttatcttttcctcaattttaatagcagtgacctgagatgcttagtactcagaatcatgaaatctggattccttttggcattaatacatctccttgtatcgtaaatcgttgcagtttgtttag

SEQ ID NO: 99843 - DNA, 1038 bp, Vitis vinifera
  Intron number 2 from transcript GSVIVT01031342001 (locus G SVIVG01031342001) derived from phytozome v7.0 (chr-ID chr1 4; pos 231686 to 232723)
ggtcaggggcaaacagttggctcattcaattggaggtctgtgaagcagagttagaacaatggaactttataattttcaatatataaatgctgctttacactttatgttttcttgcaaaagttcaaaattttatatgcctccccgtgcctctctttctgggtctccagatatgtaaaatatcatttagctaatataagagcagctatcaaactaaactttcccagtttcataacatttgtgttcaaatctttaatcccagaaaatggttccaaataatctgttagaaaaagaaatctgaagaaagaattgagagaaaagatgaaaagaattctcttcattcctcttgtcgcaaaatacaaggctgctctgttatataacagagtaaaatggctcaacaaaaactgaaccagaaaaacagaaacaaaacttaacaacaaactgaacaaaacaactcaaaaatagctcagcttacaataatgacaaaactacccttctagtaaaaaataactaatacaatcaatcctaatataatccctacttcattgaaaataaattctgacatctccaatgtgaaggaacctgtttttgttgagaaatctcccaaaaagtaaactgaccatataccccttattcatgacatattatgtatgcatgcaaatataatagcatatcttctggccaagcatctaatatatgataagttgatatcaaatgaaacaaaaatctctaggaatttgtagaaaaaatttattggtacaacaggtttaaacactatgctaccagggttacgaggactatattgtaccattattatcacctttgggtcagctgttgttgtcgccttagaagtatagctaggaatgcttcattgagccttttctacaatctccaaaattataagaatgttccatttccttttcattattgcttttttttggcaagtcctggataacaggttggctgtttctttatcaaagatcttttcaacaatactgatattgcatttaccttggcaaacattctttggcaggggggagg

SEQ ID NO: 99844 - DNA, 511 bp, Vitis vinifera
  Intron number 3 from transcript GSVIVT01034376001 (locus G SVIVG01034376001) derived from phytozome v7.0 (chr-ID chr1 0; pos 17221544 to 17222054 reverse strand)
gtttactgttatacggcccccctggtactggaaaggtattgatcgctatgaactcctgctttattgtttccttcatcctattttttgttgggaatgaagcgtcaatgtatgaatgaatattcaaatatattggtttgtgcacaattgtgaattccttgttccatgtttgtttactgttctggagattctattttgataagaagggaaaaatgctgaaatgagcttgataaaagattttatttttaagttgttccatcattttcctccattttcttgttctttataatgttctaatagggttgtggggtttgaaaaccgaaactcaggttggaatacagagaattattgttgctgttcttgattttctgctaaattatgttaattcaaaatgtgctttcttcatatgtagttatcttgttcaagtgttaggactgattattgaaatttctttttctaattgttattttttcttgcattgctagaccagcttggtacgtgcagttgttcgtga

SEQ ID NO: 99845 - DNA, 594 bp, Vitis vinifera
  Intron number 2 from transcript GSVIVT01034376001 (locus G SVIVG01034376001) derived from phytozome v7.0 (chr-ID chr1 0; pos 17222030 to 17222623 reverse strand)
actattcttgtgaagctcaaacgctcggtctcaaagtaatctcctttgtaccttttcgatggcgagataacacaggaaaaaatgtttaacaatgttttcggatactgtttttgattcatttcttgaaaacgggtttttgttagaaagagaatgccaaatcacacagaattctttttggatttgttcatccgacacattcagtggcaggggatatataattttgataggaaacaaccattaattataatgaaataggatataggatttattttgccactatgtatgatctgagaagctattgggattgaatagcattactcctttaggaaccaataaaatgtggtttttgggttttaagaaattcaagcttgttagtaattggaaaggaagatgagaattgttttatgtgtttatttttaaaattaaaccattaaaatttgttatcggtttggtttttgaaagttttcttttgtctctataagcacaaattggatgtggttttatttcctaaaggcagtaaaagtagttctaactgtatattaaatttgatttgtttcagtggccgcgcggtttactgttatacggcccccctgg

SEQ ID NO: 99846 - DNA, 940 bp, Vitis vinifera
  Intron number 1 from transcript GSVIVT01037284001 (locus G SVIVG01037284001) derived from phytozome v7.0 (chr-ID chr6 ; pos 16492727 to 16493666)
ggggcccacaacctgtaggtgaggtctacttctcaggtctgacttctcattgcttcttttgttgtttgctttggttgctgatatattatttttatttgtttatttaattgttgtatttttatcttccaaacaatgaaagaaaaaattctcaatttttttatttgattttgaatgaacaaaattgaagaaaaaaattataataaaataaaaattttaaactagaataattgtgacaaaagttaggaggagagtgaatgaagatttatttgtttatattttatttggttagaacgctcaatgctaataactgcattcattattatttagattcacatggttgaaaaggattcagggcttattacagaactgaaaaacaattctatccaattttttaaggcttcatggttagaattattggtttgagtgattagagttttgattggaactttagtggaaggcctgaaagaagtgaaatcacaaggtgttcctaaccttatggtggatgagagagaatttattgacaaagctttcttgggtgtctcaggaaaagggagggttatggagatatatacccattgatttgaaccagggggctgaaaagatggtgaaaggcctctcatcaattaccttttttggggagtttctcctgagattctccatatttggcttcgattatagtggtagatgtggtattgtttctgggaaccacattttgggtgttcattctttgtcttcctcctttcatctcttctctcctcatcctcttctacacctatatctatgaaggatctctctttcttctttgtagttgtgttttctctgtatataattctatctgggtttcttgcagaataggttacatctttcaaacactgaactgagagattattgtttggtggtgacaggggacatcattctggtgcaggtcaatttgcagatt

SEQ ID NO: 99847 - DNA, 673 bp, Vitis vinifera
  Intron number 2 from transcript GSVIVT01036528001 (locus G SVIVG01036528001) derived from phytozome v7.0 (chr-ID chr1 4; pos 23083121 to 23083793 reverse strand)
ctaaaggatagcagtgaggtaatggcggtgtgagggccactacccttaacaattttaatcaaaacctgactgcaaactacaattaattatggtagagatcattatcaggtacagatgagtttagagaaatgaattattggaaagaagacttttgagactttgcaatcaaacaccgaccatacagtcagctttgtttcaattaaatataggcggctgtgattatgtatctattgttttgaaatgtttgcaggtttagttgaggtgtcattgtcgatatgtgggtctaagtttatcattgctggtatgtcgtttgctgtgatggaggaaagttgcctcaacggattggagtaacaagaaaaacaaaaaagtattggagacattgagagggaatgctagccattatgttgttgacttggcatctttatcccttgttggctcgtttgagaaacttattattgcccacttgttgatgtgtgtggaccattgcctaaggaacatgataggacaaagatgactagtagtgtttatgtgtttttgggcttgattttatttatgtttttgtgtgaaataggaatgcccgttcgaaattgttttatctacttggctgattctgatttaactaatggaaagttgtgaagacaggtgaaaaagctgcagagacaccgaggtgctg

SEQ ID NO: 99848 - DNA, 610 bp, Vitis vinifera
  Intron number 2 from transcript GSVIVT01035592001 (locus G SVIVG01035592001) derived from phytozome v7.0 (chr-ID chr4 ; pos 2580161 to 2580770 reverse strand)
aaagattgaatccgataatctccgtcttaagaaaggttttccgatcttgcttatctccgttgttttacgtttttcctttttttttccacttttcttcaatttattatatctgaacgtggattccagccaacatcaatccgatgaaattgaattccttatgggtgtgtttggcgcgtggggataaaaatggaaatgggatgggaatggaggggaatcataatacctagtagaagagagaaatcaaaatcctagtgagagtaggatttgatttccgtaacagggaatcgttgattgctattcccattataaaaaaccaatccaagtcatgaatcagtaggagatggaattgatttcccattctctatgtcatcattccaaacatggtctatgggcattggaattacctcattcctttgctatgctattcttctaaatatgacattgacagggtatatgtaattcgcaatgctgagtacacattggatgatgagagaaactacctgatttattgggtcttaattggtgaatgtatttcaatttgttgaattgcattttttatttttatttttttgcagcatttgaagaagagcacacacaggcagaatttgag

SEQ ID NO: 99849 - DNA, 719 bp, Vitis vinifera
  Intron number 1 from transcript GSVIVT01031871001 (locus G SVIVG01031871001) derived from phytozome v7.0 (chr-ID chr3 ; pos 5017550 to 5018268)
atactgtcatcaaagccacttgcttggtatgtttctactacttcataacaccaccatcctcatgagcatctgcaacttcatcaagaccttgataatactcgtattactccgtcatgatctattttttccttctgctatacagtatttcaggactattgaagtaactctgtttctttctttgacaaaaattgccgagaccattccgtaaggttatgtttggttctcagaaaatttgagggaaaatacaagggaaagaaaatacaaaagaaaaatagaaggaaagaaaaagtgaaagaaaataaaaaatggattaaaaattgataagttatttttattttttacttcaaactcattttatttattttaactcatcaatataaagattaaataattttaaaatacataagtttttaattagttttaattatatttgattttcttttatattttttataggacaaccaaacatgaaaaaatcattttcctttgcattttttttctttctttagtattttccggaaccaaacataacctaaggaaacagcagacagaattcataaattaggctggaataacaggaactgggataattttttttttacccggattccccagtcataattcttctgccgctagacatactatttcacaaatgatgtatggacttttttctttaatcacaagttcaacatgggcgtaatatgttgatgcagactgtc

SEQ ID NO: 99850 - DNA, 578 bp, Vitis vinifera
  Intron number 1 from transcript GSVIVT01032851001 (locus G SVIVG01032851001) derived from phytozome v7.0 (chr-ID chr1 3; pos 248109 to 248686)
gcctgtctctggctgctccctcacttggtattgatgtcttgtggtgttttcagctatgtttggattcagagaaactgagggaaacactaggaagtgaaattttcgaatatggatgatgtgaagaatggtttaagatgcggagtctgatttctcttgtttttgttaacttttgtcggcacccaaacggagcgttgcgggtgttgtgagatcggagctgcgcgccgtttggttgaggataaaatgcgaggaagaaataaagaaattctgttttttggactcgtgtttttatgttgtttttgttttctgtgttgatggaaaactcaactcaaataagccaaacagttgcccaaggctcagtttggcctagttgagtggaagttttttcctctttcgtttcctctgttctcacagcagaaataatggaaagttctgaaaaattcaatattgattttgtattgttatttctcctgcattatcttagcaagcaatcggagcttttattctgagtgattttgttgttctgttttggtttcttcagtgaaggacaatccagtgaagttcaaagaagcttctagaaa

SEQ ID NO: 99851 - DNA, 877 bp, Vitis vinifera
  Intron number 1 from transcript GSVIVT01038548001 (locus G SVIVG01038548001) derived from phytozome v7.0 (chr-ID chr1 6; pos 21964264 to 21965140)
gtgcctttgcctgtcggggtttgttcctaaatctctagtattaattgttgtttgtattgttttgtttctcaagtgtattgaaatttcctacttcgaatatcaaaatgccctcctattgatgagttatgtgatagagatgagttagaatgcttggtcctatgttgaaattagtagtttttagttaactagtgcagatgtattacagtattgtggatgattgatcacaagaaattctcgaaggggtgttgatgcagtttttcttgagaaaagtagtgaagtttctattcaacattttgttaactgctaattttagacttaataaattagcaagattccttgtcctaagagaaacttagcatcttgttcagcagaagtaggttgacttatattaaacggtgtttaattttcattccaccgacaactgcaggtttgaacccaaccactgccttgagagttcttcaagaaactcttcactgcagcttgatggttgattagcaatttgaaattgtttctagcgataagacgctggacctttagtcaggttgtctcatccttagaaatgtgggttgtctgtcaagaactggaagtctctgttactagatctttgaggttctgggtttctgaacggtgctttgaatgaaatagatctcataaatgcagttcttacctaagaatgttatcagacccaccctggactacttactattattttgggattgatatcaacatttatataccagtattaacctttagatgccattattgtttgttctgtaacgttattttctgtcatttattaatggtttgaacatgaaatgaccgggttccctctctatgctcagatctatttccaggaattctcttgttcaaaaccaga

SEQ ID NO: 99852 - DNA, 536 bp, Vitis vinifera
  Intron number 1 from transcript GSVIVT01038205001 (locus G SVIVG01038205001) derived from phytozome v7.0 (chr-ID chr5 ; pos 24333826 to 24334361)
aggtaagttctaattcaccttttagatcagaggtcaaatcgtaataagaagtatagttcattagtttatgggattttttcacgcctacaaatatcatactcttaataatttttaatccatctatacatgaatagattaaagaaagatgataatgtcatccctaagcccatggagcccttaatgatcaagaccttgatgttccttactagtcagtttttcatcataattcttacttcataattcttacttcatctatacatagagacatggagaagtgacctaacagctaccgtcatagaatatgattttcatgtgattttcactagcattctccttgtataattcaaaaagcaagaagacagaaaaatggctcatatgagcagtttttcaacatctgctgctctataaatactacttcctgactcggctgaagaagaaagacaaagagttggataagaaaaatggagagaggcaaaagagttagtgaaacacatgtcatggtctttcctagcccagtacagagtcacataaaccct

SEQ ID NO: 99853 - DNA, 800 bp, Vitis vinifera
  Intron number 2 from transcript GSVIVT01034116001 (locus G SVIVG01034116001) derived from phytozome v7.0 (chr-ID chr8 ; pos 15057555 to 15058354)
tgtcctctctttttgagggcaagctcaacatccttgtaagtgttttttacctaaagcaaatccataactagctttgtttctcataattgagtggtacatttttatttttttttaaagaaataaaaggatcacctcattccatcatcaagactctcaagctaaactgcattttccactgatctgattagatgtgtatcaactgtatatcagttagtttcacaagaagccaatcctgcagccccttcgtaagagcagtagttgggattagattaaaatatcactcctagttaatttataatgttattattgttgtgggtatctgacattttcgtggttgtcatatattagactttaagaccaccgctatcagctatgggtcttctagagggagtaggacctcatccgagatttggggaagtccttccgcactgaagtcatatctatgttgtgtatattgtaatttttgaaggattcttttctttttggtaaagagattttccttttcattcttttgactttgagagttgtgagttggatgagatcagttctgtaatcttccttagagttgccgtccccataagtttgatgtttcccttttactagcaatagtgattaatttactttgtcttaagaggacaatatttaaaaataagaaaacaaatttcaacttcttgtctccacaattaatggattagatagttcagctgtcctacttttcatatggggaggcatgcaattgattgtagtcgatcattttccaacctaattacctgtggatgatgtttactctcaggtaaaca

SEQ ID NO: 99854 - DNA, 1019 bp, Vitis vinifera
  Intron number 1 from transcript GSVIVT01038299001 (locus G SVIVG01038299001) derived from phytozome v7.0 (chr-ID chr7 ; pos 12406937 to 12407955 reverse strand)
ttgcagtggtctacttgtcaagattcactcagcaggtatatttttttctgataattaacaagtccattgttcctttacatagaatttgaaacaagtagattgtccgttgatgaatgtaagacttttggtttagctcttgttcatgataaaggcaatttaggatttcaattgatcaactcatttctattctacttaggggttatggtgagtcctcttggccagttaccaacatgcaggttcaaatgatataaaaaacataatggattgattcaatttaaatgtctgtacaccttttgtttaatacaaaatttggcctcattttgtttaggattgcaaatgaactgagctgctcataaactgctcacgcctgatgagaagtcaatgggcattaccaggtgtagctactcataaagatcaacacaatatgtttggttacttggaatacgaaaattcttactacattgacccttttatttcaattagatgacagactgaattgtttagttatcaacacgtcatcttacatgtaatgttagaaagacaagatgcatgttccagatcaactctttgggcaacatttgtccggatatgagtgttctcattttcagcgtctaacaagtaggcaggtttgtgaaccaatgggaattgcatggattgtgataaatttggaatgaaacaatttcaaaccatgcatttatgtgctgtttagagttggagaaaaatattgggtctaactcataggaaaggaagaacaaatgtgacactgttatgaacatttgttgttctaaataatttgggaagtttgcaaataattattgaatcattttcctcgtctacaatacttaaagtaattcatgaacatttgattatgtcaaataattttagagttcacatgttgaatggagtctgttttagaattggggctcttgactagaaatagaaaactgctaagtaatattaaatttttgttgtccggttattggaaggatactaagtagatgcaatggttgacaagccag

SEQ ID NO: 99855 - DNA, 835 bp, Vitis vinifera
  Intron number 3 from transcript GSVIVT01035762001 (locus G SVIVG01035762001) derived from phytozome v7.0 (chr-ID chr4 ; pos 4082898 to 4083732)
actctaatatgtaagtatataattttccccctttttttgctatgaaaatatttgtcttcttatttactttttaattagaaaagttttttttttttttttttttttttgagaaattaataggtaatcatatattgttttactttgaaaattattttttattcaatgttctattttattgatttagatgttttttgtaaatattttttaaaattttattatagtgataaaaaaaattattaattttaattagaaaagtcttttttttttttgagaaattaattggtaatcatatattgttttactttaaaaatcatcttttattcaatgttcttttttattgatttagatgttttttataaatatttttataaattttattatagtgataaaaaaatattaattttaaactaatatataatcaaataatttgttatatcatgacttatatttatttattaatcaattctttttgtaaacattttttaaaattttatgtaaatcataaaaaaaattatttttagtttttttttaacaatataaatgtatatatatgcttttaagatagatgtttatatggtttgttctaatgaaaagtttttttgtttatcatactattttcttttagtaattaaaattgtatgtcgtttttggtaatttattaatattaaaaagtgttttatatttatacaacatattataaaaaaaaatcatttattaatactaaggtatgtttctcttttctggtttttttttttttttgaataatttcttattgcagtatttagagaggaatcatttttttgtgatcaaaattatttgtcttcctgtgcaggag

SEQ ID NO: 99856 - DNA, 766 bp, Vitis vinifera
  Intron number 1 from transcript GSVIVT01033893001 (locus G SVIVG01033893001) derived from phytozome v7.0 (chr-ID chr8 ; pos 16958280 to 16959045 reverse strand)
gtgctttggggctctccaatcaccaatccttatttgtgagtaatactgcagtgcttgcattgatttgtctatgttatgttttcaatatttatttgtattctgcactgttgttcattcattttttggcaagctttttgaatcttagcctctgtttggttgccgagaagcttttcttggaccatgaagaactaaaacctccacggaactgaatttgttggttgattgagttgagtttttcattttctcaagaaccaaggaaaggaaaagaaacgaaagttctgaaaactacttaactattttctcaatcaattttcatccttcttttcctttccattgatcttcccacggtccaatctttgcctgaaacttagtttgatattcttttcttctcctcaggtttcccagcaaacaaagacaaacaaaaccaggaactagtgtttgtttgttttattgaatctttttatatttgattagcttggatttggccaatggaagtataggtcagcgcccttaagtacccaaattgatgaagagaaattaacatattgcgaatactgtagtaggcttgtgatactttgctagtggtccctaatttcttcaaggtttgcacttgtcttgttcgaattctcaaacacaagaaagtaattttgcagaacatgttgcaacttattttgacaatgtcactaattcttttgttacttttcaccaagaatttctcattcactatcactttggcagcgtgttactagaccaagaggaggaatac

SEQ ID NO: 99857 - DNA, 978 bp, Vitis vinifera
  Intron number 1 from transcript GSVIVT01032607001 (locus G SVIVG01032607001) derived from phytozome v7.0 (chr-ID chr1 4; pos 28790862 to 28791839)
tctggctctccttccctcctagactcaagttcgctgtgagtactgtattgctctaacttttctgttttgttttaagtagttctctgagaaaattgaaggagaagacaaaaaagataggactttgtgccttttgttctccgcaggatactgtataatagctcaatttagcattctgatttttagttttctttattttcctcttatttatctctgcagccaagtggagctttgaagggaaagtcagtattgattgtgtgaaatttctggttcaagtagtatgcaaaaagcatctgatttgtagtatgtggggtttgatattagatgttaatgaataatagaccaattctgaggtgtgataaaacacaaaactgtataatggaaaaagaagaaagaatgaaactgctaaggctgcagttggttgcatggaatgtgtccttgatattggaatttggatgctccagttccaattccacagcttctatgtggctatggatttagaattaaattgagcatatctttttaaaacagttccacggtaaagattttcaaatttcatggaataggaattcccaatggactgtagtttcatgcatccaaatgaatcctcagtgatcactcctgtaaatcttaacaaacgcttggtgccccaataattacagaaatttggcatgatatatattgcattgttatttttttttttccttttaaatttctgtcctactaaccatatattaaggaaataggaagttggttgccttcagttcatgttaagggcatcctgaaataagtccaaaaacaaaaatttggtacttatatgaaggacaaccaggaagatttgaattgacattttgatccttatatagctcttattataagttaaagaaaatgaaacaacccttctataatgaattgatacttaatttctctttgctttctattgacacatatttgaatttcatgaataggtttttacttggt

SEQ ID NO: 99858 - DNA, 745 bp, Vitis vinifera
  Intron number 2 from transcript GSVIVT01038598001 (locus G SVIVG01038598001) derived from phytozome v7.0 (chr-ID chr1 6; pos 21607239 to 21607983 reverse strand)
attgttaaaaccaagttgaatcgagtgggtttttcgtaatcgagggacgatgctagttttgaagtgccgtttgcttttctgagagatgattgtgaagtctaattggttttaatttttaaagatttctttcaatatcattcgacttaaacttgatactgctaatctttatccggcgatgaacctatggaagattactcttgctttttgttagtttattggggatagaaattccagagcagcacatatttatatcaaatgtggtggtttaatctgtcttctttttcctctgtttttttaaatgctctatttctcaaaaaacaactgcattactgctttgatcaattctatttaccgatgagaactcacaactcatgccaaatcccggtcttagattctgcatctttgaatgccttgggcggacattttgatagctcttgaacatggcttaggtttttccattattttctacccatagttctatgtttctaagattgtgtatcaactgtctctgcttgatgctgcttctagagctttctggtcaatatggctcttttgatctctatctatcccttaaacattcaaagaatttattctcttgtctctgcttgatgctgcttctggagcttttggtcgatgtggctctttcgactctattgtcctttttcatttttagctttgcgaatcattttttgattctgatgttgttctagctgctgcctgcctaagtctctgttaaagtgctttc

SEQ ID NO: 99859 - DNA, 618 bp, Vitis vinifera
  Intron number 1 from transcript GSVIVT01035882001 (locus G SVIVG01035882001) derived from phytozome v7.0 (chr-ID chr4 ; pos 5232015 to 5232632 reverse strand)
agaccgatctccaccgctcctgggctcgggtacgccacctccacctccacctccgtttctcatttctctcttttgtgtgtgtgtgcgcttttattttttattcttattttgaatttttaggttctattcgttggtcctttgaaatgcggtttgtcattcttggatttgaaccagtttgttttgggaagcatattatttttaattttgattgctttggtttcaaattttatttatgttttcctgtgtttgattcatgttttatttgaatcatcgttctcagatttgtagtggtttggatttcggaagatattaatgtaaatcaattaaattggttatggcacctctgaaatacaaaataagcaatgataaataaatagagaaataatataaataaatttgatttcgtttcttttatatatttgattagtcctttctcttgttctggatttggcgtatttttattttaaaattgttttttttattttaattctgattcaatggatttaagtaattattgtttcatttaagcaagtggtggttgttgttgttgttgtttttattattgttatttcatttttggtaggcctctgcaacgaggagtccacaggaaaggaatac

SEQ ID NO: 99860 - DNA, 721 bp, Vitis vinifera
  Intron number 1 from transcript GSVIVT01035647001 (locus G SVIVG01035647001) derived from phytozome v7.0 (chr-ID chr4 ; pos 2970873 to 2971593 reverse strand)
ctgaagatcgacgacgacccagttacctttgagaggtaatgtgacgacccatttcaggtgaagccgaaatttgttccctaccatttccaaatctcgttgtttcgggtcctaacggctgcgtttcggtgtttttttgggtgggcatttgagtttgattggttttctatgagatttagtttggctggcttttgctcgtccctttttcttctggtatttttagcttttagttgtatttttccagttctgtgtagatcaagaacttcattacaggttcacagatttgcatgagtttgataagaatgagagtgagaattatatattgctttggggttgaggatgcatctgtgaggagagaataggtgaataattggatattctgagtattgggcaatcttgaagttgagttagaagcatatgggttggatgagagtacctcaacaatgatctagaatctaatctggttttttttttctggctttgaaatacctccagtggaaaattcaattttagtattttgtttttgttggacctgtcaaattggttcagtttggaattgattttttcccagctgggaagattttctagtggccgggtattatatatatagactgttgcaatggctcttgattgtacacgcatattcactttggaaaacttatgctaccgccgttttggtgggaatgaaaatgaggcataattggtctggtgctcttttaggtaa

SEQ ID NO: 99861 - DNA, 867 bp, Vitis vinifera
  Intron number 1 from transcript GSVIVT01037520001 (locus G SVIVG01037520001) derived from phytozome v7.0 (chr-ID chr6 ; pos 12318444 to 12319310 reverse strand)
tgtctcccactgaattcgccaagatccaagaacaggtcctttattttttggtttttgatttgtgtatatgtggattctggattctgaggataattttcgttttttcaaatgtggttttctgtcggcatgtttgaaattgaaccacaaaaatcctttttttaattttcggttgatatccatgtagaaaatttgctgaaattatgtgcgggtggatgttatgtttgatgcattttgctggcaattgagagggattttcttgttggtgagatttttacaattgagagaaaaaacattgtgtcagtgatcttccatttttaaatgaagtttttagtcttgtggagtttatccagggttaattgatctgggaaaatttttatttgatttttcattcgattttctaggggctgggggtggattcttaaacaatatattatatagtctccaagagaatggaatagttttttgtattttattccttggtaaccaaacacagcataaatgcttttgggtatgttgatttatttgattacaaaattttgtaacatattctttaatctgctttctgaatattgaaaatattgaggttagagaactgggtattttctaaaatatctgttgagtttggttgaacttagatctcagatcaaaccttaataactggacattgacctttagtgttaacgaaactgatatatgtgaatggtgcactagctaacatttaaagttgcatatgttttgcaagctttatttatctgcaacttaatgggctttgatttcttacacagttctattttgtttctagcttgtcccagttaagtggtattttctatatctcctgattttgttcatgcttctttggcaagtcag

SEQ ID NO: 99862 - DNA, 538 bp, Vitis vinifera
  Intron number 3 from transcript GSVIVT01036152001 (locus G SVIVG01036152001) derived from phytozome v7.0 (chr-ID chr6 ; pos 20030573 to 20031110 reverse strand)
gaagttttcttccagccgatcatagcttgcgacaggttagaattccctcattgctcaatcattcgtttctttattcaaaatttgctctatagagatcaaattctagtgctgctagtgagttgtttgtgtaatttactcaaagacaaaacatatttttgaaactatgttgggcgtggtctttattcaagttgtaagatgggcggcaatgttgctcattcttagctttcttaaactatgatgtttcttcaagagatcagccccagagttcaatgtctgctctactaaactagggcagaagatttgatatcaaagaataaattttcatcttttttattagctgttcactgctcatgtttttcccttccagtttccccatatcgaaatattgctttcggtgttataagaacatatgagctttcctcattctctactttgttcagaatacattttttttatattgagatcatcaatcagccaataattcataatgttgtttattaaactgagcaggacccggatttctacatccttaaagaag

SEQ ID NO: 99863 - DNA, 679 bp, Vitis vinifera
  Intron number 2 from transcript GSVIVT01033060001 (locus G SVIVG01033060001) derived from phytozome v7.0 (chr-ID chr1 4; pos 25439182 to 25439860 reverse strand)
atcttagaatcagctgcgaatactcttgtatcgaagtaagtttcatttcattccactgatcgacaatggtggtgtactccgagaaattgtttcaaattatcaaaagcattagggttcattccgaatttaaagtttggttgatttatatgcctaatgttctgcacttgaattcagaattcaattgattgcaaatacccacaaaacaaaaaggaaagtcttaactatgaaataaaattcgtttctgaatttagcctaagtttcatatgcaaattgatcatttgatctaatttaagagtgtgtttgacagtattgctattcaaagtgctttcagtgaaaatgttttctttgatagtgtttttagaagaattacaagtgattttccaacttttagaagtgttttctaaatttttccaaacacctgatttttttttttctaaaagtgcttttagccaaacaggctctaagtcccttaatgatttgatttagagtgctgtcaaaggtcctctggtgtattttgatgcaatggtagtagaagataatgaaagatagggtgtttattgtctcaattctaaggtttttcttttggtgtgttctaatgaaatgcggttggaagattctaaaacaatacagttgtttgcttttaggttaggggtgttagctatcgaccccaagggacaga

SEQ ID NO: 99864 - DNA, 861 bp, Vitis vinifera
  Intron number 2 from transcript GSVIVT01038571001 (locus G SVIVG01038571001) derived from phytozome v7.0 (chr-ID chr1 6; pos 21780322 to 21781182)
tccgaggaaatcgtgcaggtttcggttctttatcttagaatctttagctgcagtcttgaaattttcaatttgatctctggttgagtgttcagcttctttggcaatctgggtctatcttggtttgatttgagtgtgaatgtactcctctgcagtgatttttgagctctacactgttgttttagtaaacttgatgtggaaatgtggtagtgattagtgtatatggcatggcgggcagatatggaaggaaagggtttacattttcagctttaaccaattctagattgatttagtttcctaatgggcggcttaatttttatggatctgatgcatataaaactgaatccaacgtccaattgagagttgatattgggagagaaattgatcttcctagcatttccttgtcgataccattggtgttggtgtttgtttattgcctcacttctaataacctcaactcctcgtagagcaaactttgaaccatgaagaatacacactcacaaggcttacctgtagagtttcaattgatttttggtatgggattttagtatccaattccaatcattcaagtttgctcacagtgtaaactcaaataatgtgctctttatatacacatcaggagttgaaagcatattctttgggttttccctaaagcatattattaaattccgttatcagcttaaatgaagagatttaacatagcgcaatctgttttgggatggccatacttgggttttatgctgttcttttagttttattttattttgataagtgttgttcttttagttttatcaactttgccagctttctttggtgtcaaaaaataacaattatactttaatggacttatataggtggtgggtg

SEQ ID NO: 99865 - DNA, 832 bp, Vitis vinifera
  Intron number 1 from transcript GSVIVT01035977001 (locus G SVIVG01035977001) derived from phytozome v7.0 (chr-ID chr4 ; pos 6725236 to 6726067 reverse strand)
tccgatttttcgtattcacgcccaatcgggcagttgtaagcacactcctaaaccctagtacaccctgtaattttatgctgattttgccttagttcaatcttttctgtttcaaagttaacttctgggttttcttttttccttttcctttttttttttttggattttagattaaatttttttgtattttgatgttactcttctttgattccatcattatatttcgatttagtatttgggtctgtgcgatttttcttttaattgtctgatttttaggttcatcgtgttcatttcacataattttattacatgggtctgttttttttttttcgttatatttcaattataatctgactctcgatttctttttgaaactatctgttgttgatcttcatttttttttttgtcataatgatttgatattgtttgaagttggtctttaattttctgatttaagttaattgccattgataactgttgattagttttgaagattctattctgaactttcggtaactaattcctgtgttttattgcttgaaatctacgtcgattttgagtggatttgatccgatctaggatttggtaaaagttgacttgatttgaagataattagattgacctttgattgtcaaatgaaggaaatttattcattgaatctgatggtatttgctgtttttatctccaagaagatttaaaactttccaggactgaatggttctgttggtggcttttgagccattcggtttctgatgattaaaaggaagtggaaaatctaatgttttttttttttttcccagcaaccatacggggcactagcatttacacaatctga

SEQ ID NO: 99866 - DNA, 956 bp, Vitis vinifera
  Intron number 2 from transcript GSVIVT01034098001 (locus G SVIVG01034098001) derived from phytozome v7.0 (chr-ID chr8 ; pos 15157863 to 15158818)
gcgtggtcggtgaagctgtcatcgctgccgttaaggttctcttccttaaattgaattctggagaaagaaaaatgctgtcatctattctctgttgttaaatttgtgtgatatctggattacaattgcagatcatatttaaataattaagtaggactgaaattatgaacaaatgatacaaaaagaattctgaaattgcaagtttgtttcgtctggtaagttagggattctaacttcaaaactccaccacttttttggatgtcggtgtcgaggaaaactgggaaaaggaaaaacaaagagagaatagatttctgtttggttgtaaattgtaatagaaagtaagaaatacaataataatacatgaaaattgggaagaaatttttacgttcttgagctcttcattttctatttaaaaaatttattttccttcatttattgatttattgttttttcttccaatttcctggcaaatttttaaaattaaacatagtattaagaaactcgagtaatgtttgataagttctcaagaaataattttaaaaattggctttcaaaaaacactttttcaaaatagttctcaattattttctcgaacaaaattttgttgcacttgagtaaaatataaaatttccaaaatatattcgccttatattcaattgttttcaaaacattttacaaaaatacttaaaacccctcaaatctactcttaagatacctttcagaacaaaatttgcaaatgctgatattagtaaaatctttatagaaaaaaaaaaaaaaactgttttctatcctaatgaacaaaattgttgtcaaaaacaatttcctagcatgccttccctcataaaaatcatgtctcttctttctgttacagttataaaaacctgatcttaaggtatggttgttctggttcctaaatggatgcaggctggttacagacatatcgactgtgctcgagtata

SEQ ID NO: 99867 - DNA, 1046 bp, Vitis vinifera
  Intron number 1 from transcript GSVIVT01033692001 (locus G SVIVG01033692001) derived from phytozome v7.0 (chr-ID chr8 ; pos 18606099 to 18607144)
ccttatcctacgcaacccactccctctgcttcaaggtaacccctactactaatccatcattccgccttctcctgctctcaccttccatctacacttttttcctaagcttttagattaccatatttcgattggatggatattaccatttgtctatgtatatgagtgtacgcccatatgcataatcatttatcttggtttctttctggttaatgaaggctaagaaaaggcatcaggattaggattcaagttcgttatatttgttatataagcacataagatcctattcaatttctaggaatcaccaagaaggctggattcatcagtttctttagaccctattatatatatataaaattcaagaaattctttatggatttcaactatgaggtaagagaaccagtatagagtgtgatgtcgtggtttgtgatctttgcatattgttattagggtgtgatttcgatgcatgaatcatttgatatatgtatcactattgtgtcatcgcaattcccggtttgttctgatgaaatagaatatttctcaagagtgtttggttccaattgaattcagcttttatttttatgcccgaattgaaacacaaatataaataagatattaactcgtactgttacactgcaccattatccttcaaattgagtttctggttttcttttttggttgctggtgggtgttttggatagttttaaaaagcatgtgtcatctttggatcaacttcttgacacattttaacctcgttccattcatcatgtcatcctacttcaaaacagtgttccaagcttggataggggagagatgggtagtatcaaattaacaactgggatacaactttccaccaaatctctttgaacttagtaccaaaggaattcttcaagcactctattttgatgacatgtttgcaaaaatgaaacaatagatgttgtaacttgctactgcatgttaagaatttcaaatagtggcttctggggctttcattttgatggcactggtttgttcatggcagagaagtttgagggagattgctgaactgt

SEQ ID NO: 99868 - DNA, 692 bp, Vitis vinifera
  Intron number 1 from transcript GSVIVT01032631001 (locus G SVIVG01032631001) derived from phytozome v7.0 (chr-ID chr1 3; pos 2040265 to 2040956)
tctctctttcaattggttcagagctcttgattcaggttccttctcataccatcacagttctttatcatgttcaattatgaggtttatccttgttgtatctgttctctcatttcctaatcttgcgttgattggaatgaagaagttagggtcttatctgttttctaaatgttagggtttagagtatgtaattgaaattcgagtcgatttgttgatgtttttgccaatcaactgttgacttaatatcaataattttgtcttatcgcactacggttgagaaattgcatttagaggttttatttgattttgaaggtttttttttttcgtctccttcattacagcgaccaaattttgcttcgctcaagtgaaaacctggggccttatttgttttattttttgctgattgatgttacaaatcatcgatcgaaagttttcaacaaaatgctgatttgctacaaacggtttctttatctcccattgtgattttatttttgttctgatgctgagaagttgcgtcgggggtttgttgtttagctgtaatttgcttaaattttcggtaacctattattattctcagcagctgattgggatgcatctcacgattctttagtttcttttagggtttttgtgattcttatcctaacctagccagttccattgtttcagctccaagatcatccattccttgatctaca

SEQ ID NO: 99869 - DNA, 978 bp, Vitis vinifera
  Intron number 1 from transcript GSVIVT01035787001 (locus G SVIVG01035787001) derived from phytozome v7.0 (chr-ID chr4 ; pos 4318414 to 4319391)
ggtttgcccacaatttttgaggtgatatttccaaactcttggttattgggaactaccatttgaactaatttatgccctcttgtttcaagtacctaaaatttggatttaatatttgtcaacttcctctgaaatcggtgtagggtttagggtttagggtttagggtacatttatgtttctaatttgatttttcttcattctgctcaaggcaaccttcagtattcaaaaaattgaagaaactcttttctggttttcccagttgttcaagcttcactttatgcagaaatggattgcttcaatgtaattccttcaatgtgaacatgtggattaatatattgcaattgaaatgtatgtgctatttgtttcagatgaattaggctttgagacatctaggaattttttgaattgctctctgtttttatttttcatctcaagcattggcatggacagacataacacataagatttcaattcaactgtacattatttgatctttttgtcttttttgtgattcttctgagttttggatatcacttgggatttgaaatgagcctttaatgcaacttgattccttttgctttctttacactttttaactaagatgatggcagttaaccatgtcaatatatagtgtcattttgtttgattccacaactgtgggaacgtctccatcggacagtacctgtttgtttgttgaaatgtcgtatggaacactttaggctataacacaaaagttcgattagtgaagcatttttgtggttcaccatttcttgtactgggttgtgatcagtatgataaaatgaggccttccccaattttccctcatgatagtcatataacatgtttgctcatttgctctaatgaaacctccataagtcctgcttgttttctttgttaaggtaaccttgcatagaaaagcctaacacgtaccatttatgtctgcaggattaagcaagttccagaggtttagaggagtccgg

SEQ ID NO: 99870 - DNA, 924 bp, Vitis vinifera
  Intron number 2 from transcript GSVIVT01030945001 (locus G SVIVG01030945001) derived from phytozome v7.0 (chr-ID chr1 4; pos 19574726 to 19575649)
agtcttcctctacctcttctggttcgtatttctattatgagttgttgaatatttggtgatttaatgcttacaaatactgggttgcatctatttttcgttttaaattggtttgtggtggtagctgattatgatcttcctccattgtttggcgggttggttcaagcacaattggatttgattttggaatttgaaaatcttgctctaaatatttagaatgggttttgctgattgttgttggaattcaaagggaatttcaatttcattggcatccgaatcaaggaactttcacattacttttggattatatggaacctatttgggttaggtttactttatcacaaagttgagaataattcggaaatatgacaaactttgtggatatatatatattttgaaaatttaataacccaaataaggaatattgcagtgaggatttcactttcaagttctgaattgtaatgcttcaaattcaaactagatgggcatcttaaggtcggatgtgattaattgagatgacactggtgttcttttgttggtacaaggagtaaaaggaaacatgccgattcttttcttatcatgttatcataaagctacactttttcttgtttattgccttacctctgagtgaagtgtcacttgcacagggttgcctttatatttggattacctataaacaatctcttagcattacaagtcatgttgaaagagaatgctccctttcatttaacttttgaacattttttttgcttttcttaattaagatattacttttaaaattctaacattggatactttagctcaacaaaaaatcttctgcctgtgcacatgtttatctagatgctactataagttctgctcattccatagttactcttttctatttttttatttttttattcttttgaatctttttgtttccaggat

SEQ ID NO: 99871 - DNA, 974 bp, Vitis vinifera
  Intron number 2 from transcript GSVIVT01035992001 (locus G SVIVG01035992001) derived from phytozome v7.0 (chr-ID chr4 ; pos 6913388 to 6914361 reverse strand)
ctgaagctaattggaaagctcaggtaattttattttgaccaaactgctgaccctgtttgatctatgttactgtatctgtgatcgtgctttaccctttttgaatcgtgtggtattcttttttaattaatctgctcaatttcagtcagtttggatccatatttctcaattatagtccgaattttccctcaaatcaatgtcaagctgtttttaaaaagtgttaattgtttgtataatttttccatgttcttttccagatttatgtcagatttaattgggtggctatctgattcgaatttggtcgttgaccatctgaaaaataaaatggaaccgaagattttgagctttaaataggcaaattatgatttttaattcaaagttttgttgattgatgaaatataaagtgggttaactatataaattaggttgaatttgaagttgggtcagatttgttgtgatgaaagatggcacagttaattctgttaagaataagttagctcaatatgtgcaatacatgaaattaagcaaattggttcaatggttaatggtggaaaggattggtgaattcaaggtttgtgtcaacaaaataaacacccaaattcaatgggttataaagatttagaaaagacgagattttgtgataaggaatttaaatcggctctgtgtaagatacctttggaatctaacgcagacaaaattagcaatactgtcatctgtcttagtttatgttgtggatacactgcctggttatatcatttttgatggaaaagtgaattttataagttgttcttatagataccaattaccacattacaaatactcccatgttcctatctcccactgtttttcttttgggatgtagaccagttagaaaacagttgtttctacttaaatgattaaaagtagaatcttctaatgcataatctctctatgtttgagtagaaagcttgggaagtggcacaagcccctttcaagaa

SEQ ID NO: 99872 - DNA, 663 bp, Vitis vinifera
  Intron number 2 from transcript GSVIVT01038245001 (locus G SVIVG01038245001) derived from phytozome v7.0 (chr-ID chr5 ; pos 24585939 to 24586601 reverse strand)
gggccctgttttctgcttgactctatcatcttgtatgacagccttggtacttttaccccccaacaatcaatttttttcagaaaatttgggcaccaaatggaggactcgacttgtttgcaattgcaattatgctcaatttctaacctgatattgcttttgatttattaaagtttatacacttgctttcaggataagcaagaatgtgattttaatgaagaaatgcaggaataatcaatatcaatagtcaagagatgccaatgtcctatctcatcatctgaactaatcaataacagggaattcgaattcaatcaattttctcccatttttgatgttttttttctctgtttaatgggttgattatgtgctgtttgttttatcttcctttcaagataagtggagttaagggaaaggggaaaagctcctttttcactgtttgtttcttaaatagatttggatcatggagcagcattagcttgaaaatttgcatatagaatgataattgcatcatcttttacttatcattcaaatgtttgatataatttcattgtcctgttacacaaatgaataggaaaccatgcttcaatttttatctatattggagtcctgtggctctccaatttgctgttttcaccgtcttttgtgtttctttcattcaggggatct

SEQ ID NO: 99873 - DNA, 686 bp, Vitis vinifera
  Intron number 1 from transcript GSVIVT01035903001 (locus G SVIVG01035903001) derived from phytozome v7.0 (chr-ID chr4 ; pos 5605619 to 5606304 reverse strand)
ccagtaccgtctgattctttggctttgttttccatttctttgattttgttaatggtttttggatatgggctcttggatttgtgtatttttgtttagattttcttgcttccttggtaagtagcatagaattcatacatatgcgaaatcttctcctctctagcgctttttattttgatttattttgtcagttttttcattttgttcttaattttgcggatgggttctgggatttgctttctgttcttcattttgtggttgccagagaatatacaaatgtgacccacaaactctccgtctctctagttgtctacgattaaaatatggggtatatatgatttgttgacttgattgcaggactgtagaattttagaactttagaactttttcttgttgacctatgattagtgggttgatttagaaaattagatagatgtattctgtacacgggtttttttagtgttattcaaatcttaatatttgtctcatgattcaatcgacatattctgggatcttttttgatgtttccccagattgagtttttgtttggtttgtggtataattagcttttgttcattgtacatatgactttttattttttatttttttattttttttgtgaatatctgttttcactgtggtatggatttgcagttacgacaactagtcaggcaatcacagcattgaag

SEQ ID NO: 99874 - DNA, 549 bp, Vitis vinifera
  Intron number 1 from transcript GSVIVT01035795001 (locus G SVIVG01035795001) derived from phytozome v7.0 (chr-ID chr4 ; pos 4419477 to 4420025)
tttggaggaactagtgatccgaagacaaagtgcacgtaatgaccctctctctgaactgaaatttgctttgttttttgctctcaatatctgtagagataccttcaatttgctaacaaatggtgagtggtatttaatgtttgaatttgtgatctgaataatatttttttttgcattttctcgagaaagaaattgaatttcaaaggatcgtgtggaactgggaagaacacacgccttgagcgaataaattaaagcaaaacgccttttcctccaacaatgttcatgtattgctttccaaattatgaattacccggtgccaaacaattccaaaatcaggaatttattgttaatgctgttttgggctggtaattcgagttcaatatttgttatttatatagattttataagtaggtttcttcttatattgccatgaattggttgtcactttagaggtaatctccttgtcatattgaactgatgttagttggattcaatttctgttggaggtgcactgaagttggcctgaagaagctctaagattgttcggtgtaa

SEQ ID NO: 99875 - DNA, 921 bp, Vitis vinifera
  Intron number 2 from transcript GSVIVT01035763001 (locus G SVIVG01035763001) derived from phytozome v7.0 (chr-ID chr4 ; pos 4087035 to 4087955)
gcttctccgttcacaattttcttcgacaaatctcagttgcggatagattattttctgaatatgacaatgaagtggagttgaaaagtgacaatgcaaatcaacttcaaaactcaactacaagcagtttttttgcagcatctgatcaagaattcatgcaacagttctgagaccaaattgcaaatgagctttttcaagtattttattaatttgttatttttagctttttaccatcggaagaaatgcaatgtttggattttaacatataatgtgatgtctttagatatttgaaaatatgtacttgaattgtcatgttttttctttaatttgatttgggttttatcaatccattatttttcagattattaagtttaaatattttattttacttatgtaaaaaataaatatgttaattattttttgtaaggatgataataataaattatttattacaataattttatgattttgaactttttagaaatatgttaaattatatttttttaatacattaaattattaagatattggtatttagtacataaaaaaaaaatagcttaatatttaatagaaataaaataataaaaaaaataaaaaacttaatatttaatactattaagtattatttagtattaagttaaatattacttctaaaatagaatcaatcttttacattaagaaatctatatgttttatgatttttagcatatcccaaaaacatctatttgatacctttaagacctattttatttcaattcaaaatgtattcttaaatagattaaatttggttctctgtttttttttcccgtaattcatatggtattttttacaaagctttataccatagatgacgaccaatttggaaaacttcactagcaatttctattagtgttgtattctttaattctattctaccattttgat

SEQ ID NO: 99876 - DNA, 646 bp, Vitis vinifera
  Intron number 1 from transcript GSVIVT01035459001 (locus G SVIVG01035459001) derived from phytozome v7.0 (chr-ID chr4 ; pos 1419668 to 1420313 reverse strand)
gagaaacctccccaagagagctggtaaaagaaagcattgaccaaaacatagtctgttagtgttttttgttttgtttttttgtttttttgttttttttagtatgcatctcctctcttttctgaaaacccattagagaacaattctttttggcagtgttttcataatcaaaattgagttggggttgatgggtttgtgagatctttttggtttgctttcagttccccacctctgttttctctggtttctcaaaacccatgaaagaaaaatgctttccggaagtgttttccaaatccaaagttgagttgagattgatggcttgctggccaaacttttctgttttttagtgtgttctcagttacccactttttgttttctctgttttctttcaacccatgtgggaaaatgctttctaaaagtgttgtccaagtctaactctacttatttttaatggaaaatggttttggaagtgttgtccaagtcctaattgaactcttctgtgttctttcagttaccctcctctgttttctctgttttctctgaactcatcagaggaaaaagaaatcttaaaacttctaagaaaccgctgtccaaatccaaaattaaattaaaattggaccccatattgataaaatgcaggtttgaagag

SEQ ID NO: 99877 - DNA, 591 bp, Vitis vinifera
  Intron number 3 from transcript GSVIVT01031434001 (locus G SVIVG01031434001) derived from phytozome v7.0 (chr-ID chr6 ; pos 18633665 to 18634255)
gtggtaaggtaatgttatagtcttcaaatttcaaatccattactttgttggatctgaattctgttttcaaagttcaatttgtgaggttcttcttaagggcatggcttccattcagtttgaactgttcaattggttagattctcacactatggtgtgaagtaaaagattggtacctatgttggttctgcagattatatcaagcatgctgaaatttacatggattcaatgagtttaaaccatccattgaggaattattttgtcataacatcttgaaaagttgtttccttggtgcacctcctttaggtgtttttgcctaaaataaaaaataaaaaaataaaaaaacacaccatcttgaaaagtgtttttaggtttgacataatttgattaaaaccaaactctgcaaattgcaataatcaaattgaactaattttagctacagcttaaactggggaatggggactctatgatgggttttacttgattttgaaatatcacgtctttattggatatttatgggcatgtacttctccactttgaagccccttttttgtttatattttgaatttgttagtgctatttgtgcagattgcc

SEQ ID NO: 99878 - DNA, 1066 bp, Vitis vinifera
  Intron number 1 from transcript GSVIVT01032208001 (locus G SVIVG01032208001) derived from phytozome v7.0 (chr-ID chr1 3; pos 21546036 to 21547101)
ggtgcgttgcagttgaactatcacaatctccctttgttgaaattataatctgacttaaagtcaaattagaagaattttaggaatttgagaaatattaggaattgttatttatttaagtttcttatgttaatcaggacttgggtctaatagaaattgaagtcctaatacaagtataattagtttattgtaaataggcttgttattatgttgaaaagtgaaatgtaataaaattttatttttaacaaagttgcaaacattaaggggtgaatttgagtctctttgcatgaatgactctaaatctatctcagattactttgattaggtacaaaccattgttaaccaaatacaggttaatggtgaaaagcttgatgatcaacaaatagtagagaaaattatgtgctctttaagtgcaagattcgactatgctgttgcagcaattgaagaaggaaaggataattgttcttctccttggtctcctcctcagttagtgtaagcatcaaatttctacctctttgttatgtctgtggataattttctggtttgaattgtaaagcacacttaaataattcaaagttgcagaagtcttgctggctcacaacttaccatctcatttggattcccaagaaaggaaatctgcaacttgggatacaatgagctatgatcattcttacatatttaaagccttcttcatttgtatcatatgttctgatggcatttccttgttctgatggcatttcctttttctcattagatatacatgtggaagattttttgacttccattataagttttcaataactattgttgcatttcattttatttcaaggagattcaggggtgaaattcttttgcatgtgtcttgacgtttgccacttaaaactctacaatggtgtttggtgttgaaaaaggggtacttcattgcagaataatgaaagtataaatagttctttaccataaaaaaaagcttcatggttgttaagatccatctaattctttgtccttttcttgacatgttcttcaatttgtggaagacgtgggagggaaagcttgaatcaaattaagccaa

SEQ ID NO: 99879 - DNA, 611 bp, Vitis vinifera
  Intron number 1 from transcript GSVIVT01031955001 (locus G SVIVG01031955001) derived from phytozome v7.0 (chr-ID chr3 ; pos 5675637 to 5676247)
aaggtgtgttcgaaaatttattttttttattttttttaaattcgattcaattgattgatccaaactttttctatcaatttctgtagaagaagtcggtcaagcgctatatgctagatctgtgtttttctgattcttttttgtccattcatgagcgtattgtgtgctagtggagccaattcgaataggattatggtttaattcgacctgatctgatcagctttttttttctttttaaattatagttttggttagttgtaccgtggccttagatcacaatgtagtttggtaatttatattatagttgtttaattgtagttgatcagatatatattgtctggatatctagatctctttgattctatacatgatgaatatttttgcccgtttgcttagggtatgaatgcccttattctccaattatgtgatgctattgaatctttaggagaagcattttgttgaagctatttttgcgaatttggtactggcagattttggttgatttaggttttctagaagtaaattatagtgtttaccatgtgcgtgggtgttaattatttaaatttgattgttttgcagcggattactctccttttctcgggattgaaaaggga

SEQ ID NO: 99880 - DNA, 391 bp, Vitis vinifera
  Intron number 1 from transcript GSVIVT01030691001 (locus G SVIVG01030691001) derived from phytozome v7.0 (chr-ID chr1 4; pos 13642580 to 13642970 reverse strand)
taggaatttgcagataaaagtgcaagtaagctgcaacaatttgattgttttttctttgccttaatactaaaagtttttataggaaacatttctaagaagcaaggtttattacttattttatttctcgggaatgtttttgttttcttgataggcatgctattaaggcttgaaaacgtctttaccatatctttataacaaagcatgccaattaaaggttaatcacatgtataactgcttgggaacacattataaggttcctagtttgctatttgacatctagtgtcaccatgtaattcaattactaggccagaagttactcctattgagttacctacacatcatctcaattatctgagaatttaatgaatgattgagcaggaaaaaggctttg

SEQ ID NO: 99881 - DNA, 894 bp, Vitis vinifera
  Intron number 2 from transcript GSVIVT01038594001 (locus G SVIVG01038594001) derived from phytozome v7.0 (chr-ID chr1 6; pos 21621929 to 21622822)
atatagtctctaaagcttttcaggtgggttaatttgttgttgttgatttccttcttgttctcagtttcaaaaatttgcagtgttctcttaatatggtagtcttcaatgtgatgtgtggttttgcctatatgatcattggcttcattcgggtttttcagtagtggagaaaaccctagtagaaaatcaggccacaatgatgcataggtttgtatatacaatcatttggcaaaaacccaattagaaattgaagtggctatgtagagagattagggtttagttattgcccagaccgattagaaattgaggtggctgtgtaaagaatgagagtaattcttattgaaaatgatgaaagctccatgtacgaagagaaccccactgggaaatcagatcaaagtaatgtatagttttgtatgtattgtcatcgggtagattaggttttagttttggtccaaacccaattagagattgaggtggttttgtgaagaaatagagtgattcttgtcagaatgtatgaaaatcttgcaacagatcaataacccatcattgggttaaggtttgaaatctcagaaatcattgggttaaggtttgaaatctcagaaagaatgaataggaagagcaggaaattgctgagaattactttgaaatggacatttctcaatctattttcagcatttttcctttcttttcctcatttttttctgtatatccaaacagagaccatgggcatggagttgaaacaatttgagtttaatggtttaggcttgattcagcaactaaatctttttgtttcttttgttctaactttcaattaacatcatgttttgcatttcgttgataaagatattcatcgcattcatgtccaacatttttctgaattttgtttttagggaagac

SEQ ID NO: 99882 - DNA, 857 bp, Vitis vinifera
  Intron number 1 from transcript GSVIVT01034705001 (locus G SVIVG01034705001) derived from phytozome v7.0 (chr-ID chr1 3; pos 8082463 to 8083319 reverse strand)
aatcagaagggacctttgtgggctgaagtttctaggtatatgaatgactgaattgcactcaacccatgttttttttttttgtttttcttcttctttctctcattgatacacatgatttctccaagattttcaagaaaccctatttccttttctttagcaaaaatgactctcttccttctttcgtactggtttttatgtatatatgttgtatatattttattaaagcaaaaaatgacaagcttttgatagaatttatgtttggtttactgagtttagcgcttcaaaatgacaagctttttgagttaactggaagacccagctgttattttagttattttaacaggttttattctggaaaaatggctgacagcgcccctgaattgttgtactcatacattggttttgtgtgatatggccagtccaagaagcttctctaaatcccaacattctcgagtcgttcaagaaacctacttacttagttggtttaatgtaaaatacccatcaaacagaaagggagaagaaacaagaataatattttatgacatctaactgatgattagaggaatgttttgggtattttaagattttattatttcgaaatgcccaaaaaagagataccaaaacacattttctatcatctatagcattaattactatttgaggtttgcattgggtatcaaaatccttgaatataattacttagactatctgttttaggattccaagagggactaggccaaagaactacaaactagggttattcttctctagtctgtttatatatatatatatgtatatatttaccctttttgggttacttttcttcctttattcgtttcgttaattgttgcaggata

SEQ ID NO: 99883 - DNA, 629 bp, Vitis vinifera
  Intron number 2 from transcript GSVIVT01038259001 (locus G SVIVG01038259001) derived from phytozome v7.0 (chr-ID chr5 ; pos 24761687 to 24762315 reverse strand)
actcccaacagtcaggcattgtgtttctcagccaggtataccttctgataatgttccactccgtccttcattcattgtgttagcttcataagattatggtaagcttgtgaatgtgtaattgatttgtgtcagatgacattgtatttatttttatgttgtttttgccttttggtaattattagtgtacaaacttagttctggcccttaactgcaatatggtaacaggacgtaaattcccaacctattacaaggtaacttgggaagcccttgagactgttagaccaatgcatcattgttactgtatcgtgtttattagcatgaaattttcttctaatcatttgttaaaaagatggcttgttttaattaggtctacaatgagagataaactggctgttctttttgtatacattcatctgagactgatccaactatgtctcaagaagtctcttaatttatattcactgtagtagcatattgggtagttgtaatttgacctattttatgctttaacctgtaaacctagaattcattcataatgggtgcaccattttttttttctccttttcttgtttgatttctataatatatgatactgttgctctccaggaattgattggtgctcttctcac

SEQ ID NO: 99884 - DNA, 507 bp, Vitis vinifera
  Intron number 1 from transcript GSVIVT01033562001 (locus G SVIVG01033562001) derived from phytozome v7.0 (chr-ID chr8 ; pos 19747414 to 19747920 reverse strand)
gtggcgatttcctccgtaatgagcttcttctcactctctcagacatagggtttggtttgtacgattatcatgcttatgtctcgtttgattgcaagactcagggtgcgaaatttttggaaaacctatttctggaacggaaatgaaaacggctacattctttgaaaactctttgattcgtgccctaagtcttcaaatcatgatatattttttaaattttaatttctttcatttttagtttccagaaggcgtcaattcccaggaagatttgggaatgttatttatttattttttttcgaaatgcgatgccgaacatgttcttcccattgttttcaattttttgtcgtttccgttttcggaaacagaaagctgttgctggccctgatacttaaattttagtgtttttttttcttcattttctctgcatccaactagatcccagcattaaatgaaatttatgttccattttcctcagttttctcatcaaccaaacagagggaaccaataatt

SEQ ID NO: 99885 - DNA, 963 bp, Vitis vinifera
  Intron number 2 from transcript GSVIVT01037078001 (locus G SVIVG01037078001) derived from phytozome v7.0 (chr-ID chr3 ; pos 8037739 to 8038701 reverse strand)
gcttcttttatcaagttggtatgccgagatttccacttcttcttctactcgttgagttatattgtatcgttgattttcttgcaacgattcctaatgaagaaattagagaaaaacaaaagaaaacagaaattcgacagattgcctcagatattgacgatgcaaaattaaggttttttatgtaaccctcagatattgaaattttaaaaatacccctaaattgtaatgcctctggaagggcaaccctcgctgagcggaacggaggggaacaacggcatttgccccttacatatatttatgtacagacttctattttacagaaaaaacttgctttagattgtatcccaagtcccaactgaaaagtactttgaagaagggcatgcatacaacacaggttagcaaaagtccacgcagtgttaagagttgaaatttgactattaaggtctatatagtgagggaaaaacaatgataactactttactgttctttaagtttagtttgaccttactggtgaaaaaatgatggagaggtggatccaatgcggccagagcacactataaatggaagaactataaaaaatattatctgggatatcagttagaggtctgaaagaagtgtcaaaactgagaataatattttataaggaaagattttaaattttccattgtgaaaagcatatattaaatacacatgaaaatccttatttcattaataaactttgatgacgttaacttcggtaatattatactttacataaacgcttttaatttagtaaaaagctttaagcagcttttcaagaagcttgaaagtccaatgaccacaatggactattttccttttttcttctttgtttgttttttctttttttttcctttctgtaattggtgattgctagcagaaatggcttcaaatattttatgttcctctgtaggcccagtagttttcaacactacagattatattgga

SEQ ID NO: 99886 - DNA, 370 bp, Vitis vinifera
  Intron number 1 from transcript GSVIVT01035425001 (locus G SVIVG01035425001) derived from phytozome v7.0 (chr-ID chr4 ; pos 1204423 to 1204792)
attccccagaatattcaatccgggtatgcacagttcaattgttttgattaattttcagctacaatctgtttggttgccgagaaatcgagggaaaggggctgaaagcttggagtttgtatcataggctagggttgaactgcctcttgtaagaacccaattttcggttttttattttatttgattttttctttctttcctttgagttctcagcaaccaaattgagctgggtttgttttgggaatttgtggtttatgtgtcagtgtttttttgtgtttgattgaatgctgggtttcagtgcaagatgataagaattaagagcttcttatgatgaatgttttgtttatataattgtgttttgtttgatctctag

SEQ ID NO: 99887 - DNA, 658 bp, Vitis vinifera
  Intron number 2 from transcript GSVIVT01034067001 (locus G SVIVG01034067001) derived from phytozome v7.0 (chr-ID chr8 ; pos 15437559 to 15438216)
tcttgctctaacctccaatgttcaccctggaaatcacactgatttctctgtacagtttctagttttccttgctgttgtacatgtatcttgggatttataccaattaatatgagatgcagcaggttgtcgcccgtagcccatgttttagtttctgaattttgggttgaaaacacgatgtttttactaaaaatttaacatgaagaaaagcaaagaaagcttgagctttcatttgattggggctctggttcgcctgctcggaggctgccattagagtctgagctcttaacatctggtctggtagatgcttttaattgcttacccagtggtcctccaatgaaatgacctgctggtctgctgattttgaaagggatgaatgtttgtggaagattttttgctataggaaaatatattattttttgttaaacaaaacatgtatccaaacacccccaagctctttttctgattcataattaaatactaattggtaactaaataccaggcctatttttgaaaataaaaaataaaaaatcaaccttgaaagaaaattgatttttttttattattgtgaagaaaaatatatatataataattatttatttattttctatataaaataattaatataagtgaaataaatttgaagttatatataaaaata

SEQ ID NO: 99888 - DNA, 870 bp, Vitis vinifera
  Intron number 1 from transcript GSVIVT01034561001 (locus G SVIVG01034561001) derived from phytozome v7.0 (chr-ID chr1 8; pos 19463206 to 19464075 reverse strand)
gaaaattttggaaagattgatcagtcctacgatctgtaagttttctcttttaatctactgtttgagatttattatgtgggttttttttgggattgattctgtatctgcggggtttctttggatcgattgaaagagaggggaaagaaaattatcaagaagcttctgtaaaataaagcatcactcattcttttgttctttttttttttcttttttttttgcggggattgaaaggaaagagtaagaaaattatcaagacgaagtgtttctgtttgttttattatggttacataaattcttgaaaacaggaaaaagttcaatctctgaatatctgaatttctctcttaattgatttgaataaaatgaagaccaaagatcgtttatggtttaagaggaaatggacccaaaaaaaaaatctgagttacattgttgacgatttctggggaaatgtaatacaaagaaagagaaagtctgtttggtttttgaggaagtgcaggaaaagaaaagaaaattaaaatgtttctaggaactctgtaaagagaaattaaaattgggtttagataatgcttttccatttgtacaaatggaaccttcagaaatttttgaagttaaaaaaaaaaaatcagattctggcttggatttattttctttcttccttatttttaaaattttttatttattttatttatttatttatttttaaccaggttacagactattattttacaatgtttaattgttcacattcctcagattctaacctatgcaaatgctatgaattttgtgaaaacttttggttgttcacaatgtataaccgcatgaatttgttgggtcacagattttacactagattgaactcgggagtatatttgc

SEQ ID NO: 99889 - DNA, 495 bp, Vitis vinifera
  Intron number 1 from transcript GSVIVT01031534001 (locus G SVIVG01031534001) derived from phytozome v7.0 (chr-ID chr6 ; pos 17423221 to 17423715 reverse strand)
ccataattaccgtaagagttgacaataaaaaacaacagaggctctgccgtagaggtagttatgatcaaagaaaattgtatctgcaataactgccaccaccctcttccccaccatggaccactcaatctatctctctctcttttctctcttggacggaagaggcagacgccaaagctcttgttttcttttccaaaaatggcagttggccctttgagtgaaattttatattggtgtttttccatcttggcttatttgatatatggggtcacccaaaagatacagaacaaggaggtgttttttcctttcttttttaatatgaaaaattgaaaatcattcatgtgttttagttgctgatgagcttgttgttgtattcagctttatatgtggctttttctatctgggttctctagtaatcatgtgtaggttcctttttatgtggttcatgtgggtgtttctgttgaagagttgttggtctgttgcttttggttcctcttc

SEQ ID NO: 99890 - DNA, 797 bp, Vitis vinifera
  Intron number 1 from transcript GSVIVT01033522001 (locus G SVIVG01033522001) derived from phytozome v7.0 (chr-ID chr8 ; pos 20041936 to 20042732 reverse strand)
tttgcaagcttcggctattacagatccacggggtaactccaattttttgttcttgattttcttgtaattttgattttttatttttttttgatcctcttgttgtctgggagattgattcttgactgattaaaaaaataaaataaaataaccagcttcagcttttacggatcagaagaattctacttgcacttccttgccttgattttttcttgtcattttctttaaaaattttctctagaaatttgatataatttgcactatacgatgatcactagttagttattggaatgcttcattccaactgtttaatctccaagaaaatttcgggaatcttgaaaggcaaaacattcacctaatggaacctaacgtaaatatttggcttagttgagtttagttttttatttattcaaaacaagactaacataggttacatggctcagaattcaattttctttccttctttcttttcctcggtttttttttttgccagcaaagagtgggctagaaaagattcctctgtactttttatggtttttggagggaaaataacggaatcgttcttgactccaaattagttactgctgagatatttaggaagctatgcacaatgaatggggcttacataacatcgtgggcagtcatagtggggtctccaaaaatggatgaatgcccaaaagtgatcaggttctacactggatcaaaaaataaaattgacctattaatgggatgataatcagaataaagtggtggccatagattaagattacagaataattccctcctttttactttctgca

SEQ ID NO: 99891 - DNA, 409 bp, Vitis vinifera
  Intron number 1 from transcript GSVIVT01037899001 (locus G SVIVG01037899001) derived from phytozome v7.0 (chr-ID chr3 ; pos 6539114 to 6539522)
cttcagacacgccgcctctctttcaccaatccaaggtcccccgcccatatctttaacatccattatgtcctgagaaaatgaagaaaaataaattataatgagattttggaacttgttttttgatggctgcgtgaaatagttgtattcagctccgatgagttttgagtccttttgtcttctccggtccgggataatgaaaaagttggagactttaggtttcttttattttccgtcgttttctctgcaaccattaaaggctcaattgagtgaagaattttgtcttcttgagtagaaaataatgagaatatcatatcctgaataaaattcctttctatatatttgcaattataacagggcattacttactctgattttcttctgtttgttgtaggaatttgggagaactagg

SEQ ID NO: 99892 - DNA, 831 bp, Vitis vinifera
  Intron number 1 from transcript GSVIVT01036789001 (locus G SVIVG01036789001) derived from phytozome v7.0 (chr-ID chr1 9; pos 22522323 to 22523153)
gaagaagagaaggagctcaccttctatttcatcaggtcaattttaaccttcttcataataatttctttccattttctctttctttttgtttgtttgccgatgaaagagcaccttagaaagtgaaaaacccacccacagttagggccaataatcctatttgtttcagttgaattgtgggttttgtctcgtcaggtcctaagtaactgaatttttaatatttcagcaattctaaataatccaattgaattgtgggttttgtttcttcagatcccaagtaatcggattttaacatttcaggattttctctgtttgtttgtcgagaaaagaaaattcagaaagtgaaaaactcatcccaactaggaccagtagccctacctggctcggttgaattgtgggttttgtctcattagacctaaatattgatttttaacatttcagaaaattttctttgcttgtttcctgagaaaacctaacccagaaagaaaatatccacaacacccccccgccccccaattagggccaattatcgtatttgggtcttttgaattgtgggttttgcctccttgtatccatataattgagtttttaacattttagaatttttctctctgtttgtttcctcagaaaaaaaaaaaaaaaaaaaaaaaacccagcaaaaaaacgaaacaaaaaacagaaagtgaagaactcaccccaacttagcccaatagtcctattttgctcaatttaattgtgggataccagaaattgaattttaaaatttcagaaatttctagctcacaaatagggtgttggaaatttcattgatttttgttctttgtaattgcacag

SEQ ID NO: 99893 - DNA, 563 bp, Vitis vinifera
  Intron number 4 from transcript GSVIVT01032413001 (locus G SVIVG01032413001) derived from phytozome v7.0 (chr-ID chr1 4; pos 27133775 to 27134337)
ctggatcaaggtatgcacttgtcataaggatttgttgaagatttgtgatgtattttgatttgcacacacaattaagtcagaattattaaattttcccaatattaaattttcccaatttcgcatcaattttttggcagaggataatttcactcaacatcttacaacaaaaagagttgcaattgaagctttcttaggtgttcttgtgtgcagtaattcagtttaatccttattagttgtttctaatccaacatttctaaaatttgggagtttagagatttgagcaatatccttcattccacattaaaaatcgtatggtgatcagtcatgcagtgccatcagatttgaaattattgttttattaatttaaattataacaatatcattgatttttattatgggcaatatagccacaaaacttatagtttgggtttatgggaaaactgtatggtgaaggccatggctttgcattcaaattaagacaaataaccaacattaattatgaatttggtaatttctagtgttggatttggtcatggcttgatatatttttttataattgcagg

SEQ ID NO: 99894 - DNA, 971 bp, Vitis vinifera
  Intron number 3 from transcript GSVIVT01036914001 (locus G SVIVG01036914001) derived from phytozome v7.0 (chr-ID chr2 ; pos 17729411 to 17730381)
gtgcagggattaacaattggttggttcatattgaggtaccagacaactgtttgaagttttgtttcatgatgtatatagtgattggttgctaagaaattggaggaaagggaaagaaaattatgggattttattactaccatactatataatcttatatttcaaggttatacttggttggttgatatagaggtattagacatgacaaccctttagcattttgttttaccacatatatgctgagaaaatggaagaaaaggaatgaaaattttggaattttgctactaccatactacataatcttttgtttaaaagttacaattggttggttgatgtggaggtactagcaagacatttgacattttgttttactagatatatgctgattggttgctgagaaaatggaagaaatggaaagtaaattttggaattttacgacttatataatcttatatttcaaggttacaattggttttgtcatatatatgctgattggctgttgagaaattggaggaaaaagggaagaaaattttttgagtcttacaacaagcataccatataatcttacattaaggttacaattagacaatatatgctgattggttgctgagaaattggaggaaaagggaagaaatgttttgagtcttacaattagcataccatataatcttatatttacaactagacaatatgtgctgattggtttctgagaaattggaggaaaatggaagaaatttttagtcttgtaaaaacgcacaatgtaatatcttatatctataatcagacaatatatgctgataggaaaatgggagaaaatttttgagtcttgcaactagcataccatagaatcttaagacaatatatgctgattggtttctcagaaattagaggaaaatggaagaaaatttttgagtcatgcaactggcatagcatataatctcatcatttatggctttttgatatcagggaggagg

SEQ ID NO: 99895 - DNA, 825 bp, Vitis vinifera
  Intron number 3 from transcript GSVIVT01034691001 (locus G SVIVG01034691001) derived from phytozome v7.0 (chr-ID chr1 3; pos 7815082 to 7815906 reverse strand)
agtccacagttgtaaaagccatatctggtgttcaggttatattttgcttcttgtttgcatttgaatatttaatactgcttgttattagttttcatttctttagaagccttgagtataaatttgtactgtcacattcttttgctagttttcttagttgaatgttgagtctaatatggttgtctaccaatgtagaagcaacccaaaggaggggtgtaagctccttttgtcatcattgctcttgttggattagacttgataaacagatgagaaaaaataaaataaaataaaataagacaatttgataccaacaaattgatttggatacctaaattgaattgaatcagtagaaggaagtgtatagaaaatattgatacaatagggaggtaaatatgcttgcaatatacatttcggatgaccactaaattggatggcttctgagtctgacaagagggatgcctcctctcaaataaggtgtttgaaaatgggacctcccctatattttggataaaaaaaatcatgttttaatgaggtccttttaacttataaagttctatttgggttgaaagtgaagtgggtggggactttggatgagtggttgattgttggtagaaagcattgccttctctccctgctttggctagctaaacttcctagggtatggaaatttattccttactgctgggttttcataggggaagaaagcattgacttaggagacagtggaccatagtcatcctctagttattttgttaagaatatctatatgcttagatctgaaaggtggccctttatgatttgtttatctacagactgttcgttttaaaa

SEQ ID NO: 99896 - DNA, 319 bp, Vitis vinifera
  Intron number 1 from transcript GSVIVT01038402001 (locus G SVIVG01038402001) derived from phytozome v7.0 (chr-ID chr9 ; pos 11807879 to 11808197)
caattaaatcttgcttcttatattgttccttattccctgaagacttcaacattcaaaagaaaatttgatagcttattggattggcgagggatttctacatgaatttgatgacatagatgaagctaggaaccagggacacaacattattggtattcttcttaatgcatgtttattggagaagagctcccgagatattataagaatgcatgacgtggttcgtgacatggcattgtggatagcttgtgagcatgggaaggtgaaagatgagtttttttgtgagaacgcgtgttgggttaatagaagcacctgagtttaccag

SEQ ID NO: 99897 - DNA, 802 bp, Vitis vinifera
  Intron number 2 from transcript GSVIVT01032757001 (locus G SVIVG01032757001) derived from phytozome v7.0 (chr-ID chr1 3; pos 995720 to 996521 reverse strand)
ggtgtagtcccatccacttaaatcttgtggtaatcctcattatgaactttgattgctactggaaatatacttatttgttcatttattttgactcccgtggtctaagacagaccaacattcctgtcacaaataatgtaacgtcaacttttgagaagcaaaatagtattgatttcaaaaaccgtctttacataattaccagtggttaatgcttgcattagacctgtaaatgtctcctcctaagtccgggtggtgacatagaagcaaactgtagtacaggtttgatgctttgagaatgttggacaaattgtagatagacaactgaaaattgaagatataaattttggtaaaaattgaattgagtgaatgatttagaagatttttccataaaataatttagtaatattgtattagttgcactcagtgtatgggatctcctctgtcttctaaccaccctctaattcattatggcctgaaatatatggcattcaagttcacatccccacctctaagggtatgtcttttggaacttgtgatatctattctagaaatggaaattacctcaggtttatggtgtttctgttgtgttctgcttaagtagtattttgtgtgctgtttatggtaaccattcatgtactagaatattttctagggagttaccatggcaaatccttttatatgcaattctacatttctttgttatttatgttaagatgatcaagtgatcctatattatgaaattatttctttgttttcatcataagtgaaaaaaattctaatcctattttgaattcacaggcaaggc

SEQ ID NO: 99898 - DNA, 643 bp, Vitis vinifera
  Intron number 1 from transcript GSVIVT01032757001 (locus G SVIVG01032757001) derived from phytozome v7.0 (chr-ID chr1 3; pos 996579 to 997221 reverse strand)
ttcgacgtccggcaacatctatcgactgcttcaaggtcactatctcgatcttgttgattcattgattcgttgttacgtcgaatataagaaaatcgaacgtgaattggtgttcgtgttttaggttttggttgtcgaaatgtttttctaggatttgtgattcgatgagtgaagtgcaaaagaagcatgaatttttgaaaatattttggtttattttggtgttatgcgagccaggtggagagtttgactgtaatttgattaattgtggaaacgaggaggaaaataggaagaaaaatggagtgatgtactgcccaagccggttttgctgcttccacggctttccattggcgattgtccagatgcttgggcttgccatggatattttccaattaaaaggcctctttgtgtttttatgttattcacacttcccatttctaagaaaatgaaacattcacctctgcaaatatttgaagaaaaatgccatttagaggcacaagtaactattgccgttgatttttcatacaccaccgccacagtagagcggatcgatttattgattgatgtgtgaaattaatcattttccgtagttgaattattctgggttcctgaatggcatctagatttatgtttttttgtatgcgcagat

SEQ ID NO: 99899 - DNA, 834 bp, Vitis vinifera
  Intron number 3 from transcript GSVIVT01033609001 (locus G SVIVG01033609001) derived from phytozome v7.0 (chr-ID chr8 ; pos 19344023 to 19344856)
ctgcccgaagggtctcacggcaagatatacaactggtaagctattgaaccctataatcctggaaatttgccaactaagttttttgttatttgtatttaaagtgagaaattagagatgacattctggtgggctaaacctccctgccctttctctagtatatgggaatggcatgtcaattttgtgggctagaggcggggatgggatcctttgccaatttatggtcatcctgtcttttatatattattggagtccaattatgaattctctctctctctctctctcattgtttttgttttttccttctttttttttgttagttttgaggcttattttagatatcagaaaagtagagggactacactagaagtggaaaatgtatggtaaagcacttcagatggtgtcatactatactccactagggcaaagtcaaaggaaaaaacattgtatttcagcaatccagcattgcatcagtttgatattgggagaagagcaacatgcacagctctaatttccgagttgtaagagagagaaccgagggtagttgaagcctctatgaaaggactgtggcactaagcaaatgttgtggagccacatgtcacatcttaaaaacactttttttgggaatatttaaaatagctggttataaatctataaaaaatcatttgaaatattaaaaggccagaagcctgtgctgttgttatttctcatcatgcccaaacgtaggttcgtgttttggtaaaaaaatttccaattggctcatggggacttggcagattctaattaatacttgtggcttatttatgtctgatttcaggtgcaaaatcttatagaacg

SEQ ID NO: 99900 - DNA, 1008 bp, Vitis vinifera
  Intron number 1 from transcript GSVIVT01035794001 (locus G SVIVG01035794001) derived from phytozome v7.0 (chr-ID chr4 ; pos 4416089 to 4417096)
aacctcctgtggcccgaggggaatccggccttctggtgaatccctgctaaacttcaacttccatggcttttcttcttctttttcagattttagaagctctcctgactactcatgcatcactgcattcattctgtagtttctgcatttttttattagggtgtgtttggatggtaacttttcttttctatgctactgcttttgggtgcatctacaatttcctcatatgcagctagggttctgaggatcacatgtgttgatacatcaaagttttctgactaatcccacaagaaatttcacagaaagatccacttttaaactacctaaatgacaatgaagtaaaaacattattgaagtttcttgtgtgaatttgtgtgtgggtatatttcataatgatttaataattgtccctggagtttggtaaaggcctgggatgatcatcattagttcaggaatattattttctgcaaacccgataaacacccaagagtcactgtcaattttgagtattaaatccagggccaatgggagtattgtaagttgtaacatccataattctcattatctggcctactactactgctcagccccaacagtgaaatgagtcccaaatttcaaaaaccgtatggagatgtttgtgattatgactgcaaccaaacacctccactacctgtcaatgccgcaattaatagggcttatcttgaaactgattgaatttaatacagtgacagccttaaagtgactgttccaccccaaaattcacatgcccgtgcagaatcagctgcagaaagggatgaaatcattttgtttttgagtgcaactgtttcattaatttctattctttctcttgatgaccagaaaatattttcatcagcagtaactatgtgtatatatattcatagcctaatggactgagaaatgagaaagattctcgggaaaatgttttcccgcatgaaaacttaattactaaatcttcttcttacatattcttctagtggagccctcatttcc

SEQ ID NO: 99901 - DNA, 802 bp, Vitis vinifera
  Intron number 2 from transcript GSVIVT01034011001 (locus G SVIVG01034011001) derived from phytozome v7.0 (chr-ID chr8 ; pos 15906900 to 15907701)
ggcgtttcattgctgctggagaggtatacattatgaaaaatcacgttgaatttgttgttatttttataagggtgcccctggaagacacactggaagtatctttgcattgtgtcctatattaaaatgtcccaataatggtaaaatgttaacagggctcaacttcacaaaagtttgaattctaactgtttgggagttggctggataaacctttttaattgtgcatctctatctagagctacatcctttttaattgtttctcagtgcactgtccacactgtttttgtccttcctctttgtcattttagcctgcatattgcaacccgtcttagatggtgtgatcccttaatacatccatgatggaaaagagcaacaatgagactttattttgtgttttaaagcagtagcatttaattaaatcacaaaatttatctgatatcagttcaattttctttcatgtccccatcttgggtgatggaattctacattaaaatgttctaaacagaatggacccaaccaatttcaatttgacttctcaattgagtgatgatgaagggtatgaagaagacatgtatttatttatttattttacctcttatataccccctgtatacataggacgtgcccttttattatgagcatgtaatatgaattttgtttgtcaaaaaaaaaaaaaaaacaatatttatttcttccttctctttgagctactattgtcatgctggaacttttccacccaatggttatttatctaatgtgcttttttgcagtcagggcaccaacctgcagtgctagtgtgggactc

SEQ ID NO: 99902 - DNA, 579 bp, Vitis vinifera
  Intron number 1 from transcript GSVIVT01035720001 (locus G SVIVG01035720001) derived from phytozome v7.0 (chr-ID chr4 ; pos 3646401 to 3646979 reverse strand)
ctcaaaatctcctctcattctcacacacacattcggtaacgtctcattctctctctaacattttctctgggattcaatctggatttggaaattatgtctatctttgagtgctgattttatttagatttgtccctataatcaacacccgatttttccttctttttctctgtttagaatttttttttgtgttcaggatttctaaattttcatcattttctcacttttctctctctagaaatttcatcatttcgttccttccttgctctctaagatttttccattcgtgaaatttcgtaatatattattttctctctgaaattgcataattcggctgtttctctctctaaaatttcatcatttggttcgtcttctttttcgagcaagttgtttttgggttcatgcaggtagactttagctgatttcgaatcatttgttaatcattaactatcattcacatttacgacatctcatattctttagtcgatcatatacaatgcagatctagggcatttttttgatattgccttgcatttgacccgtacaggcccgcagagaagaagatctagggttttgtgactg

SEQ ID NO: 99903 - DNA, 687 bp, Vitis vinifera
  Intron number 2 from transcript GSVIVT01032807001 (locus G SVIVG01032807001) derived from phytozome v7.0 (chr-ID chr1 3; pos 603714 to 604400)
atttttgttatctctgccaactactactctttgaggtacgttcttgtgaaggaaagttcaggtctgtttggttgccgagaaagtctagaaaccaaacggattttcagttttttttttttcttttcttttcttgtttttcgggaaaccaaagagattacagctaagttttgattctgggtgtcgtggaattagtcgttcaagttgaatttttctcctctgggctaccagttctgaccgattattgggttgcttctattgttgttgttgttattattattattattattattattttattgtttgagtcggttagacgattctagaaatgttgaatgggaagagcaaaccctttaaatcccagaaacttttgagttttgttttgtttttcggttgatgaggagaagggaaatcaattttgaatcttaatattttatgttggtgttttcaagatgaaaagctcacctcttgtaagcaaattggaggtattaggctgggttgagtggtagtctttattttctcagctcgcaattaatggagatgataagattcgaagttttgtttcttagcaaccaaacagaatttattttatctgagctccagttacagcctactgtttgtttgtttatttatttgttttcataggctgatcacagtgctgaatatgaatttattgtcttgcagggttac

SEQ ID NO: 99904 - DNA, 944 bp, Vitis vinifera
  Intron number 2 from transcript GSVIVT01037061001 (locus G SVIVG01037061001) derived from phytozome v7.0 (chr-ID chr3 ; pos 8242781 to 8243724 reverse strand)
cggtactaagcttggcagtttacactatttcaaaggtatgttacaccctataacaatttgacttttctctgatttgctcttcattggcatgaaattgatgatgatttaaactaagaagtacttgttttgcataattagtcatgtaccttcatctgtttcattttcaactggaaaataatatgcatcttcctcctttctgacccttgtattttttgctaatttaatttgtagttttgtatattgcactactacataattcttcaggttatgttaactgtcaaggttatttttaggataaagaatgctttctcttgatctccagatttaaaaaaaaaataataattatctaggagactgctttccagaaaatgggaaggatgttcataattcatttgtgtaatattttgcaaatattcaagtaacttgcagatattaccatagttgtgatataatgctcatctgatggcatagtgtcctctctttccaagattttgttttccataaaaacaagcggagcgtttactgggtctttttgggttgaaaaatgctttgacaatgcagtttctccctagctttagagggagataaagcttttgcacatacagaaaagcaggctccaaatgagcaggagaatataatgcaacgtcggaagaactctaattaacatatcctgatttagtttctccctagtcattattgtagtatacattcgtgaatcactgactcctgaacaaaaaaatcgcatgaaaccccaaaactcagctctttcatgatcttttagtcttttagctaatgtagtcaacagttcaaaaagtctttagcttttgatcacaaacgcaagtttgtgaaatcatgtggtttagatgtacaacaaggaaaatatgaaattaactgctaaatttctttcagttgattcagattgaagaagagcttggggaaatagc

SEQ ID NO: 99905 - DNA, 836 bp, Vitis vinifera
  Intron number 2 from transcript GSVIVT01035041001 (locus G SVIVG01035041001) derived from phytozome v7.0 (chr-ID chr5 ; pos 1104908 to 1105743)
accatcgtgaagttgcatagttcttggggtaacaggtatgttctagaattttactctttcttcttcttcttcctctttctttttctatttttccccggcttttcccagagcaaagtaaattatgaatatcctcttcttttccctgatttcattttccaaggaaacaaataaagtcttcaaaagagcactttcccttccccatttttccaccaatgacatgcatgccactcaatcatggggttgcttttgaacttctgctagacttctacgaacaattgaatggagtatgtgtccattcaaattgcccaaatatagatgtactcatttctccataatttaatctgctgataattgatccagctgagctcatgtgagtatcagtactggtatggcgcagaagggtttacaacaataatgcccagtaacgccttctcgttcatttatcctttttccttatctgcaagttgaacatgagctcacagagtcggatcatctgtttgttgaggtaaatgatacggactacgcttcaatttttggcagcacccccatccctacctatattaatgcacatagcccttctgtgtcaacagttggtgaaatcatagtggagctggcaaagtttgagcacaccttctgcttagtcctctacccaattattggagagacggttaatatttggatgagtaatcttccaagatataaatgcagagttactttcctagctaataatcattcactgtatgatttagcaggaagatcaatcatttttatcctttaattagtcgggtttgattgctgtaggtggtctttgatagctggtcatttgcctggaagaa

SEQ ID NO: 99906 - DNA, 658 bp, Vitis vinifera
  Intron number 1 from transcript GSVIVT01031017001 (locus G SVIVG01031017001) derived from phytozome v7.0 (chr-ID chr1 4; pos 21000845 to 21001502)
agaagtggggttctgacctgcctttcttgtttaaggtatgatttttcagttcgtttgttctagttgagttcggtgtaaatttgtggttttgatttgacaggatgtttgttcttgggaattcggagagttttcaaaagtgttgtcgatgaaagcgacgaagattttgaatcgaaaaaacaatcattttattgattttttcgaagtgtttttggaaacaaaatttaaatggaaaaagcagaaaatagaaaaaaattcgatttttttgtttaaactcgtctgcgaataaaatgatcttttgaagttgtgttttttgaaacaaaatttcaatggaaaaagcagaaaagagggaaattctcgattttttctttttaaaaaatcgtctgcgagaaaatttccatttttctctgaactttgagccgcaagtttcgaaattgtcattattggtttgctgcacaaaatttcaaatttttaaaattttaatattgggtatttaaaaggtttatttatttatttattttggcgaataattataggcttcgaactatggaggaaccttaaaatttgaaattgtcattattggtcgtgtacattgttgtaggatttgatagttgggtgtgttccaggtactttcagttgccaaagcattatcaatacaggc

SEQ ID NO: 99907 - DNA, 878 bp, Vitis vinifera
  Intron number 2 from transcript GSVIVT01038607001 (locus G SVIVG01038607001) derived from phytozome v7.0 (chr-ID chr1 6; pos 21532779 to 21533656)
gtgtgaaaattgagctccttggtcagataggtacatttttgttcaatgctttcaatttagtatgatgcgtgtcaaaaggaagaattaaacactgtattgcatttccttgttcctatagttttgcgattcaagcgaatgtgaaggttgaaaattttgttttaggtactggtaaatgtgtcaaagtatttaacatagttgcatacttgcacatggttattctaccatattgtgtatggttaactgttatcatcctaatcaggttaatcctggatttcgggttgttctgttacacatggttttacactctgctttagatatattatcttcaacctttttaactaagaaatggatatttatttgtttattttttgatgggtaaatttttgtccccagtgggacttgaacctagaacctctcgcaaaaccctccacaaccctttatcaccttttatttttttatttttgtttttgatagatcataaccctttatcacttgagtcagacatcaagggcaataaatgaatatctaatcctctttagatatttgactttcatttaatatcttcattaattttagtcaaaagggacatgcttgaaaccattcactatcctctgtaagcttgttaacacttggattttttagttcatttaacttggatgctagctaatatttgtgttagctggtactgatggaagtgtctactataattatttactgttttttattctttggcattttcattctttgttcttctccttttctgaataaaccttgtcttgctctgataaaaaaataaataaatcttgtctctcagtttggtggaactgctgtttcttgtttttcaaacattaatgaaaacttcgtttcactttgcagag

SEQ ID NO: 99908 - DNA, 941 bp, Vitis vinifera
  Intron number 2 from transcript GSVIVT01036519001 (locus G SVIVG01036519001) derived from phytozome v7.0 (chr-ID chr1 4; pos 23003682 to 23004622 reverse strand)
ggaagtcaactgggaaggtatgaactttgggatttggtatatgtagttttgtgctttgtttggttcctgagaaacgcagggaaaggaaagaagttttggttttgaatatttttcagtttgatggctgtgaaagtggacgaaaaaggaactccgggggtgttaggccgcagaaataaaattgggaattcaaaaacatttttattttagactgttaccaaaaatttttggaaaaagtttctcatttttaggaaggaaaacagtttttggagaacatgttaccaaacagaatatctttgtcattttcattttttcgattttgaaaacagaaaatggttcttgtttctgctttcaaacaatttcttctaaagaatttattttgttttggaagtgaaatctattggaatatatgaaattttttatttcaaccatttgttcccactacccagattattcattcggtggggactagccttctcttatcttggagaatagttgtacaaaattcatggaaaatggaatcttattagcctcagtaggatggaggtttttcttcttttgagtaccaaatgatgaaaaggttcactactttcattggtttcgccttttgattttgccccattccttagtgaacaaatgctgcttgtgatttacattattcaggacctatgggaacaaaatctccactcaattcgactggacttggtttaaattttttctctttttttttattattttttatttcttacagaaattaaaggagcataatacataatattcagattttcctgccttctttcctttcctccattttcttggcaaacaaaatgatggttagtataaacaatagaagttatagttctaaattagatagaagattactaaattatctgaatttcctttttgaagccgagtgagcataacacttacgctgacgtagaagc

SEQ ID NO: 99909 - DNA, 896 bp, Vitis vinifera
  Intron number 1 from transcript GSVIVT01034125001 (locus G SVIVG01034125001) derived from phytozome v7.0 (chr-ID chr8 ; pos 14998974 to 14999869)
agaacaaccccatcaatcaacgatactcctcccaggtaagtttcttttccctctctcctgtttttatttatttattataatatgagatttaaggagcgaaagagctccgggtgatgaaactgtgagtctgtggccgcataaaaatatcccgcacagggtgatgtttattgtcatgaaaatgccctttcctccaaaatgactcatctttccctttcatttcaaattcaaacaacaaaaaagcccaaaggaccactgctgaaggacaaaacctacctacccagagaagagcccacaaattgctggcccatgagccctagatcaagatacagtttcataataagaagacggactaccaactccaaaagttcacacgcagtgaattctctgcaccaaaatgatgaaggttatttatactattacaaaaatggaaaacacatttaaaactttcttttctgattcaattttccctttttatttttcctaatcaagctttgggggagattagattagtcaccagtcaaagacacagctataattcatattattcttaaaaaccattgaaagttggccaacccccatcaacaaggcttgcttgcacgcataaaatgcttttaacaatatgcattgcgtgcccataagagaggcctttttcgttttgggttgtgttgtacatgtatcaactgtatatgttccttcacatttgaccattttctcattcctttgaggttggccaatccaactcatggtggcttcagtggatcagtaagctttaaaacataaaaggggctggggcattggaaaacagcccctagattaccagcatgatacatggttaattaacttgttccctaaataatccagggtcagtgggccatccatctggagtagaggtagca

SEQ ID NO: 99910 - DNA, 622 bp, Vitis vinifera
  Intron number 1 from transcript GSVIVT01033753001 (locus G SVIVG01033753001) derived from phytozome v7.0 (chr-ID chr8 ; pos 18099675 to 18100296 reverse strand)
aaatttcagataaggacttgaacatcatcattctggtaagtcgtcaactcacattcttcttgttactatctggaattaataaaaatagtaatttcatatatattttaaatacctcaaaatatcaaaagttaattttttttcttactttatataattaaaattttaaatattttaagatactaaaatttattatattttaatgataaaataaaatatattttatttactctagaattaggagagaaaatggtaaaaataataataataataataattatattttatttttccatatgaacaattttgtagattgattgtgagtactattcttagattatgctaaattttgactctagttgaaatgctttaagtatgaaatacttttgctaatagtttttccattaaaaaaatttttagataaaattttaaaaataaataaataaataaataaaggggaagagagaagaagcaaagaagacaaaggctaaaaatttgtaactttgtttattaagacaccatcgattagaaaaaataataacttacaaaaccaacatttgaaaaaccgtttgatgcaaataaaaaatgagaatgacataaagggctattggtgcaggaaatattc

SEQ ID NO: 99911 - DNA, 553 bp, Vitis vinifera
  Intron number 1 from transcript GSVIVT01032695001 (locus G SVIVG01032695001) derived from phytozome v7.0 (chr-ID chr1 3; pos 1453904 to 1454456)
atttgaggataatccccattccccacaatgtcatccactaataattttacattcctctattcatgattaattttatattgatgttttatcaaattttctataggatctttgtggggaatctttggtatttgattgatatttgcagaagaacaaaataataatctgttcatatgaacattcaacaatgaaactgtacatgatgaaccacgaatcataaggtgggttggtttgtttattttttctggacaaatgaattgaaaattttcttcaatgcactaaccaggaatttttgaactgcgattcagctgtttccctgaagctcttcacctttatcaaacagaaatgagtgcagaaaaatcccaaattgctgctaactctgctagtcttgagaagataacagcaaggtccacaattcgcctcctttccctgaatcaccaccccccacagttttgtgttttcctcatcatcatcatcttcatcctcattgttgagctcttccaccagcatgatgccttcaggcgattgcgcctcgccgatcttccaattcgattcg

SEQ ID NO: 99912 - DNA, 1060 bp, Vitis vinifera
  Intron number 1 from transcript GSVIVT01034739001 (locus G SVIVG01034739001) derived from phytozome v7.0 (chr-ID chr1 3; pos 8797563 to 8798622 reverse strand)
aagaagaaacaaggcgcttggcacaaatttgggaagtaagtttaagcaacaacccattcaccatcaacacttcctagctaactaaataacagggttatgctaaatcacccaaatacactttacaaatcaatgctacaaatacatacaggcatatttactttcatatgatagtcttggtttattgcctaccaatttaagctttttgggaggttacaagtaatccattcattttaaaagaaagtatttttttccaactaccaaaaaaacatttcaatcaagaggcaaaagagtgccattaggttgaccattgtaactaattccccagctttattctacataaaagagaaagatgactccccaacaaccaattatgttatggttttacatggaaagtaatttatgtgcacatgcaaccacatgcaaatttaaatggtccattattgaaaacctcaaaagcatcaacatttgataatagttttcacaagacaaaaaagactacatgttccagcttagcttgtcggtagggcacacattagggtttttgggaaaccaaacacatcttaccattccatctatactagaaattgagagcagagtcaacactagagatcattttttggagagactaaattggaaaccttaggaaccaacatagataaagctcagtgagtgtagaaagtctgccaaaaattgcaagaattaatttaaatagggggatgacaacacatatatctaagaatagctctaagcattaatttgagaattacatgtgtgcaattcatagctaatgcaatgttcacacttcaaaacattagaagcttcacacattgaagagttgcaggctaaagcatcagattcagttgggttaaaaaaaaaaagtgaaatacaatttgttgcatcatcagaactagagaaaatttggacagtgcgactgtttgttattttcccttcttataaatgcaaatttgattgtaaactgctaataacaaaatcattgacttgatatttcttatgcaatctattaggaacttgaagtgttggcagatcctttgaggaagga

SEQ ID NO: 99913 - DNA, 359 bp, Vitis vinifera
  Intron number 2 from transcript GSVIVT01037913001 (locus G SVIVG01037913001) derived from phytozome v7.0 (chr-ID chr3 ; pos 6392545 to 6392903)
acacaacagagcacaaacgtgcaggtaaatgctttttgatattatttattatgtttcatgaacgttctagtcttttgatttttttttttatttattattctttgaattgaaacataggaggcaaaatgtataaattatagtagctgtaatgcacagactgcgcgtgctattgatttatagtagttaaatatttccgccacgagccaagaactttgtcttctcctcaaatatgttgtgccaggagtaattactggtagaatttaagagaaaattgcagtttgcttctgatgaagttattctattgacaaacttgaatcatgttcaaattgtgctttatgcagttgctgaattttgtggaa

SEQ ID NO: 99914 - DNA, 935 bp, Vitis vinifera
  Intron number 2 from transcript GSVIVT01031264001 (locus G SVIVG01031264001) derived from phytozome v7.0 (chr-ID chr1 4; pos 694247 to 695181)
ggaactgggttccgccattggaagaagaggtatagaagttgatctacggtggttgtttttgggtttgctttgattttctttctttatattgagaatatcaaaggaatgtcagttctgttgtttggttgccatgaaaaataaattattacgtgcattaggaaaaaagttttataagtgttgaaacttcaagaaaactagggcaagttcaaggaaatttttagagcaatgctgttcactcctatgtgataatacccttgatttttcggtttcctgaaaattggtgttgcatttaaggaatgtcagttctgttgtttggttgccatggaaaataagaagaaaaataaattattaagcacatcaaagttttataagtgttgaaactttaagaaaactagggcaagttcaaggaaaattttagagcaatgttgttcactccaatgtgataatacccttgatttttcagtttccgaaaggcggtgatgcatttaagggatcactgataagacggttacctagaatttccttttgaaagaaatgatgaagaaactgtagtgagaattgaaattatatacattatttaccttgtagtgacagtgctttatgtacatgattacaaaactatcttaagttctttgtggaaagcttatggtatctctctctggtggagactttttcagtttgagaaaaaagaaacaagttgaagatgttccaattgtaaaggagtaaggaaggatatttcaacaaagaaaatggcctgaatgtaaaaacatgaatacctctttttgaatcaaatggttcttcataatcatctgctattctgtatattttatcccttgcttttctttcctttgtgctgttgccatgcttaatttaagcacacagcatgttaaaatttggactgcagaaagttaaaacagaagagaagtcagcagttg

SEQ ID NO: 99915 - DNA, 811 bp, Vitis vinifera
  Intron number 1 from transcript GSVIVT01036961001 (locus G SVIVG01036961001) derived from phytozome v7.0 (chr-ID chr3 ; pos 9507395 to 9508205 reverse strand)
cggatttcgctgccggtaaagttttttttaatatggactaagatatgttaaattttatctctaaaaatcattaagagaagattaatactctgtttggaataaagaaagaattgaaacgaaaagaaacttgtgcataatttgagcatgaattcacctgaatggtaaggaagttgaaatttctagtgttaatttgaaatatatcaactcttgccagagtttgaacatatattcaaatatcttcatgtcaagttttgaacactgggatttgcgaatttcaatttggctgttttccttttcctccaaattattcatgtgttgggatattgtgaggtttaggataattatttggaaataaattattcatttattgggatattgtgaagtttaggataatctcatcacactgcagacaatgatttttgtatgaaattataaaaaccattagcaaaaaattgacaccctttttaaaacccaaagcctgaaagggagaaatgtttgacactgcaaagagtttcaacttgaatgaatccagacaaatttggaaaaaaatttagtctttgtttgaatttcaacttaattgtatcatacctgtgtgggatttagatctgtatgcaaatcccttcaaatcttcccgatttccttccattatggattttaaaggttcaaacattagaattggcaaatttcaattgaattatttctgaacattgtaatattttagtcaaacatttcaggaaatgagaatactacatgattgacctaatattgctgcattgattattcattttgtttgttcctctgtttttgtagc

SEQ ID NO: 99916 - DNA, 594 bp, Vitis vinifera
  Intron number 3 from transcript GSVIVT01036799001 (locus G SVIVG01036799001) derived from phytozome v7.0 (chr-ID chr1 9; pos 22401164 to 22401757)
ctgaaaacctgtgtgggaaagtggacttcaagcacgttcaattcacatatccctcatttccagagacaataattgtaatgcctaaaacccaatttaagggtaaaatagtaatttaaaaattattaattaattaaagtaatttaataagggtaaaaaggtcttttcgtatttaaaactcctagatataaattagatttttcctatcttctctatttagaaaacccttttacacagagattatgaatattagagagcatagggcagaagatttggaggtttagggtttgaagatcaatttttcaagtaagatttttaatccttaaattaatattttatattctttaattagttttgaatactttagatattatttgggatatcttgattttgattagagttcgtttaattaatttataggtcaaaaagattaaaaatttatgaacatagtttgatttattaatggagatcgataaattttgattactcaaatgaataaatctagattaaaaaaacaattatatagtttcggatgtgaaaattacataaaatttgtgagtatgggagttaaaagttttgactttagagaggaaaaaa

SEQ ID NO: 99917 - DNA, 555 bp, Vitis vinifera
  Intron number 1 from transcript GSVIVT01032100001 (locus G SVIVG01032100001) derived from phytozome v7.0 (chr-ID chr1 3; pos 22715821 to 22716375 reverse strand)
aaaaaaggcatgatatctatcacattatagatgaaattgtcctatatttgcccatggattttcactttttatccactattctatgtattagtctgccatttaatatgcctttttgataggcaaagtctgttgttttaacactatatcaagagcaggatcattttgaataacaaatccataggaagatattccctaattatgagattttccttcatttgtttgtgttttgttaaaatggggatgctcctgtgttaaggattcatgaggacaccctgttgcttcatttgggtcgctaatttcgagtttggcttcatacaagcacaaacaatgtaacttgaggttgagacagaggcacagtgtgtcacaatggatcatatgaacatgttttgattttgcgtttctgtctgatccttacttcatttcttaacatgttttgattttttgttcttatagaaattatggtttttatgaagctgtctttctaatttgtatgttttgtgtggttactttattcaattgtttgttactatgtaaggttcatcctttctgaggaag

SEQ ID NO: 99918 - DNA, 944 bp, Vitis vinifera
  Intron number 1 from transcript GSVIVT01031670001 (locus G SVIVG01031670001) derived from phytozome v7.0 (chr-ID chr5 ; pos 19935908 to 19936851 reverse strand)
atcagttaaaggccgccgaagagtctctcaatcaggtataagctttttttaatctgatttgggttttttttttttttttttctttctgagattccatggttggttgttccttgggcttgatcggaattgtaatccgattcttcttcgtctttgtgctgtttttgattgtttctttggttgtggaagctggttttgataagatgatttggatttcatttgttgctgaggatgagctgcagcttcagaattcgattagtgaatgctggagacagaattgggatttcggggaaatatatatttttttaaagccgaggaaactgaattggattttatcttttttggggctgctaaacgattgttagaaagctcggttgagtggtttttttgtttttcttccattttctcaaaagaagagaaatctggttttaaaaattataactttctcttgttttccaacatttttctattatcaaggggtgcttccaattgaatgttggaaaccattacggaaagcaaaaaagaaaagaaggaatctcagatgttattctttggtttatgacgataaataaataccaaagaaaaattaaatataatgaaattcatatgtaaacttatacatttccagattattcatttcctatttaaaaaggggataaaatagctggacaattgaaaaaaaatgttattggggtcgaacttgattctagtgttttttctttagcctttttgcttccctttctctgccctctgagatccaaaccagggctaaggaaacaatctgatggaagttttagtgcgaatcatgtggaacgggagccaaagttgtaaaccaaagctttgtagagtgttttgcgcttatagaatgtgcttgccttattgtgtcttttgttttcttgtgttgttttgcagttccagtatactccacagcatctggtgaggttatt

SEQ ID NO: 99919 - DNA, 529 bp, Vitis vinifera
  Intron number 1 from transcript GSVIVT01034474001 (locus G SVIVG01034474001) derived from phytozome v7.0 (chr-ID chr1 8; pos 20741592 to 20742120)
agttgaaataagtgtgattatccatggaagatcttcaataatttttctgttcattttagttaatgatatcttctagtaaattgaaatgagttaaggagataattgttcttttgaattaattttgaggagtgttgaagcatttgcatgtgacttgcatttataaattgttaggagagtgttggtgcatacatgcttgtagattttatgctttattaaaaatttgttggtagagaagtttattgacattgagaaattctaaggttagacaatctttgttaggatttttattttatttttattttattattattattattattattattattattattattattattattattattattattattattgttgttgttgttattattattattattattattattattattattattattttgttgttcaacaacatctattcaccccctccccttctttaggtgtagtccattattgagattcactttccaggtgcatcaaagacttgataggatacttcaaaatatcattg

SEQ ID NO: 99920 - DNA, 839 bp, Vitis vinifera
  Intron number 1 from transcript GSVIVT01035344001 (locus G SVIVG01035344001) derived from phytozome v7.0 (chr-ID chr4 ; pos 653646 to 654484)
gccatatctgggcactactgcctgttgccattaaggttccactcctttcttctgtttcttcatatgctaggatttatcgaatcactgaaaaaattagggttcagtcgtcactttctaatcacatagtaccatctgttcggttgctgagagaattgagaaaaagaaaagatagttttctttgtgccgtgtcctggagaaatagtaatctgaaatcaaaattttgattttcttctcacattttctcagacacccaaacggagccgggatggacgattgactggtttttttggtgggcggtttattcttctgcgttgggcgcactgttcaattataaaattgccaagtgacctgattgttttgaaggcaaattctattgaattatataacgaatgctaggtttttatatatataaacgcgtgtttgtgtgtgtggaaggattttcttgttgaatgtgtgattgttttggttgctggatatgttctactaaaaattgtattttatgagggttttggcctaaatctggaaccattgataatggcaaccattccctgtaatgtcctgatgttatgctgtcaatttgaatttgtttctgcttttagagaattcttttgagcaatataatatagttatttctgatgtacatctctatttcacccatctaaaagcgcctaaataggaatttttttttttaatttttaatttaaattttagatattgttagcttctatgatttgtacattgcaggtgtttcataaatttggatctctcttttttatttgtaattatgtttcagtctataatttatatattccaaatctttgcagtgtgggtgtttcttc

SEQ ID NO: 99921 - DNA, 775 bp, Vitis vinifera
  Intron number 2 from transcript GSVIVT01035344001 (locus G SVIVG01035344001) derived from phytozome v7.0 (chr-ID chr4 ; pos 654728 to 655502)
agtggttcagtgccgaaagtcactgacataaacaggttctattttgtcaaagattgtcatgttttatttgtaggaaaggaaaaagcttttgcttgttattagtattatattctctgcttgcaaccaattacttatcatgcaggaaacctgaatttacacattccctcttgtggattttagttgaaaatctaattaagtatagtgcatttagtcaattttttaaagtaaagtaatatttgtgttgagttcacgaataagatacaaagaagagaaggtagaaagttgaagtgaagtcaaaacttgaaatcgaacttagcataagccttatgccaaccatatctcatcattttactacatagttcataaggccatatttaatgtcatgggtcacatgtctttttttcgtagataagatatacataacttgtgccatgttttatggtagactatcacatcttttctcataacctctatccacattctttttggcctctggcccttgttgtatcccctttcaatttaagacagatcactcaattctggtagcttgtggtctttgttccatattatcaaatcatctctactgaatctttctcatctagtccttattattacccatagaagtcaaagattctaatgaactactctatctttccctcccatcagtaatttcaaatttgaaatatttactctttctattgagaagggaaagggaacttgtgtgtggttctgagtttcttctaaattatgttctttgcaggtttgttttagatac

SEQ ID NO: 99922 - DNA, 992 bp, Vitis vinifera
  Intron number 1 from transcript GSVIVT01033827001 (locus G SVIVG01033827001) derived from phytozome v7.0 (chr-ID chr8 ; pos 17416917 to 17417908)
ctcctctctgctctcatcctcctccctgtatgctctctctttcttttattatttatttatttgatctgcgagtgaaattgttcaacgttccgatgtttgattgaatgaacgttgatggctctgcttgcagcttctctgccaacatatttacagatgcctattgatacttgaactctatttagaagattattttagtgctatcaaataatcagatatttgtttatcatgcccctaatggttaggtactgagtttgatattttgtgtttatgttcttccatgtagtgtgaattagaattttatgctgaaatttgggggttgagtggcccattcctctcaagaggccattatttggctttgaataattgcagcaatttgattgaatatctgttcatgtatggacaacaatagtgtaaaagtgtttgtgagctgatgttaaatgtgtggtagattgcttttttttttttttgagctggattgtacttatttaaacatgatttaaaccattgagggcccattctgtctaaagcggacaatatctacatggaaaatagtggattgttacaacttgctttttacatctcactttgaaattcagatgcattaatttctctaatattttgtttgtttctcaactttctagtttgaatgcatggccaactgttgtttatgttgacctagaggatttgattacatgttctgggaagctaccttctttagcctttaactattcaattcccttgccatgaatgatataagtattgctgtagagttttatacaagagccaaatttaatcatcatgacaccccccaccttcattctccatttcactggagtcatagtaatgtacacatctcaactttgtttaagtttcttgctaatctgcctgtgttttgtttatatttatggtttacgtataaatgtactggcatctgtgttaataatttccatggcaacagcttaccttaatttcatcatatctgataatgctag

SEQ ID NO: 99923 - DNA, 1035 bp, Vitis vinifera
  Intron number 1 from transcript GSVIVT01031236001 (locus G SVIVG01031236001) derived from phytozome v7.0 (chr-ID chr1 4; pos 969282 to 970316)
tgccgaccagtccacgacccgaagactgtctaacggttagattctcgttgttttctatgtctaggctccgtttggtttccgagaaaactgccgcaagaaaaaagcggttaaaagaaaagggaagggaaagaaagtttaatgtgccaaaggccagatggcgaacaattaaaatctaaaatttcaaaatttggttgattttcttttaatttacacttcagtggaatcagtcatagggtagaaaaaagttgcatttgttaataattgttggcaatgggttgaattggccggttgatgcaattagtgattgagttcaagttttgttcttttgattgtttgcttgcggagtttgggaaattgaaaggaagtgtttggggtttgttttaatgttctggttggctgttgagaaaatcgagaaggaaaagggaataggattttagacactgttgagtgttttttcgtttttactgagaaaagaggaatttgacttacaagatgaagcgtttgagttaataggataagacaaatgttaactttgttaataattattaataagtggttgaatctatcatttcacacatacattaattggattcaaatttgttctcttgatgatctgtttgtttactgaggaatttttaaaatgaaagtaaagcaagcttttgaattttattttttgttgtggttcggtttttcactataatattgattgcatcggtttttttacgcttatcctaaaatgcacaaatcgattgcattattggaaatctcattcatgatgtgcattcaaaacactggtggaagttgcaaaattaccccttttttttctatgattatctgagtaccttttctagtcatttatagctaccgtgactaagctaatgttagtgttcacaaattctaatcatgtgggctgtgggaggattatcaattgctttcttagcgacattatcggttgctcatgtatttctttacatataacatgctcatttcccctgggcaggttttagcattgccattgccacatagaccgctgtt

SEQ ID NO: 99924 - DNA, 638 bp, Vitis vinifera
  Intron number 1 from transcript GSVIVT01033845001 (locus G SVIVG01033845001) derived from phytozome v7.0 (chr-ID chr8 ; pos 17296617 to 17297254 reverse strand)
tcggcggccgaagtcgttcaagattctgcagacaggttagttctctttcctatccgtttgtttgctgagaaagccaaggaaaagttaagaaaagaaagaaagtgaaggttttgagtcttgtttgttatcttgggttccaaaacataagatgaagaactcaagttactcaaatgagctgattatttgtactaggttcatttcggtgaagttctgttttattttttaatgaatgtgtcgtaaaaatgaatattcacaacttcatttcattttgggccttcgattttgtgttatgaaaggtactgggttgtgggcttagtgctaatcatgtcgtcagcccctcggcatggagcacttatttgatacaaaattatgcttcctccgtataacgccctgtgtttggatgctgagaatatgtgggatcagaattttgcatgttacattcttgttaaattggacctggtgaaactatggattccatttaacttaaattcatgcggctctttaatcctaccattttttttttctttatctcgtttagggtaatggaaattggtttggttggctatatttggaatgttttatgaataccctatattagaaatgaatccaaaaattaagatcttggcttaatatctagg

SEQ ID NO: 99925 - DNA, 705 bp, Vitis vinifera
  Intron number 1 from transcript GSVIVT01035621001 (locus G SVIVG01035621001) derived from phytozome v7.0 (chr-ID chr4 ; pos 2757544 to 2758248)
agttcgtctccttatcaccctgactggtattaattcaaaagaaactgattcagatctgtctggcagctgagaaaattgaggaaaaggacagaaaacatagaacattttgaattttatgttttgccttttttggtttggtttcaaagaaatgaaaaactaacgcgaaaaaagagaaaagaaagaaaatagcggttctaggctaaacagaggaaaatatttccttttattttcctacatttatttgcaactaaacagaggatttaagtttgtgatttgatctttcctgtttgttttatgaaaactataggttatgttacggctgactttgattctcagacatcggtttaggagagggtagggaaacagttatgtagaccttacaattagaaaaggagggtaaaggaatgtgcttagaattgctagcagatacgaaaactagggtaaaattttgaattttgatgtcttgaagggtttaattagagtttctcaacatggaaagcaagaggtgtagctagggttttgaaacatacaaaaaatgtaatatgatcactgttttgattaaacttagtgaaatgtagtttagtcttgaaattggagggtgttaagatcgggcaagtgaaggcataagtttggtggctgttacaatttcttggatggatgcaatttacttatttgtattgtatcacacattaattaggtgggagt

SEQ ID NO: 99926 - DNA, 456 bp, Vitis vinifera
  Intron number 1 from transcript GSVIVT01035003001 (locus G SVIVG01035003001) derived from phytozome v7.0 (chr-ID chr5 ; pos 825788 to 826243 reverse strand)
tagacgcttctggtaccgatctctatgtggctccgtgtatttttatgttatttttgtttattaatttgtttagatttctagtttttacttttgtttggttgccgagaaagcggagggaaaggaaagaaaatgagatttgaaatcttaggtttttttttttctcggtccgatgtttttctgttgcgattttgctgctgattgattgccgacgaaattgaggaaaaggaggggaaattttgagtgagttggttttctggtgtttttgtttcttgaaaatgagaagctgaactgacgagcagtggaggttttctttggccctaagtaatgaaaaatctaagattcgaagttttgatttctctccgtttcctgcgttttctcggcgattaaatgaagttttcttcttcttgtgattttgttgacggtttactgtgcttttaattttaacagtgttggacg

SEQ ID NO: 99927 - DNA, 940 bp, Vitis vinifera
  Intron number 3 from transcript GSVIVT01031905001 (locus G SVIVG01031905001) derived from phytozome v7.0 (chr-ID chr3 ; pos 5288620 to 5289559 reverse strand)
cagaaacgattactatccaagggctataaaggtgtgtggccagatttcctgcaaaatatctccatcctttttttgtctccttatccacttatgaagagttcttgattctatactatgagtgatcccggccctaaagcttcagatgatcaagttgttaaatttcctttgaaaatttcctaactgttttagtaattatataaaattgataatgttatagaacttttgattgttaatgtttgatagacatgtctcgtagggaaggaaattatgtggagacctttgtggcatatgtttgtgttgattgtcaaaaccgtgatacctgaaaattttgttccattagatgtggtatttcatatataaaacaaagtttgatattgagtttcttacgccttttggattgcatcagtgcaacattgcaatatatagttaaatgagagggtaaaagtggttgaaatgatgcctcacctactatgaaatagcattttatgaggcaaactggaagtcaatccgtttcatggtaaattttgatacatattccatagggaaatggagaaaagggaatccaaaaccgtctcagaagaaaccatcggctgcagtacttagagatcaaactatagaatccagtctaaaatcatattggtagacacccctagtacttcactttaacgaggtgccaacttgatatttgaccacctacctcaaaataactggtcaatctctgtgttcagaaaaggaaacaatagacatgttgaattgattcaaagtttcacatttctatgcttgtggaaaacaaaccaaaaaaataaataaaattatatcattttcccttgggggactaaaattatttgtaagaaaaaaaagctctgctttaaccttatctttgttcattggtttttccctgtcacctctatcatcagaaatcaaagtgctggaagctgac

SEQ ID NO: 99928 - DNA, 549 bp, Vitis vinifera
  Intron number 2 from transcript GSVIVT01031905001 (locus G SVIVG01031905001) derived from phytozome v7.0 (chr-ID chr3 ; pos 5289633 to 5290181 reverse strand)
atctcattcaaccccatctccaacccaattattctgtacgtggggtttttgatagctttattctttagtagccagaaaatgtatttacgtttagagacatcaagtggatgtttagaggaggtttggtttcactttggaagaaacccgggtttagacttacaacaaaagcttgaaattaaaaaatggttaagaattttgacaaaatgttgtttctggaaatacttctgcaatgaacttctttcaaatctatagggtgcagccccttttttgttcacaccttttattactgtttctgtttgcccatcaaagaaaaaaggaaaagaaagaacttccttcttccacattttcattttctttgttttttagagactcatactttttcacgacgtggccagaatttagtactgctgattttcatgtacagtttacttgtatttgatcaaaatctggcaaaacagttaatggtggtaatgtataacagtctagtatagatgacatgcagctttaactgcaggtcttggagattggttgtgggaattctcagttgtc

SEQ ID NO: 99929 - DNA, 588 bp, Vitis vinifera
  Intron number 3 from transcript GSVIVT01033305001 (locus G SVIVG01033305001) derived from phytozome v7.0 (chr-ID chr8 ; pos 21660671 to 21661258)
ggtactctggagtaagtgcaaatcctccaaacactatctttactctttttctttttcgtcgtgaaatagtatccatgttttacctcacacaaggctacagtgaatctaggaagtaaggtagataatcaagcctccgtggtgaatgtgtatgaattttaggaatcaaagatcacttcctttttggtttggaagatctaagatgatgattcaacagtatgtaattcctcaccattttcaatggtgaaatatttattgatctcaattgtatcaagaagaactgagtgaagaaaatgtcaatttgtacaaaaacaaaagctaaaacatgggtacagacaacgtaacattgctaagtctaaattaattaaatttgtgagttaggggaattccccaattggcggttaatggatagagaatcaaatctctggatactgttcagagagcagggtagtctcaccttaagcatgatcttcatcttataatttcagattttgttgacattggctaggacttatataccatctggttggtctgcaaatatgtatgtatcataattttggcttctgattcctcaacagtggtctacggttc

SEQ ID NO: 99930 - DNA, 699 bp, Vitis vinifera
  Intron number 2 from transcript GSVIVT01037714001 (locus G SVIVG01037714001) derived from phytozome v7.0 (chr-ID chr1 9; pos 7199557 to 7200255)
gtgaggaagaactacacggaacagctcaatgtgagtttttctagctctatcaggtgtgttttggtcgggaagatagatgaagacccggagttttgcatatttatatattttctcttcagatttcttgggaaccaaacagaggagaatagagtattttttttgtcatcattaggtcaaatttgaaatgataatattaatcaataaaacttgttttcattaatagaaattttgaataaacaattagacattccatctcatagatgggataaacaagaagaaataaaaaatttggaaagcagaggaaagaaaatcccatctccattaccagagaggggaaaagaaattaccaacaattaatatttgaaataaaaattccatttgatgttaatggctgaaaagtaagacaatgattaacactaaacagactgaaaaagtcgttagtagaagctatcatttaactcgttagttgtcatccatgagagtcctctttgcttctagtaatttcatggaagattttctttctgtatattaaaagaagtaaaaagttaagcccagcttctagctcatttggaatccatcttgatggttgtacttgtccatgtgatacttctcaggagctgggctccagccatatcctaatgagacggtgaatatgaaacagatcataatcacatcttctcttatttcatccagagatca

SEQ ID NO: 99931 - DNA, 691 bp, Vitis vinifera
  Intron number 1 from transcript GSVIVT01031462001 (locus G SVIVG01031462001) derived from phytozome v7.0 (chr-ID chr6 ; pos 18277210 to 18277900)
tgaaggcgtcgtcaccttgagtcaagaggacggttagttctttgattttctgattgattctgtgaccacgtggggaaatgaatgaaaagttaggagttttgtaatgggttgactatgcttcatttcctgcgtccgagcaattggatgaaatttaatttttttttggtttcctataaaatgtaggataagagatgaaaatcgggaataatttctttccattttctcgatgctgtgtttgggttgccgagaaaatgttggaaaggaaatggaaatttgaaatcttgtaacagtttctggctgaagtaggtgttctgaagttccaagtgtttattcaatttcctacaatgcgtcaccaaccaatcaaagcgtaattgcttttgatggtgcttttggttgctgagagaatgtaggaagagaaaagaattgtataggaattaagtccgagctgtttttttttatttctcacttaagaaatcagaaatctctctactgagcttaagacaagtgttcggctcaattgcagtaactcatatctgtatggaaaccaaaaagacgcaggattcaaattcagaatcgtatttttacacataattctcccgtttgcctggaaactaaatgaaaggctgatggtggtatgcattttttactccatataggcccaacgactgtctctgttcggattaccgggctt

SEQ ID NO: 99932 - DNA, 305 bp, Vitis vinifera
  Intron number 1 from transcript GSVIVT01038660001 (locus G SVIVG01038660001) derived from phytozome v7.0 (chr-ID chr1 6; pos 21144727 to 21145031)
ccgtctctcgttgggtctctgccgttgctctactggtattcgctttcgttttctcatcaattttcccattgaattttagcttatctcatgcttaatcctctgattaattccatttactattgttttatcgcgattatactgggtttttgtttgtctttatgctgtttgattactgttcttcttgatcgttttttgctattttcattttgagctatgataatcaattcaatggccttccttttgatgtaaatttttgtgggttttgatcagttgactcgattatcaggtagaaaaaaaggggggaa

SEQ ID NO: 99933 - DNA, 911 bp, Vitis vinifera
  Intron number 1 from transcript GSVIVT01038610001 (locus G SVIVG01038610001) derived from phytozome v7.0 (chr-ID chr1 6; pos 21519669 to 21520579)
aggttatgccagtttttttttttttttttttaatgtgtttttgcttgaataattttttcaattctttctgatattggttgcaaaggaaacatgggttttgattttcgtgacctaattcgtattggcatttgttttcttttctgagattgatatttgagctggggtttggattttggttcttgttgataatcacttgctgtttgttaaacctgaattcttgaggagaaggaatctaattaattgacataaaagtaaaggaatgggatgggattttcttgattgattgaaaaaaaagaagtgtcttaattgattgaaaaaagaagaagtgtttatatatagttcattgttcattttggggattgatatttgaactagggtttggtgttcgcttctttcttctgattcctttatgtttggagctgaattcttgaggaaattgaatttgattaatggtaatgaaatataaggacttgggtttcaatttctttctttggtggtattaataattataaaataatatttgatttgattttcacagtctaaattgtaacagttatttgtttctttggctactgatatcagttcttgctcaaccacttaatttttgcttggaactgcatttgtgagcaaaatggatttgattaatggaaacgaaagttaaggaattgggtggaattaggtttcattttctttctcttgtttggaaataggatgaatataaattaaatttgaagggatctctaatcatctatttaaattttattagaacatgcaatttgcattgtcttaaatttctatatgaagaattttttatcatccttataaggtagaaaatttaagttatagacaatgaaggttcagaaatataattgttgcttgtgtgtttgatctgtgttttttcaattatcagg

SEQ ID NO: 99934 - DNA, 793 bp, Vitis vinifera
  Intron number 1 from transcript GSVIVT01031980001 (locus G SVIVG01031980001) derived from phytozome v7.0 (chr-ID chr3 ; pos 5886113 to 5886905)
ggattcccaattggattttcaaggactatcttgaggtaggcttcgcttctcggttttgctaccatgcatttaacctttctggcgcgtgagtttcgtcttagacaagtcccatccaaatataacattttagtaattaataaatttcattaaaatttaatattaataaatagcattttcaaaatttaattttcatatatttaaaagaaagcaataactttttttttttactattatagattttttgcatatactttagaattttaatatgatatatattgttattatatgaaataaaaaattattttgaaattatttgaaaaataattttaatattttcatttcaaattgttttttaaaaattaatttaaaattatataatgaaataaacttttcaaatcaaaattttaatttacatgggtttaatttatttattttcatcatttttaaaaaaaaatattttaaaaactaaatcactaaaagattaaaagctaaaaaaaaaaaaaaaaaacctgctaattttctttatttttttatagagccagaattaatatactaaaagggaaggttctatttagactccattcattttatttatttttttaaaaaattagatatcaaattgagatttagaaatcattttcaaaaatctgtttttattgttgattacagtaaaaagtctgtttttaaaaaatatttattataaaaatatattcttagaacatatttaaagagaggtcatacattacaagttttggaagattgtttgtgagttttgggcaatggatggcaggtg

SEQ ID NO: 99935 - DNA, 888 bp, Vitis vinifera
  Intron number 3 from transcript GSVIVT01037575001 (locus G SVIVG01037575001) derived from phytozome v7.0 (chr-ID chr6 ; pos 10837066 to 10837953 reverse strand)
aggtacatatatatatttttgggctccaaattttttacttcaattgggttttgataattgcaagccaaaaccatccagatatgtgttgattttgaaaaactattctctttcttttgtctctttttggattgaattgggtgcctgtcaattgaattggttctgatccacagatatcaaatggtttccaaaatgtattattcagaaattgcagtccattggaatctgtttcccataattttggggaaaaaatttctcacttgcaaggctttccgagaaaatcgagttttcctggagaagggaagaagtagggggattcatctggttactggttcaaactgaggatatgaaagagatgctgcgattgggtatctgactatttggtaacatcaagagctgacagtaatcagatttgggctggtctgggctcggtcatcttcatgcagcccatgtctcgtagcaacccacttatattcaattattttcttctttttctttttcctcaaaaaaaaaaaaaaaaaataataataaaagagcacacaccttttaaatcattctaaaatttaagatacatttaaaaatgcttcaggacaataattgataaaaagtgggttctgcaggttaaaatccatttcaccctagcaaactcaatatttttttctttccatttcctttttttaatttagaattttatgtggtggtgttgctattggcggtggttggtgggctgtggattattatttgttattgttgttgttattattattattattattattaattttcttttcagggtatgagcacaattatggtttcagtcctatactgatttagtttgttgcgtatgaattggaaggtggagcaaaggtacaggcagtaccaccaacaaat

SEQ ID NO: 99936 - DNA, 460 bp, Vitis vinifera
  Intron number 1 from transcript GSVIVT01037575001 (locus G SVIVG01037575001) derived from phytozome v7.0 (chr-ID chr6 ; pos 10838968 to 10839427 reverse strand)
tattttagccataattgggtactcggcctttatactctgcaacccatctttgattgatgatttcttactcctttattttaatttttaattttttaattgtttatttttaattcttttttcttttttttggggggtgatgatcgatcttttctatgtttttgtctgtcgccttttaagaggaggaagaagaagggaaaaaaaaaaaaaaaatctctttattaccatgtgaagggcatggttatgcctgtaagaatattttccacatcttcttcatcatcttcaaaagctaggctgaatttgtcggtgttttggtttctgattggaattcgtttctgatttatgggcctttgtacaaagacgtttggttaatctttaggacatatcatggattcaccatcggtttcttctctgctgcttgcttccaggatttgtgcaagcaaagccgtgtcggcgtcgactg

SEQ ID NO: 99937 - DNA, 800 bp, Vitis vinifera
  Intron number 1 from transcript GSVIVT01036156001 (locus G SVIVG01036156001) derived from phytozome v7.0 (chr-ID chr6 ; pos 20002211 to 20003010)
tctcatctctcacttgctctcttttcacactccaggtcctcattcttctctttctccattcattctcactaatttctcaaatggaaggattgagtagagtagagaggaaggaaaaactctttgggctcaaactttgttttatttccctctactcttttgttcttttccctttctaatcactccaattacatataattgtacatatagggaagaaaatatattaggatattctgtgaatttctttggaaaaatgaaattgtgaataaatgttatgtgaattcttaaacattactctaaagtataacagagaaattgacaaatatccaagataacacaaaactgagttaagatttctattgggaatcttggttcccattaatatcatcaaaatgtcactgataatatcattttctattggtcttgggtggtaagtatggaaatcgaaaacatcattaggttgcttttagttatttgtataagcgactagcagtgagaaacaaagatgatagcctaatgatgattggggagtctgaattattttgagggttgttttattagcaaggagcattggtagtccgtttgattgctttggagttgtaacagtggctattatgagatatgaaattttcttctcttttctttcccttgctattttttgtgaattaaatagaatacggaagaaagatggggaagaggagatttattttgtttagtggaaatttgatgcattcatcttgattacttttggggttgatgtggtcagagcttgatattgtatgtttatttcccagaatacataa

SEQ ID NO: 99938 - DNA, 536 bp, Vitis vinifera
  Intron number 1 from transcript GSVIVT01036976001 (locus G SVIVG01036976001) derived from phytozome v7.0 (chr-ID chr3 ; pos 9352016 to 9352551 reverse strand)
atactcaatcgacgccgtactaaacttcttctccggtagaatcctgcaaacccatcttgcatcatagtgagagtggttttgttggtgtttcaggatgattttgggtgtttccagtttctattattgcatgtgttgtatgtgttattggtgtctgggattttgtctattcgaagttcaaaggaaaaggccttttcttttctgttttggaattgatcttggtctggagattgtatgtgataattagtctaaaagttgatgtttttagttaaaaaggaagaaaaatttcaaaatccccgcatcccactttctgtttgtatttaggaaaaacgtattgctcaggggcaatacaaaatcaaccagttcatttatagtaattgcatgagcaaaatgcattggttgtacaagttgtgtacaagggttaaattccctttctgtctgaagccaatgtctccatattggtggatgaggattgattttgacatgttcttgcttatgacttctaatatgcagttggcctattctcttttactaggtga

SEQ ID NO: 99939 - DNA, 748 bp, Vitis vinifera
  Intron number 3 from transcript GSVIVT01035535001 (locus G SVIVG01035535001) derived from phytozome v7.0 (chr-ID chr4 ; pos 2099225 to 2099972 reverse strand)
agtagtggatcgaggggcagcactggacatcgcaggtcggtataaattttttattctgctccctttcttttccatgagatgcctctccatgtttagttgatcacgaatttcagaccttagttctatgacatgtggttcatgattttggcaagtttgttatttcccatgtataaggttcccactacatcatgagtcttctagcccattgatgtctggtgtgctttgctgttctatactctcatgcaaggttgagagttcaagaccaatgaatatattagtagcgtttttcttggtgggactgggaagggtgttaggtagtcattttatgtgaatatgcttgttcagaagtttttacatgaataacaagaaacataaaaggtttgtctgcaattccatttatgcatctatttgaaatgttatgggatgaagccatggctccctccactccaacattccaaatttgtcttttctccatatgttctttcgcagacctcagcctgttctaccctttctgaaacatctcctcaatttccattgtcttaatatctcttcaattaatattccgtgtagtagatgatgaatggagctatttaagttaccgcatgagaaaatatagtgctgaaactgtcatggtttttcatctgaatttttttaaaggctgtattcttttgatttattcaatgcaaaatcacttaggtctggctactgtttgtatttcacagttctcgaagacgccgttctcgcttct

SEQ ID NO: 99940 - DNA, 517 bp, Vitis vinifera
  Intron number 1 from transcript GSVIVT01034716001 (locus G SVIVG01034716001) derived from phytozome v7.0 (chr-ID chr1 3; pos 8298422 to 8298938)
aaacaataatagctccgctgattacagagtcacaggttcgttctcataagcgctgtaattcttctctaatcttcctctatacttgtcttttcattgcatgtttttaatgtctgaggctggttcatctctcactaaattttaatatttatgttgtatgttagatgattcccatttcttggaatatcatgaaagcaacctgtttgattaaatgtttctttcaactttcaacttcttgttgttgtggctatcccaatttaatgaataaattatatacacacttctgtgtttgtttggatactaaattctgaagttgagaaaactaaaaagaaaatccatttgtcctttaaatttacattttattgatattattattaatgttgttggtacatgtgttgaaatcacagaggtgtaaaactgctttgtattttaccttttcttttatttttccaaacattttggagtaatcgtgtgagtggaaggagaatctaacgtgagagcaatgcaggggttccggcag

SEQ ID NO: 99941 - DNA, 657 bp, Vitis vinifera
  Intron number 2 from transcript GSVIVT01033587001 (locus G SVIVG01033587001) derived from phytozome v7.0 (chr-ID chr8 ; pos 19499608 to 19500264)
cctgcgaggtgggcctgcagtgaagcagaccttaggtaagctcgcattttcctactcgtcatgcaagggaatcgataatttcctgggtaacaaaatttaataaattctttgaaagggaaaggaattgataaaatctcccctaaaaaccgttgtttgacttgtgtctgctcatcccaaaaatgtattatgttgcaagcttgatatgaaaggagagttaaattgttacaaataccacaaaattaaggctcatcctggatctgaaaaatattaggagaagcaatttctttggattgtaaaatgtactgaaaagaaaattaaaaaataaaaaaacctaaagtttcaaatttcttgtttgttttattataaaactatcaaagaaatttaaatataacagaaactaattcatttttattttttattttttgttttatttttctctcttgcttgacctttcaaaattccaaaaaaatcaccatgaattcaaacgtcacaactaatatataatctatgcaccaacaatttttgctactgagtgtggttccatagatgtagacttgtgaaagggaggagccgaaaggaagcccaaggaaacaggatgatccgattactgtttttgttgcaggattcaactggtgtccctaaagttcgttgttgctg

SEQ ID NO: 99942 - DNA, 390 bp, Vitis vinifera
  Intron number 2 from transcript GSVIVT01036965001 (locus G SVIVG01036965001) derived from phytozome v7.0 (chr-ID chr3 ; pos 9452770 to 9453159)
gacactggtgctgtggtattcttcttttcatcttcactaacaaatttgttgtctgtgttggaaagtgaactgaatttttttagtcaaaattgggatttgatggtatcttgccatatgtttgctgacaaattctgggaaaaataaaaaaacttgtgttttctgttttctgtttggtttcttagaaataagaagctcagcataacctaatagttctaatcccagttgaatggagttcattgttctagttttttaagattcatcttttcctatattttcttggcaaccaaatgggggaatttatcttctcttcatgattagccatgttgcaactaaaattccatcttggggttcctaggtgaggggctttttagggcaaccacagcttgagag

SEQ ID NO: 99943 - DNA, 833 bp, Vitis vinifera
  Intron number 1 from transcript GSVIVT01033846001 (locus G SVIVG01033846001) derived from phytozome v7.0 (chr-ID chr8 ; pos 17281152 to 17281984)
gtttcttggaggtagttatttctgatcctatagttttcgccctctgtttggtcgctgcgaaaatttagtaaaggaaaagcaagcacattttgatttttactttatattttagtctcgaacttctagttctttcaaagaaagaataagagaaggggatgcttaatgcttttaaatgtttatttattctcgttgatttcatttgttttccttattcaattttttttgccagaaaataacctcttatatatcttttccaaaatccatctttatctttttgcccttttccttgaaaaaaagggatcgctatttgataatccaaaaatggagtttattacttatcgctgagtctggcactctccgtgttttaaactaccaaaccaaagacacaagtttgtcctcataagctgaatgatgaatgaatttatcacatcagaagccaagtgttttcagagctacaaatgcaacactaatcattttctgaattgaaagaaacaagctttcatattttttttggacctggagaaggctgagcttgttgcgtttctcttcagtaattgtacaaaaacgttgtatagattacatttttccccaacgtcaatatttctgccaattggaagcatattctctaaaaattcataatttatagggaaaatttcgcacctgctttttagatttatattctatgatttgagaatcaaataaccaattttcacatgttagcgcttcttgtttctatagagtttgaaattgaaagatacggtttgttcattggctctttgaagttcttgatttcgtgagtgcaatcatttcaagatggtttgaacaggtttcag

SEQ ID NO: 99944 - DNA, 352 bp, Vitis vinifera
  Intron number 1 from transcript GSVIVT01031110001 (locus G SVIVG01031110001) derived from phytozome v7.0 (chr-ID chr1 4; pos 2078182 to 2078533 reverse strand)
catagtttgcttaaggagcatatcaagattgttcagtaaggttttgtacactccaattcattgttacaaaatgaaaagctactaagatctgggaagtgctactttctgatttttattgccctagctcatgtatttgattaaactctatgtattttggtgaacatgacaggttaatatgttaatactgtttgtgatctcaacatttgtttggtagtcaatactgtcagtggaattgaaaatatttctgctgaataagaataatgcacattgtgttggtgtttcttatcaaaatctaattttacactcttcaaaattagctggtgttgcaagcagagcaactagagctgcattg

SEQ ID NO: 99945 - DNA, 164 bp, Vitis vinifera
  Intron number 1 from transcript GSVIVT01036543001 (locus G SVIVG01036543001) derived from phytozome v7.0 (chr-ID chr1 4; pos 23256015 to 23256178 reverse strand)
agaagatttctcaaagactagccacttcatttcgggtttttaattaatgcccctgttttcctcacttatccatcaaatttgagttattgcttttctgttttgtttctggttctggttcaatcttctgaggttgtggtgtatgcaggtgcatctgttgtggtaga

SEQ ID NO: 99946 - DNA, 302 bp, Vitis vinifera
  Intron number 1 from transcript GSVIVT01032720001 (locus G SVIVG01032720001) derived from phytozome v7.0 (chr-ID chr1 3; pos 1277772 to 1278073)
cagtaattaactatctctccctatttcttccatgtcattcatgtttaatttccttttctcctgaaaaacaatccatatatatacaaatatggattggtggggtagaagaactataaaagatccatggatgtccagtgtagaatttggtttgttttaagctgttgtccatgaatgaaaccttaatttgattagatgaatttgagctgtacatatataagaattctaagtgaaatcattgtagttgacttggtttttgttctgtatatctgtatggaagctgaacaagacctccatcatcgttg

SEQ ID NO: 99947 - DNA, 903 bp, Vitis vinifera
  Intron number 1 from transcript GSVIVT01034756001 (locus G SVIVG01034756001) derived from phytozome v7.0 (chr-ID chr1 3; pos 9086439 to 9087341)
agcttcagaaaatcgtggattctttgaaggaacaagtattgcttctaagtcttttgattgtttgtttggtttgtggatttgggttttgtattgaatttgaatttgtgtatttgggtgctttgttttggtttgtgttgtggtgcctgcttgtttggtggggaaacagaggaaagtaatgctggtttttggttttcgagaaatgggattgaatatatatatatatttatcttttcttcttcaacaatggctgatagaagaatctcttaactaggagctcaaatgaatcctccgttccatggaggaacagggaccccttttttggtgttttgatttgtttagttgattgatttatgggcctgtgtttgcgattgagtttatgggttttataccgcttgattagttctacctttgtttggtttctggaaaaaccgaggaaagtggtgctggcttttggtttttgagaaatggaattgaagtcttgaatttcgaaacaagagcttttcacctaactgtgccccaaccgtagtaaaattcaagttttggatatcaaaactggatgagacattatgttcaattgcatttttgcttcttttctttaacagataatgaaaacaaagaaagcttgaaatcttgtaacagggttagtggagtggctgttgtaggatttcaaagtttcttttattcctctctacttttctcatgagccaaacaggtagaatgatttgaaattgataatcaaacttgcataccgtcagaatttgggtcgtttatgggattgagagaatgcaatggatgttgaatgatttcccagacttcttgtttaatattgttgagggagtgtgttcaatttctatttgttatgatgcttgcttacaatgccttttcttttctttttgtcaggga

SEQ ID NO: 99948 - DNA, 705 bp, Vitis vinifera
  Intron number 3 from transcript GSVIVT01037877001 (locus G SVIVG01037877001) derived from phytozome v7.0 (chr-ID chr3 ; pos 6817459 to 6818163 reverse strand)
tcgttggcgagcctagtgggcgttggatctttcaggttgattgtattctttctccttattatttatgaacattatttttaaactttgataagtagtacttatgagccatctcaatagaatttggatgaaatcaaggtggaaccgaatttagggttgatgattcagaaagctgtgcttgtataagtctgagctgctaacccttaaattcgccagttgtctctaccatgtgaggagacaagatccaatcactggtatgatggcaccgatatccaatggtctctggttttttgctaatgcaaacaataaacacaagctttcttatcgcttcccatttagccataaactcaaaactaagctgaaatttgtaaaaaaataaaaataaaaaaatcaagtcatgagatctgcaaattttggctggttgaaactttgtgagatttggtcaagtaattatgaacaaaaagaaaaaagaaaaaagaaaaaagggaaaaggaaaaggaaaagatggggttgtgtaaagttgaccatagattgggaacttccaaaaaaaaaaaaccgtgatggtccaagaaaaaattgttggttaattctggcaataacttgtggatagggcttacctcttctaaaaaggcagttttattcggagttcccaattgttttttggtttgattaggttgtgggagaatctcggaagaaggaggaatattt

SEQ ID NO: 99949 - DNA, 953 bp, Vitis vinifera
  Intron number 2 from transcript GSVIVT01033518001 (locus G SVIVG01033518001) derived from phytozome v7.0 (chr-ID chr8 ; pos 20065107 to 20066059 reverse strand)
aacatctactaacgcaactattagctttgcttggggtgggttgtttttcttttctctttttgtagtagccaaaacaacaagaggctgaaaattttgtgttgtttttcctttttcttcctcagttttctcagcaaacaaacagagggttgttgatttgggtttttcgtctctgttattgttaaaagtgaagttaacttggatttggatttggtgttgtattttttaataaatatagattttgtttgctgtttcgctatgatttcactcatatgggtgttgtctagatgatcgaaagctctctataaagaagatgatttaagttgtgatttttccccctttattcgattttcttcccatgaattttctgttcacgcgtttcttttagtttctaatgcgtgtttgtgttttgctacggattagaccagtgctctgtttgttgctgagattcttcataatttgaacccaaaaaaacaaaatcctctattcaattgatcctgatacatctattcaatttaatttaggtgagcttatcatttgtattgaatccaaaacatcataaaacattcaatcattttcaaaagaaaaaaaaaaactgttgcctcagttttctcagcaaccaaatgaatggtggatcaagatttgtacctttttgcagggtaggggaagttttcaattttgtttgtattcgttgttgttttggattagttttaggttgttgtcctattccttaaagttggtgcttttggttcagattattaacccccagtgatttcattttttgtacttttgttggattattttgattatgtaatatgtatttcttcaaatataatctttgtagttcacaaggtgtttggaatccgatgaattatgtaatgttgattttgggctctgaacttgaacttcttttgtttgcagaaatcttctttagttgtttgagtttttctttgacg

SEQ ID NO: 99950 - DNA, 552 bp, Vitis vinifera
  Intron number 3 from transcript GSVIVT01031114001 (locus G SVIVG01031114001) derived from phytozome v7.0 (chr-ID chr1 4; pos 2054572 to 2055123)
cgtgacgtaagtgaattgctttcctttcttcttaatgtgatcctgttggcttttagaaccatttccctgtagttaatccatgtgtccaatatgtatggttgatgtttctgtcaatagcttttttgacttgtatttaactctagtttggaatttaatgtttgatggtgtaattggccttcaagttatatattctcaccatgaagttcagaatcaggaaactttaaatgcggtgatatagcataagttttggaaagatgttagattctttaacctatctacaaaatattggatacaatttccacttgttaatggacaatctatgttgaaagttggattttcttgagaacttgaagttggttgacaccccactggacaaggaaccattggtatttttgtttttaatttcatttcttttgcttcttttttttccttttgtttttccttgcatgtcttgctgaaattagctgtcttaagaaaagtgatggaataacttggatggcattttctggggtgttaggtttacctactggtacacacatctgaggtcaaact

SEQ ID NO: 99951 - DNA, 685 bp, Vitis vinifera
  Intron number 3 from transcript GSVIVT01036572001 (locus G SVIVG01036572001) derived from phytozome v7.0 (chr-ID chr1 4; pos 23603678 to 23604362 reverse strand)
gaggattttcaggggtacaaattatcattcctgtagttgccatattgttttatcttgctttgatttttcattttaatctttgttttcatgcactgatgatttcatctatatatggacccttgcatcattaacatctcggaaaatgaatctctcttgaatgcagtgatccacaaagcattgtcaaaattggtgaaggtacttacagtgaaactttcagggctggtaaaattgtctgcaaaatggttccaattgatggagaattactagtgaacaaggaattacaaaagatgtttagttattttaccttagttgcatcttttttttttcccagttattttttagtgtgagaagttatttagaggtgggggaggaaggtttgtcaagtttctgtggcacaattgttttctcaatatagtttgtggttttatgtgtgcctaagcagttaggtgatgctgaactagcttccattcagcaggacacttattaggttgcagggtacatgcatatgttaacttccattcaggagtgttaaagcatggacagtcgatcatgctttgagtgtcttagtgcctagttttgaagaaaatcctatctcccaggcacctaccattatcagcttttgcttgttagttactttgtatagaatacagttcaccttttgctcatccagttcacatcctttgtg

SEQ ID NO: 99952 - DNA, 840 bp, Vitis vinifera
  Intron number 2 from transcript GSVIVT01036572001 (locus G SVIVG01036572001) derived from phytozome v7.0 (chr-ID chr1 4; pos 23604358 to 23605197 reverse strand)
atagggaggcactcatctaaacagatcttggtatgttgcttcaacttatgtcctaaactttcgatttaattttctatacagggtatactgaatcagagtaacttctctgtatattgttgcatatttgcaattagcagaagtggcatgaattttaggtttcttggtaagattaagtttggccaatatacttcctagaaactacacaatcaataatacctacataatcagtattaacaatctgatttcctatttctatcttatttggttgcttttactaatgttttgcatttagaacaagtcctgattggagattgcttcataaagccctaactcaatggttgctaaagtattgtttcgatccatttatggaaaattctggtctattaagagaatgtcactagctgatttgtgataagtgttaagaattgctagttattaattttaattgcaccactttatttgtcttgtgtcttatcttctctgttcctgctaatagatgggaactaattgtttagatatcagtatcactaattgttcatctttatctttctgtcatatatcacaattggccccaatattcaggtttatggccattccttctattatattagtgaaatattaactttcttaagcatggaaaaggatccattctttttcatcacttggatttcttccctgtgtatcgattcatgtttgaaaattatgtggtggaaatcctggtcattaaaagttatttctgtctgctttgatttcctaacatttttatttgttggtaacatgacatgtatagttattcttgttccaggccttttggcttttggacaactcgctactcgagga

SEQ ID NO: 99953 - DNA, 897 bp, Vitis vinifera
  Intron number 1 from transcript GSVIVT01036397001 (locus G SVIVG01036397001) derived from phytozome v7.0 (chr-ID chr1 8_random; pos 4609952 to 4610848 reverse strand)
aagagttctgggattcacaagaggctttgcttctggtacttttttttttctctttttccgtcatcttcttcttcactgataataaggcttgtttggattcaattttcggagatcactcatgaatttttatgtgtttgttttgattgaaatgattgagttatgatgattactcaaaagggttgctggattttgagctttttaattcatcaaaagagaaaatcagtagcaaaaaatatggatgatcatctttcttaaaattcaccaccaactactttgatttttttccttctttcatcctctggccaactcgtattggaattttttttttcctttcaatatttttttctattgaagttcatgtggattttatttaactgatagagacttgagattttttttgttttgtttttcctttatgaatgtggaagaagttaaaagccaaatatatggccaataatcatttgcttctcctccacaaataaatttagaaaaggttaaccaaaaaattagtggtgggtatgccatttttattttttattttttttaatttgacagcatatttttggaataatatgcaagattttctgacaaaataatttttccataaaaaaaaaaaaaaaaattctgcctagcctttgttcatgtcagcttctaccatcaccttaaaatattataattttataataaataataaataattattatcataatgatacaagccatactagtcaacttggttctcaaaactttcttttgacccattgagtttgcttaacatttggacataattaaataaattataaaaaaagttgaataaataatataaattttctattcatcaataatattttgttaaaatttggcttagaaaaaatggtttaattttggcaggaaata

SEQ ID NO: 99954 - DNA, 653 bp, Vitis vinifera
  Intron number 2 from transcript GSVIVT01031419001 (locus G SVIVG01031419001) derived from phytozome v7.0 (chr-ID chr6 ; pos 18806968 to 18807620 reverse strand)
ctttggggtggcagcttcactgaaatattcaagaggtaaccttcaattggatcattgcttacaccgttctttcaattttgtaagttatttgaattgaaatcataaacccatttgagaattctgttcggatttaagagcatgtgattagattttagaagagtggtgatatacaatcataattgaatccctcggattgcttttccaatacggatatggtataaatatttatcatttctccatgtttacctgccataaataaatctatgttttgaagaaccattttctgagatacgtttagtggtatgaaagcattttcccttttggagtagcgttacataaactcaacactctctgcaatggttcttctagcagaaacatgacatagaatcttttgattgaaaaagattccccaagaatcaaaatcaagaacttcttcgttttcacatatccttttcctttcagaaaacattaatttagtgatgacagattccacactattatttggacaacaaaagttaagtcttcctttagtttttcacatgttagtgttttccatttaagaggtgtaaatttggattggaattatgaactcatacgggaattgtgctggaattttaggcctttgtgctggttagagcatctgaccctgcaca

SEQ ID NO: 99955 - DNA, 766 bp, Vitis vinifera
  Intron number 3 from transcript GSVIVT01036723001 (locus G SVIVG01036723001) derived from phytozome v7.0 (chr-ID chr1 9; pos 23307628 to 23308393)
cataccgtcttgtgaatagtgaaggagacaggtatagattcttggatatttaatacactacatttcttaaggataacatttctctatacgctggagctagttgatttctctctggaacctgagaattatttatgttcttgtattactgtacaattaatcattatatgcacatgcatatgcgtgcacccatgtacataccgagctagaaaggtatctagaattcctgttttttaatttgtgtacaaacttttggttcagctcctctgtaagttgagtatgaatgactttaaatagtttacttatgcagattcgggttttatagcaattaattaagtttttgagtaaatcagtggtaattatacttggggttatttgtttgaaatgtcaaatgccaagtccttgatgcctcccacattgggtagttgatgatctgaacgtgcagcatatgtttctgcatctaaatatggtgctgtccaacatcacatacctgaaaaaagggaaaatattaccagaacatgttgaatttacaacagcatcgttccagacaatcattcagtagatttttgtcaattggaaaaaaaaaaaaaagaggaactaaataatttgtgggtgcatgtttgtgataggaatcatatgatgcagggctccaaatccattcctttacttcaatatttttgtagtgtataaactgaattttctctgagaaagcaagtccacttaattttcaattttcttcctcaatacaggttgtcaggactaattgttg

SEQ ID NO: 99956 - DNA, 645 bp, Vitis vinifera
  Intron number 1 from transcript GSVIVT01033499001 (locus G SVIVG01033499001) derived from phytozome v7.0 (chr-ID chr8 ; pos 20231850 to 20232494 reverse strand)
agcggctctctgccaaggaatcgctacttctcgctgtgagctcataatttgattctaatttttattcacaaaagccagactttcattgttttaaggtttgattttgatttttaatgatatttgtactgatattgatctattgatttggtaaatgttgaagttttattcggtttgaattcatgtaaattttgttcggatgattatggatctatacgagcaaaaattgaaaaattcttattttgacgatcctttcgttttaatgctggtttgttataacatgttttttctttattagtctggttaatgtaaagaagagcaatagattttttatttaagtttgattcaggctgttgtattttacatgtctttggttaacttctattgattttagcagaatgcatcttgtgattactcaatcttgctgtaagtgttttttctacggaggaacaaattttggtttggtttggatttatgatctaatgatctgataatcttcggtgtttacatttggaattatttagtttgatttttgcaatacatttgcattgttacacaccgctgacatccagatcagacttttatgaatagtttgtggaatcatttgtttcagtttaaggattctggtggctttgaggctttagtcac

SEQ ID NO: 99957 - DNA, 900 bp, Vitis vinifera
  Intron number 1 from transcript GSVIVT01032561001 (locus G SVIVG01032561001) derived from phytozome v7.0 (chr-ID chr1 4; pos 28374221 to 28375120)
caaccgggcaagcatttttctgaacaagcagctaggtttgttcctaactttttagattaatatgctcttctttgttgtgtttgatcttggttcatccccaaattgaactggtcttcgttgattaagaatgcaataggactgagaggagatgctatgctagaaaggtttagaaaaatggagattagaaagcatttttcaatatgttctagtatgctgagaatctgaaaatataaatcagggaaaaggattagaaagtgataatgaattacagctgaggctccctaggtttttaccctcagatccaaatgaagccttgataaccagggaaaagtagggaaacaactaagacttttgattccaatgatgatgacccacctcgttttgttggtacagcgtaaacccctctttcagtttttttaacttagatgttctttatcatcaagccaaaaaggggggaaataattaagcagcccccaatttttggaactttgaatgtgaattttgatggatcacaccaaaaggatcatccttggttgccttagcatagaacttttccaagactggatagggcagtgtttgaatgttctcagtttcacacctcattgtaattgcctttgtggtggaaaacactaaaaagtgttcagttctctgcatgacttggttatcattggttggcttagcatagaacttttccaagactggatagggcagtgtctgaatgttctcagtttaacacctcattgtaattgcctttgtagtggaaacactaaagagtgttcagttgtctgcatgacttggttggttggtttctacctttgctttgttaatgtaattttgatatgagcatgttagttacatttagctttacaataacttcgttttaatttgcttgcaggtttt

SEQ ID NO: 99958 - DNA, 425 bp, Vitis vinifera
  Intron number 1 from transcript GSVIVT01037397001 (locus G SVIVG01037397001) derived from phytozome v7.0 (chr-ID chr6 ; pos 14389732 to 14390156 reverse strand)
ttccagagttgttcctgttccaaaccaaccaagaggttttagattaatctaatttggtttttggtttgtttgttttctgaaattttgttcgttcgtcattgattttcatggttctgttcattgatttgtgatgttgtatgcatgtagagttgaattcttcctttgactatgcggattgggtttttaaattcttctttctggaaatttctcttcttccatttttaaatatgtttggttggattaataaccgctgacatctgggttcgttcaacagcataggctttttatttctttgatttattatgcagtctgttcttactttctgaagttttctctacattggtggattcttttttgtttctgggttttgtttgttgctggatatgaatcaaattttgctgtgtcttcaggaggaaagcagaaga

SEQ ID NO: 99959 - DNA, 951 bp, Vitis vinifera
  Intron number 1 from transcript GSVIVT01037235001 (locus G SVIVG01037235001) derived from phytozome v7.0 (chr-ID chr6 ; pos 17065626 to 17066576 reverse strand)
tctgtaatcagtcgaagtttcgcccctctgtggaggtgagtgtctccgatgaagcatcggcttcgattgctttgcttcagtgtggtttggtgctgatttagggtttttgattgtggatttagggtttgaatgcggtctagggttcggtaatcggaatttttctgggtttagcgattcaatttatttgattccacttttgaatttatggatccgttgatgagtctctttaatttgttcatttaatttctttttgggcattggtgagtttttttgatttcatgatcagatttgcttgagactttgaatgtttcggcctcaaattgagtgttgagtttgttccagtgctggcttcatttgaactgttttggatactgaattctgattgcagttccttgtttatgattatatttggggcgagaacttggtattttgaaggttttgttctttgtatcttaaatgtctgagttttactctagtatggcaccctttgtcagttccaacaatgaccagagctcacctctaatttacttttatttctggcatggttatgtagctttggtattcaggcaatgtaagcttaactgaggggggcattttctttctctaggattgctttgtgggtgtccaatttcaagtagccttaagagctttcatgttgttttggtatcttaaagatgaaaaccaatatcaactgagccagttagtcatgttagactccttgataataaactaaaatctaggatcagaaattcttgtttcttttctttctccagcatttttctaatccaaatagaaagtttggagtcagcttttcttgctttactggactatattggcttatgtgtttttcctatctagatttgcatgatgttcattcaggcttcaactgactaattgccgtttatttgtcatgcaggctttctgcagagactgggaaataactctctttga

SEQ ID NO: 99960 - DNA, 1059 bp, Vitis vinifera
  Intron number 2 from transcript GSVIVT01032196001 (locus G SVIVG01032196001) derived from phytozome v7.0 (chr-ID chr1 3; pos 21627213 to 21628271)
aagggaaggctgcgttgctgttgaagagggacagggtatgtttggcttgtttttgtttttctgatgtgaattttggtttatggggtttaattaatgggtttttctgggtttctcatgtggatgccttttcatttctgttttctgggaaccaaactgagggttaggtattgtttcggtcgagacagattctctgattgtttgagttatgggtgttatttggttcccgtcatttaatttctcccggctgccaagcagaggtttaagtcttgcctctggcaagacagagtgtctctaattgctttttttttttattgctttttttttaatttctgtgaatcatgggtttattgatcgacttaattatgggttttgcttgatttctcctttaaacgttacttcatttctgtttttcagttttctcagtaaccaaacagagctctacatattgcctttgaagagagactgtgtttctatttttatttttatttttatttttcactatttttggtttgttgtgaactgatgagcgactctgaaaattgaatgaccaactagaccagccttctgtttaggacaaaaaattcatattgtaatccataagctgatcttttctatccacacctaatccagcctaaagaaaatgaatctgcattttttatagactcttggctacccaacagggattcttttcagaaaaacttttagttcctttggagaaaattctaaactctaaacacgtattcaattccccaattctttataatttcataacttcacatgctcattttagtctaatattttcctttgaatttttttttgaaatttttttcagacatttggttttcttttcttttttcacttttttttttccttttttaatggctgattttacttagttgttttgtctgtttgtgttgctaaattcatcatttatgttcctagtttccttctcttgctattattttcttcgaacttacttcataaattcacgtacagtttttctcattctatttggtactgtcagacgaggtctaagagattcttggaaattcaaaaact

SEQ ID NO: 99961 - DNA, 511 bp, Vitis vinifera
  Intron number 3 from transcript GSVIVT01035577001 (locus G SVIVG01035577001) derived from phytozome v7.0 (chr-ID chr4 ; pos 2471450 to 2471960)
aagttttcaagggtaagtcacccaaaacccattattttcccactgttaatagccttatttttgtgtttgttttctttatttaatgtctgatatctcggatctttactcatctagagatctgttcaccataaattagagatgttcacctccgtctctgatattcggatcttcactcatctagagatgttcactataaattaattagaaaaagtcaagtacaaaattctaattattccgatcaagtctaagaaggcctaatcacttaaaaaatgtctaacaatcaatcatcatttatacaaacatgacgtctcggtgtttcaatatttagatattagtccattaggatcaaaaggtttttacgacttcaaaacatatctacatattataatataatatatatatatatatatatatatatatatatatatataatcatatatcaaaatggaatggtcttaattatcagcagtaccaaggtaataagcttgtcatgttttggttaacagaacaa

SEQ ID NO: 99962 - DNA, 476 bp, Vitis vinifera
  Intron number 5 from transcript GSVIVT01038025001 (locus G SVIVG01038025001) derived from phytozome v7.0 (chr-ID chr1 9; pos 16450026 to 16450501 reverse strand)
tttgcatttgtcctacaacaaaattggcaatataggttatgttcctctttattattattactattattattatttgaaaattttttttatgttgtttttttctttggaaaatttatattcgagggaattacctttccaataaaaaatattcaagcataaaagtagactttttcctagaatcacaattaaatacatatgaactaagccaatagattagtgtccttgcgagttttgacaagagaagacacacactagaatgaataccctgtgaagtattttatttttttattttttttatttttgacaagtaccttgtcaagtgattttgatagtttattactgaaaactttataccagaattatatccgctgaaacatatagaggcttactgtttgaatatttgagcatttaggctttatcagtgaaaatttaatggtgcagaatctggaggtggttcgtaagttgggaaagcactg

SEQ ID NO: 99963 - DNA, 966 bp, Vitis vinifera
  Intron number 1 from transcript GSVIVT01038307001 (locus G SVIVG01038307001) derived from phytozome v7.0 (chr-ID chr7 ; pos 12573044 to 12574009)
ggggtgatccaattgtcctgaattccaatcaagcagccagaaactcaacagctactctgcttgattctggaaattttgttttggaagagttcaattcggatagatctgtgaaggagaaactatgggaaagtttcgataatcctacagacaccctcctgcctgggatgaaactaggcatcaacttgaaaaccggacaaaactggtcacttgcttcatggataaacgaacaagtgcctgctcctgggacttttactctggaatggaatggcacacaattggtaatgaaacgccgagggggcacctactggagcagtggaaccttgaaaaataggagctttgagttcattccttggttgagctttgacacttgcaataacatctacagttttaacagtgttgctaatgaaaacgagatttactttagctattcggttccagatggagttgtttcagagtgggcattgaactcgagaggaggactttctgacactaaggctatgtttggttcccagaaaatttgagggaaaatgcgagggaaagaaaatacaaaggaaaagtagaaggaaagaaaaagtgaaggaaaataaaaaaataaattaaaagttgataaattattttttttgttacttcaaactcattttatttattttaactcatcaatataaagattaaataatttaaaaatacataaatttttaattagttttaattatatttgattttctttgatatttttcatagggcaaccaaacatgagaaaatcattttctttatcattttttttctttcctttgtactttccgggaaccaaacatagcctaacagacctttatttgtgacggacgatgtgtgtgatgggtttgaggaatatccagggtgtgcagtgcaaaacccacccacttgcaggactagaaaagacggattcatgaagcaatcggttcatatatcagaatcaccgtcatcaat

SEQ ID NO: 99964 - DNA, 899 bp, Vitis vinifera
  Intron number 1 from transcript GSVIVT01031286001 (locus G SVIVG01031286001) derived from phytozome v7.0 (chr-ID chr1 4; pos 615423 to 616321 reverse strand)
gcgcaggttcacttcttggcccctccttccaaacgctgctttttgaatgaacccagaaagggacgagtccgaatgttgattttgtttttattttcttgcctttcccacctaccaactgtgggggaaatcgtatttctggtgggtttggttgtttctagggaatgtcatcagttttgtgggtttctatgagggaatgggcccaagtggatttcgttgattttctcattcggcaaatgggtagaattttcaagggaaaagtgcggttcctttggaaaatgggcgcttgagaaagactagtagatttgaatcatttgattgcttttcttttcctgcatttcccagtagccaaaacacatggaaatttgtaggaaaaatgacttattgttattggtttcacggagaaaatggtggcgagtagatttaattaccttttcccctccatttctcagtgatccaacaaatggaattttctagggaaaataacaatttttattgcttctcttttcatgcattttcagtaatcaaagactagatagttagtagggaaactctcaacttttaatgggtttgtttgtttgtagagaaaactacaattctgaaaatcttgggagggaaagcacactactgattcttattggtttcactgagaaaatggaggcgggtagatttaattacctttatttcctgcgtttcccagtgaccaaacacatggagttttatagggaaaatcatgattgtcattggtttctctcaaatagggacaaattggtttgattgcttctttttttcaggcattttctgttttcaaacacaaggtattttgaatggaaaatctgaacttctaatgggtttgtgtgtttatagggaaaactacaattctgaaaatcttgggtgggaag

SEQ ID NO: 99965 - DNA, 1017 bp, Vitis vinifera
  Intron number 1 from transcript GSVIVT01035198001 (locus G SVIVG01035198001) derived from phytozome v7.0 (chr-ID chr4 ; pos 10273651 to 10274667 reverse strand)
aggaagattttttcatattattgtactcacttgatgttctattaaattctctttctacaataagttgttcaaaaaactaccgtaacaacgtttctcttgttctgtttttggcttttgttaggtaatttgacttctaagcattagggaatgtaaatataactaaacccatctataagtattgatcattgtatttaccatgttcaatttgtttctttctctcatgttaatgatcatttatcaaagttaagtaggttttagtcgagttatgcagttggcttttaggaacatttagatggctatgcttttaaactctggttactcccttaggaatctatattagaaaaattagaaagatggtaggattgtgaattgaattatgcaatgtctaaagtacattatcatctagttgagatcaattaatagacttgtccatcacaataagattaagaatcttcatttttatgcattatcataggtcttaaacaacataacatggatcaatgttggttatgctcccaagtccatgtgctacaaacaacttgcccttgtagaaatttccataaatgaccaatttagaaaactagaacaccgagttcaaaggctctgcaattgtttaaaagccaaatttatgttaaaagtggttgaaatttcttgtccaaattaagaagtcaactacataatctaaatttagctaagttgatactctgaaggaagttcctgtattttattgttttctttctaaatgttgttcattattatagagaagaagttggtccagatattgcttgcaagtttttaggacatacatagtggcttgtgaattattggattttacataatggtttcagtattgggattggtgatataattgctgatgcaacaaccatggaaaaaattaatgaaatcatttttaaagcgaagaatgaagtgaaggaacttatcaaggttgcccaagataagcacttgaggctgaacttgggtagactatgatgaagtcatttgaaaacatagtgaacc

SEQ ID NO: 99966 - DNA, 436 bp, Vitis vinifera
  Intron number 3 from transcript GSVIVT01037424001 (locus G SVIVG01037424001) derived from phytozome v7.0 (chr-ID chr6 ; pos 13995729 to 13996164)
ttctctattttctctcttgatctagttttctcaaggtacgtcaagtttttcttggttttttttttcaatctctgatttgattgtcgggaaagatgaggaaaggatgagaagatttttcaatttaaaaacggtttttctaagtgatttttcaatttaagatttgtgcaagtgttttctaaattttatcaaacatttgttttttttatatatataaataaataatacttttgaaactaaaagtgcttcttagaatcattgtcaaaccaattaagagtgcatttgacagatattttagattacatttctaatctttctaacagtttaatgataaaaattttagagtgttaaaactgtaataataaagggtaagatagtaatttcatgcttttgtgagcttgcagttcacaaaagaggctgtgggctattttggagaaag

SEQ ID NO: 99967 - DNA, 999 bp, Vitis vinifera
  Intron number 2 from transcript GSVIVT01034173001 (locus G SVIVG01034173001) derived from phytozome v7.0 (chr-ID chr8 ; pos 14638333 to 14639331 reverse strand)
caggtccgtatcaagagaaacccacaacccagtttctatttctaggcctagtttacttcttgttgccttctgtttgcttgcccagaaaaccgaggatggtaaagaagagtaaatgattttttattgtttatttttggatgcttttatgttgtttgggctttggaaaaccaagtaaccaatttctatttctgggacttgtttatttccagttaccttccgtttgtttccccaaaaatctttggacaattaagagaggtgaataaaattttgaatttgatatatattggtttttttttttttttttggtatttagttttggaaaaaatgagagtcatcctcaatcaggcaaatggataaagaacccaatttttgtttcctagtgctaatttctatgaaccgctgtttattttcccagaaaattgaggaaaacaaagttattctttatataggacaagtttctccttttttcaatcatatttttaatgtggttctggttggggagatatgaaaagaaaattcccacctcagttaaatagttgaattgggatcagttgaatggagggttttgtttcttttagtcccaataagaataagttcgaggctccaattttaatttatcatcaagtaaataaagaattagagtttgtttgaccactgatttttaagaaaagcctgttttttcagaacaaaattttgtttaggaattcaaatatgaaaaacagttttctctgttgattcttttaaaggcattgtgcacttatgtacaattcaagtatgatctcaaaaatcatcttgttttcataataaattcctagaaaactattttcaatccaaaatttgtcaaacatgttttttgaagttggaaaactgtctttgtttagagaatggaaaattgtttttcagaacattctccaaacagaatttcagcttcttttatttctgtcttcttattatcttcatggtgaaaatccaagacatcattgatgatgcagggcactg

SEQ ID NO: 99968 - DNA, 561 bp, Vitis vinifera
  Intron number 1 from transcript GSVIVT01032943001 (locus G SVIVG01032943001) derived from phytozome v7.0 (chr-ID chr1 4; pos 24491762 to 24492322 reverse strand)
gtcttttatttttgtccaaaaaggaaaaagaaaaagtcccaaaattacaacaatttcgaataagtcagacccacgctaattcatgggtcatttagccaaatatcattaggactaagagtccgtttggtagataatataaaaagcatttttaatttttttaatattataaaatttttattctttgaatattaaaaaattaaaaaatattttttaaaatcaccgttaaacacgtttttagtcatataagagagggtttggtgcggttttgatgacgaaaacaaaaacaaaagtaatgaccattcgagtattcattaatttaattaaaagtgataatatttggaaagattgaataagaattttttgggaaaaagcgcacacacacgcgtcttgaggtgcgggaagagcagcacaaccaaccggatatttagcacaggactctgtgtctctctccttcgcagaaacgggcccattgtctcaaccacccatcacccattagtccatacgcaacgcagaaaaataattaaagaaaaaaaacaccttttcttttctctccttctacac

SEQ ID NO: 99969 - DNA, 1004 bp, Vitis vinifera
  Intron number 1 from transcript GSVIVT01030530001 (locus G SVIVG01030530001) derived from phytozome v7.0 (chr-ID chr1 2; pos 6519253 to 6520256)
accttactttgcctcagataataaacggtggtcagttcgtctctccccttctttatcttctttcagaatatttttcaggctagggtttaaacgtaatcattactcactttgctaaaatgcgctgttctacgcttttggaagtaaaattttctgttaattttgttttggaaggcaagaacataccgccaaaattctagtcagaaattaggttttttactatcaaaagcatgtttggagcttgtttatactgataggttggttaaaaacactgcctttggattagcggtgacacttgttatataattgatctagttctttgaacccatttttttgatgcagtcctttttcagagggattgatatggactttgtatgtattatttaatattgactttttaaacaagaattggttaattatggggattgatagttgaatatttgatttatgtttcttaatttttcagttatgggtgaatgtatagtagattaagggtgcattgggtagatgagaataggaatggaaataggatgggaaagattctgcgtataagagaggaatcaaaattggagtagaagcgggatttgattttcataacagtgaaatcttttagttctattcccattttgaaaaacaatccaaacgcattaatgaataagaatggagttgattttccattctgatgctctttttgaatgttccaaacatggcctaggttagttgctaccctctttggaccttggtcagtaccaaatgtgaatgttgtgcatttttggatgttgattatggttcaaatcagaagcaaattgaatcatcagaagaattggtgatacgatgatgcattgcatattgtgacacatatatggagattttgtggtttgaataatttcactacttgatttcataaaagattatttgaatttgcttggatgggctgatatttgttaaggcatatattctcttttgtttatgatgcttacgaaatattggaaatgttgttcagaacg

SEQ ID NO: 99970 - DNA, 378 bp, Vitis vinifera
  Intron number 2 from transcript GSVIVT01030530001 (locus G SVIVG01030530001) derived from phytozome v7.0 (chr-ID chr1 2; pos 6520440 to 6520817)
tccccctttcctattcgttttgctggtgttggagggtatgctctcatgtgttatgcttttgtgtttcattttgttctttttttcctttttaatatgaaaggataatgtttctctagctggtatggctattcgttcatgttttcccattatttccacctccacaaaaactaaaaaacaaacccagtttctctgtttacttttccttcaatttcatgttttacgtaaggataaataccaactttgtatttgttaagtgtttattttgatttttctgagcattggcactctgcaacagtcttctcttattgatgatctcttacctcaccacatttttatgaattccttttttgtaatgttattttttcctttttcaggccc

SEQ ID NO: 99971 - DNA, 927 bp, Vitis vinifera
  Intron number 2 from transcript GSVIVT01035880001 (locus G SVIVG01035880001) derived from phytozome v7.0 (chr-ID chr4 ; pos 5208632 to 5209558 reverse strand)
ggtgacgtgtatcgtaacgccggcgcattttatcagtaagctattttttgaatcgaatataataacaataataattaaaggttttgctctttttttttcccacttttcaaaaccgactttgcctcgaagtcacctccagcgtgtcaactagggcgcactaccctttcgtgtgctgtaggactgagggaggagtgatgactgagggagtcttctaatttacgctaggtgtgccaagtgcgcactctcaatcgctccctttcaggcctctcagttcactcatggctactggaaaagcgacatgctatttacttattggaagagatagtggtatatggacacccccacaaacttttactactcagctttattgtgaatagacaaaatcggttttgcttttcttaagatggcaaaaattgtcaagtggtcttgagattaacgaaaaaaaaactggttcattgaaatataaatcacatatagcatatcaatatcgagaagttcaaaactgaggaagcctgagaccatgggaaagagtggggcgaggttgtgccgactcctagttaggactggacctaaaaggatgcgtaggtgtagatgaatttcttccatataaagaaggatcttctcaatcatcaaaaaatttcccaaaataactagcaatattattaattctcacagctattattatgcaatgatatttggatgctgtagcgtgtagattctatcttactctattctattgtaagcaatgactaattaatgactataaccttctacattaaaatgatatgatgatcttccagcttccactagcctttaatttgaggggcacctctgagtatcattacacaacccaaaaaaataaataaaaataaaagaacatgtaatgatactgtttgttgtggaaaaaattacaggagctacgtggag

SEQ ID NO: 99972 - DNA, 440 bp, Vitis vinifera
  Intron number 1 from transcript GSVIVT01037553001 (locus G SVIVG01037553001) derived from phytozome v7.0 (chr-ID chr6 ; pos 11511873 to 11512312)
actaacatattacccatgtctctcataatataagcaaatgcaatcaaagatttggtattacacctcttatcataaataactcaatctataatattttatatcccactttactacattggttaaattagatttttaatgtgcacctaaattcttaagaattggaaagttgaaaaattttacaaacaaatagcattgttggattggtagagttcaatatcacaataatcatttttttttcattgttttcaataagattttgtattgcacctagattcctttaattgattttgaatgtttagctagaatattgaaggccatgcaatagtgaagaaatatttctggtttaaatacatgatctttccatttctaggttttacaaggtcttgtgtacttgcaccatgaaagacaagtaatcgataaggacataaaaccatccaact

SEQ ID NO: 99973 - DNA, 1012 bp, Vitis vinifera
  Intron number 2 from transcript GSVIVT01032999001 (locus G SVIVG01032999001) derived from phytozome v7.0 (chr-ID chr1 4; pos 24980251 to 24981262 reverse strand)
gtgagatttgcttcgacgaccagcagcggtggaaggtgagagctcatgatcgactttttattcatattattttacctgctgttaaccccgtaatggtgtttcttgctctgaaacaaaccaaccgcttggatgcagcagcaaaggtaggggtgttatagtaatataaatgtttctcgtttctcagtctggtgaggctggttaccacccccctcagcaaatttttagaggaaggtttatttattttattttttttaataaaaaaagaaaaaagaaaagacaaatgttctgaagttcccttaattgggtagtccttttcctacctccaagtgtgacaagtaatcagaatgtgtaacatggtcatagcctatatctaggaaagttcccttaattcgttgtgagtggtcccttttctatcatcaaacgtgacaagtaattaatcaaacggttaacatttttacaagtaattaatcaaatgtgcaagaacttgtaaattaaaagtcaaccacatacaccatccacttccaggttttggaccccagattttcatttttcttctataaataatgaataattaatttataatatatagtttgagacgtgattacttttccactgctgcttgaaatgcgccagatttcagggctgtgtccaactttcttagcatgaaacaggtcatcaacgtcggtcactattgattatgcctgcccttctgtctttgacatttggttatcagtcacattgtcttgggtggatccggagaaagttcggtatggtccacacaattatccaccaaaaataattcatccgattgatggttttgatgggtcgacagatagtattattatccttattctcatcatgaatcatgaaaattcgtttcttcttcatgttccttagctagcttttgtctagagaagacgaccagttttgtcttttatcccatattttcggatggaaggggattgattgaaactctgtttgctctcaacccaggctacaaggcaaagtagct

SEQ ID NO: 99974 - DNA, 312 bp, Vitis vinifera
  Intron number 1 from transcript GSVIVT01036409001 (locus G SVIVG01036409001) derived from phytozome v7.0 (chr-ID chr1 8_random; pos 4771052 to 4771363)
gttgcaaatttatctggttgggattcaagaaataagtaattttctgaagtcttcttcactcttatttctatttttgatttttaacattgccaatttaaatgctcttgctacttattacaacatagtgagtataagaatactatatatgtttaatgattgaaggactggacacatagaagaacttttttagtacacttctataagggtagatttaagactatgtcttcacatcttctcatatttcctttatttttattatctttttatggatagcttgacttattatgtgtttgtgctttaaatatggcagga

SEQ ID NO: 99975 - DNA, 485 bp, Vitis vinifera
  Intron number 2 from transcript GSVIVT01031936001 (locus G SVIVG01031936001) derived from phytozome v7.0 (chr-ID chr3 ; pos 5559708 to 5560192 reverse strand)
aattgtttctgctttgtccaaatcttcaagtattggtattttctactttgtttttgtttgtttatggatttcaatttattcttttgatatattgttaattggttctgttgagaacgaggctgttgagcattgtgagaatgtaaacctagattaagattcatttggggttcgaatcaatgttcacttgattcaataacagttcttttcagctcattatccccaatttgtagtatgcattgctgccctgctttcttgaggactatgacagaagcagaaataaatgatgatactgatcatgctaaccacatattgattgaatttcgaaatttatttttgaagatgttaattagtactcaaatatgacttcttcttcttcttttttttttcctttcaattgagagtgtatatggagatagtaattattcaggttaaatatggtgctgtttccaggattatctagcaaaacttctgggttaagtctaaag

SEQ ID NO: 99976 - DNA, 849 bp, Vitis vinifera
  Intron number 1 from transcript GSVIVT01034361001 (locus G SVIVG01034361001) derived from phytozome v7.0 (chr-ID chr1 0; pos 17404720 to 17405568 reverse strand)
aaacgcgccagagacggtagtgcttttatcaggtatgcgttttctccctgtttcttcatgggaaagtcgagtatgattttggggatttgaagttcttttcgttttctgtttacccttgtcgttgttattcgcttgtgttctgttgccatgaaatataggggtaacgggaagctggagttctctctctctctttgtttgtttgttttttttttctctgggcaactaagcgaagggtttttgttgattgattactgattttgatatgaactgtgggaaattgtggagtgaaaattgcaagaagatgccaaatggtgtatattcgtctgattggctgctgggaagatgaggaaaataattagaaaatttagagttctcttagctttttgggcaaccgacaggggttttctgttgatactttactgggtctattttgaaatgtggaagtcttgttactatggtgtaaacgctgcgaaatagatggtgtgcattcatctgtttggttgctgggaaagattaggagaaaactgagaaatcagtggttatttatttttatttttcagtttctttttcattttcgttttctctgcaaccaggttgatgatttccattgcccttctgtttcccttttttttcattatgtgtggtctttttgctgaggggatttttgtgcccttctgcttggctgctgggaaggatgagtcccataatgggaaattgcaattttatggtcttatatttacgtaaatagtgtattttcattttccctgtaaacaaaagtggggatttatgctgacactctaccgattttagtttaaaatttgggaatgttttttgattgtgcagtgaaga

SEQ ID NO: 99977 - DNA, 365 bp, Vitis vinifera
  Intron number 1 from transcript GSVIVT01037362001 (locus G SVIVG01037362001) derived from phytozome v7.0 (chr-ID chr6 ; pos 15020525 to 15020889 reverse strand)
gttctgagaagtggttgataatctcaggtatgttcatctggttgtcattgtaggtagctactgaatggggaaatggggaaatctgaaatgagtgtttcgaaataagattataaaattatttgacttgtttgaaacattaatctctactgatcaatactgtgtcgatttctctctatttatttttggatgaatactggaatttgatatttgaagaataccgatatggaagcaacctaaatagcttctttggaagcaatatcgatagtttgttgcaacctgaaacaagtggcttgactttgtagtcatcatgtaactgttatcagtagaagtgattgttgtatgtttatgatggaaaattcaggaaa

SEQ ID NO: 99978 - DNA, 990 bp, Vitis vinifera
  Intron number 1 from transcript GSVIVT01032539001 (locus G SVIVG01032539001) derived from phytozome v7.0 (chr-ID chr1 4; pos 28177758 to 28178747 reverse strand)
ctcaggtcaccataacccttggccgcactggacaggtacattctctctggatttttttttttttttttttttttgtgattctttttccgtctgtttggtttggttgtcgagaaagctcagggggaagaaatgagtcgaagataaaattttgaaatctactggttattctttttctgatttcggttttaggttccgttgggtggggagatttgttttggtcaggctccagaagagggaaatttctgagattcggaaatttgtgtgtttcttttctttttgtggtcctgtattttgctatcaattctaaggtgaatttagtcttcagtttggtagggttagggtttcgttgatggagcattttagtttggttagctaagtttgcggttaagtgcacggttgtaaatagtttttagtttctgtttgttttttctttgcttctctgcagcaaaactgagcattcaatattctcagatcagttaagagtttttttttttttttcatttggggttgggattttggtgaaggggccaatttggaaccacttgttttagacatctaattattcacataatcgatggttgtgtgatttgagtctgcaaatcaggcaatttcgccataatgctactctatatcatgctgtgtctgttttgaaatcattcctggtccttcgagctgaagtttcacataagtaccttattttctggcttcaatacatttttagcagctttgtttggttgctgacatgtgaggggtaaaaaaacagaaaagaaaaagaacccaatcactgtattttctgctgttctggtctgtaaaattaaaaaatcaactcaactaccatttttctttggagcagggttaaaaatgatcagaaacccaatttatttattttctttttctcagttgtatcaacaaccagagtataaaataagtgtgcatttgtattctttttcaatttttagaaagtggtaaagaggggaggagcaatatctg

SEQ ID NO: 99979 - DNA, 735 bp, Vitis vinifera
  Intron number 1 from transcript GSVIVT01035487001 (locus G SVIVG01035487001) derived from phytozome v7.0 (chr-ID chr4 ; pos 1697648 to 1698382)
tctccttcaagctcgtcttctacctcgctctctctgtaaatttctctgctcactccaatttcactcaactgtttcttctcaattgagatcttgtggaaattgcatcgcatttttggcggtttgttgagttcattcgttgttcttcagttccttcttttgaacatctagaaattgaattttatggtgattcatttgaattgtaacctggaggtggtgatagggctctagtttcgagttttctttgtagattgttgcgtggtttgttgaaatggtgtcatttagtttgcattttggaaatgcttttcttacttccggaagcgaaagttgttttattttggtttcagaagcaagaaaattacatcaaaagctaaaataattaaaattcagttaagaattttaaattataaaccctaaaacccagtagtttgagtcaaaagggctaatcactctagttttttgagcggattgatccctatcttgtttggcttttatcaattttccttaagtgccatatgaagaattatgtttctttaataatttaaaataatttatcgattcacctaaattagcttcaataaatttggaaagaaaaagaatggaacatgaaacctccaaaacaaatcaattctctgctgtacctttatgtttctctcatgtttcttcattgatatttcttgtcaatgttttgtgtggttgaattattggctcatgtagtgcattttctgagtgcaggac

SEQ ID NO: 99980 - DNA, 575 bp, Vitis vinifera
  Intron number 2 from transcript GSVIVT01036683001 (locus G SVIVG01036683001) derived from phytozome v7.0 (chr-ID chr1 9; pos 23922076 to 23922650)
ggcctgcggacttcgtgtcacttctattaagattggtatcttccttctccacccttttttactttttattattctctttccaatctccggtcaaatattctcattcttgtttctcctaagataagcattttgcttttcaatttcttcctctgtttctttatctgtaaatcaatttttttttttccagtttttgtgattatggaatagctgatgtgttttggatgttttggcatctacttttaaaaattgagctggtgatttcaaacaacaaggttacagatatggttgtgtttttaaaaacattggtatagtgatgctgaatcctgatatagttttgattgactacattttaggggttggattcttttacaacgcagctcaaacactggcattctttttttatcttgtaaattttttgttattgacacttgtaaatgaagctattttttccctttcttttttggttttgcacttagttcacattgtcctaattgtccttcttcaatttttaatgattgattttattatgtatttattttactggtttacttgtgcagatccttacctgaacaccg

SEQ ID NO: 99981 - DNA, 680 bp, Vitis vinifera
  Intron number 1 from transcript GSVIVT01033598001 (locus G SVIVG01033598001) derived from phytozome v7.0 (chr-ID chr8 ; pos 19440264 to 19440943 reverse strand)
tcttcgttcctctgaacttgaagaattcgtcagaggtaagttttcttccacagaaccctacaattaaaaccaggttggttgttgataaagtacagaaaaattaaggacatttagagttttcaatggttttggaaattgagaaatcaagaaaatccttggacaatgtggacattgtctggttggacttttttccttcattttgcggtgattgaaacatgcaaagcacgagattctgctgttttttttttcctaaattttaatgccatccaaataagtggggtaaatttttggttctcaatttatattcagttttcttttgaacggtaatttttccagtcagcaattgatcaaaaccctaacagaatctcaactacgagaattagaagaaaagcaaagaaatcaaacatttgaatatttcattttcatttatttatttggaacctgagagaacaaactttccccttaagtgctccgaatttcaactatttcacttagggagagttttcactttctttctaagtcagattcaaatttctatttattttgtttagtcatttttcttagcaaagaaaatgaggttagtttttctgtgcacattaaccatatttttatgatttcaatctgtatttcttcttatgcaaacaggtgtttcatttgatctctctgataaagagcttttc

SEQ ID NO: 99982 - DNA, 650 bp, Vitis vinifera
  Intron number 1 from transcript GSVIVT01038513001 (locus G SVIVG01038513001) derived from phytozome v7.0 (chr-ID chr3 ; pos 10833077 to 10833726 reverse strand)
ttttgtctggttggcttctcataatcactactcaggtgaggaaattgttttacgaatttcttgttttttacaaagtgtttttcttgctttgggaagcagcacaagtggtttcaaatattgattagcgcgtgagacatttttgttggtgaagtttctttattataataattaatagcatcttccattaaaataaaaattaaaaatctaccccactgtcatcacttcttggataatttgtttgtatttgggtggctttttgactctgtttttcttgctctttggaagtggaaaattgctttggtttttgcttctaaattccacagggtggttggtaaatagaatcatctcattttgaaagtaaaaatgtgttatgattatgggatccattgggtgttaattgatgttctataccatagtaaaaaaatatggaagcattttcttagtttcgaaaagcagaagttgcttttatgcatcatgggtgctgcatgttttcaggggtatttttcttaaattatgatagaaaaaattttggttgacttgggtccgtcaatttggtaaaaagatggcagcaagtgggtttttagattccttgtcttgaaagcaaaattatcgctaaaagtatgaagttgtatgtggacaggtattgggat

SEQ ID NO: 99983 - DNA, 773 bp, Vitis vinifera
  Intron number 3 from transcript GSVIVT01037043001 (locus G SVIVG01037043001) derived from phytozome v7.0 (chr-ID chr3 ; pos 8434413 to 8435185 reverse strand)
agcttcccaccatatcaaccaaggtagttttcaaatgttgtttgttacattttgttttagatttgtggcttgtattgctatacgctagtgtctttaaaatcttttgtgatggattcataaagtgcatgccttggattaaatcctttgagcttaaggggaaaatacttgagaagatttgtatgtacaaagattaatgcttgcatagttctttggagaagtcaaagtttcagaagggaaagccaatgttggcttcatatatatattttgttcttttgtttttgttggttttgtatcagaaaaatctgatgttgtacatttcttttctcagtttatttttataacttttaggttttcttgaaaatttgtcataatgcactcttttagaaataataagaatccaactttatgataaacatattgaaattgattcttctccaaagggattatttaaaggctttttctcgaaattttttgtatagatttagaaaaaggtgtaagtagacggtgggaagcttctagagacaatagaagtagtatgttagtgcaactgacaagcttttaatcaacgttgtgtgctcttgagtaaacaaaggattcattgttaagtatttctctttgtcttataataagacaatttctataattttgtagatagatgcgaaagatggtgacataatggagtgtcaccaactatactttcttgtgatcatatttatattgggattgcatgatctacaggactgggctgatatcgagtttggaatttctgaagg

SEQ ID NO: 99984 - DNA, 387 bp, Vitis vinifera
  Intron number 1 from transcript GSVIVT01035915001 (locus G SVIVG01035915001) derived from phytozome v7.0 (chr-ID chr4 ; pos 5743343 to 5743729 reverse strand)
gctgccttctctccaggtattcatgcttccctttatcacatccattgatgtttttttatatgcctggtaacatacatttggtttctgggaagtgtaatgggttcatcatttcaaaactcaaatttcaaaatttcaagaacccaagtcattaaattcaatgcatttaatgcattaaatataaaaaacaaaaatttcccggtcacaagattaatatttttttcctttcctcgttctgtatccctgtctttaatcttcaatttagttctaaatttggtttgtggtttcattaatggaattattgcaaatttgcttaatctatcttctgaatctatgtacttacatgtatgatcagctattcaagagggaagtgaagaaaatcagaaggat

SEQ ID NO: 99985 - DNA, 751 bp, Vitis vinifera
  Intron number 1 from transcript GSVIVT01037664001 (locus G SVIVG01037664001) derived from phytozome v7.0 (chr-ID chr1 9; pos 6671824 to 6672574)
ctcttctctgacaggtgtttttcttatccaagatttgtcttcgaatgaaatttcagttttcagctgttctttgttgcattttgttttggactgatatgccaatgtgtgtaatttgatgaattgggtgggtgttgttttgtcaatcttgtggttctgtagtctgaatttattgaagttctttatcgtttatgggttttctgaaatgggtattgatgattcttccgaatcatgtgcccaattgatatctggacaccagtttttagggaattttattgctgtgatgatggtacagagtgactccaatttcgtcatgttaacgctttggttatggcagtcggtgcaatttatgtagttgaaaaagattgggacggatctgactttcatgttagggattcaaatctaagtgattgccgatgtagtgcttgaatttggatgttacagtttctgacaaggttggatccaagttgaaagcagctcaattattgatatatcattttaaatttttttatattttagcctttgtaatttgattattgggattaagttttgattggttgtacaacttcctgattcttgtatgtttttcctcttgatcaacgtccttcattgttgtttgtttgcctgcactttatctttattatgctttttgtttgtatcttagtaagatgtgacaaatataagagttatatgttaagacatttaattctttgtataagacatgttatattaatcacaacatgttggtaataga

SEQ ID NO: 99986 - DNA, 967 bp, Vitis vinifera
  Intron number 1 from transcript GSVIVT01038653001 (locus G SVIVG01038653001) derived from phytozome v7.0 (chr-ID chr1 6; pos 21175772 to 21176738)
cagagctggtatcagtccatcttttcgtcatcgttctctttctctagctccccattttctctcctccatattttcttatcctaaaaggaaacatttcaaggattaaaccaaaattcggaaatccaacacatcttttaatttttttttgacataaatacttttctaacattattgacattcaagttgctttaaaaagaaaagcttattttaaaaaaaaataaaaaataaaattgaaggcatttttgtgttgggtattttttagattgaaaaaatgtgaaaaattagatttataaattaggattagttcatccttttaatcaaataacccatatttttacctaatgatctaatctagcaatttaatcttagaagattttgtaacaattttttttttattcctttcttttatgaagcattgaatagtgaggcaatggtttgaggtttcgtgtggagaagaaattgaaagagattttcaaagcaaaaggtaaaataaatttgttgtgatgtgttttgaaatgattccaaaaagatgggcacccactacacccaccaagaacccactctagtatgtttttacattttcttctcttgtattgggtgtggatgtgggcatctctctaaccctctgttttgttgattttattcttcactagatcgtgtgcttgtgaattaaccaaactcagttccatatttttcttcattttgttcttctttgttcacatgatttgaccaatagaatggagttgaaccccatcatgtttgggtccaccgtagaataagaaaacagagattgggacagttcttcataccaatcatgaagcctactttacttttgttagcttttgaagttttggttcttgattggactcaacaacttgtacaggaaaaattaggtcttgtaggttctatggtaggtgaagattgattggtattcttctttgtgctaattgtaggtaccatttgaaag

SEQ ID NO: 99987 - DNA, 538 bp, Vitis vinifera
  Intron number 1 from transcript GSVIVT01032488001 (locus G SVIVG01032488001) derived from phytozome v7.0 (chr-ID chr1 4; pos 27823724 to 27824261 reverse strand)
tttcccaatacccacccccatttcagaatcaaaaggtttgagctttgatcttcattttacatgttcttttaatcatttatccctagttttagttctacattgtgcattttctgaagtcaaattttgactgatgtgactacataaatattatagtgccatttgtatgtggatttcttgataacaaggaaaaatgggattgagcaaattatgagtctcgtttgttagattgaataattcaaccgatctataggatattaaagactctgttgagaatataaagttccaattggattgttagaattcatggagttgagcttgttcttattacacttagtgtaatatttggagtcatgaaatggttagtcaggaccgttttctgttcagtgaaaactatgcaatttggaattgtgttcaattctagtgcttttgaagaacatagttgaaaatttgtcagatttggggatcattgtgcagtattaaatggaacttaatgggagttcacttttgagcagaaagcgaagtccttttccttgaagga

SEQ ID NO: 99988 - DNA, 996 bp, Vitis vinifera
  Intron number 2 from transcript GSVIVT01034310001 (locus G SVIVG01034310001) derived from phytozome v7.0 (chr-ID chr9 ; pos 14665229 to 14666224)
tgcagaagaattttcaaaaactgatattgttgaaggtatgtgcattagtcctttgcttcacttgatttgatatgcactttgattctatagtttcttgatctattccttgtgtcttcttgaaaatttattcactttccaagttaggttcaaatatctattttattctcattagtcatttttctaagtaaagatattgacattagttattttgtatattttaaccattttttttttaggattttaatctttttttcttcttatgcaaatagatgtattatttgatctctcttggaaagagcttttctgtctcgaagagtaagacgtgtttgatcatgtatgttcattaatcaaaggtttctctagtctcactatcttgtaaattaaatcttggggagagtcctaggcccaatctgagcgttcttccaaaggtggattctccatctcaagttacttacgatttgttgataatgtactgatccttgattgggtagcctcacattggattgcttttaaaacctatacttttttgcttcttaatattgtcctcattctggggtctaatattggtttcaacaactccaaggttgcttgaactgcatgcttgaatcaaatgcattactcttacaagttttctaaagagcgaaagaaaaacctattgtctaataatgagaccctgatatttggcattctgaaaagcttaatcaccggtttttggctgctagataacttatggtatgcagttactgataatgttattgattttatttatacaattcatccaactattgaaaccttagttgttgacttgaggaaaatgtctcttagttgcaaaattacattgaaagtggtatcatgcgtcctttcaactgttcttgtaacaaaacttagtagatatttattcattatgttccatgttgctattaaccaattgacgcatatggtgtcatgtatccaaatagaaatcttaattgatggttttggctgccaggaaacata

SEQ ID NO: 99989 - DNA, 531 bp, Vitis vinifera
  Intron number 3 from transcript GSVIVT01038790001 (locus G SVIVG01038790001) derived from phytozome v7.0 (chr-ID chr1 2_random; pos 981052 to 981582)
tacgtccagtagtatatttttttttcctttttcttattactgatcttgcttttttttctcccatatttgttgtctacacttaaaaatgacaagcattcaaattttaatgtggttgagaataattcaaggactttggatttttttttcaatgtgtataaaataattatgattcttagataaaatttaaataagatttggaatataaaagtagttgctttaagaaaaaacaattatatgagatgaatttatggaagaaacagattggacaaggaaatcttattgaaataaatttagggtccaaatttaaataatggtaatgaaacaaattaacagaatggtaaagagcattaaatgcattttgtaacttgtttgcacacacatcacttgcctatttcgtagtagttgttgtttacttcctacattctctttttcacagtcttcttaatgaatcataactcatatttccttccaatcacatttctctcactctctctctctctctctaaccatgagcccaacaccatcaaaagg

SEQ ID NO: 99990 - DNA, 794 bp, Vitis vinifera
  Intron number 2 from transcript GSVIVT01033326001 (locus G SVIVG01033326001) derived from phytozome v7.0 (chr-ID chr8 ; pos 21476162 to 21476955 reverse strand)
tcctcacctccggccttgtagttaatctcattcaggtgctttttgttccaatttattttattttattttttcgaaattttgattgagtttggtatttctatagatttgatttaattgagctgcttcgtgttagtttattagggtttctttgtgggactggggttttagtgggcctcttgttcggctactaagagaacgaacgaagaggaaagaaaaaggaagaaaatttttgagtttttttttttgcttcaggattagttgagtcgaactgttttgttctggttggttttgagtgattcaacccacttctatccttttttttcttccttatgattcagctgaccgatttccgtttctccccttttgtgtttgggtgctgagaaaatacaaggaaagcaaaataaaagaaatgagtagaataaacagtgttttaaatagtagatctttcatgacttaggacactagaaaactgaaacccccactccagcataatacgactatctggcttagctgggttggggtttgaatttttggaaacaaaagtagtggaaatacactagtaaatgttctatgctcttttcctttttttttttattttgctcttccattttgtgagcaacccaatggaggattagttcaacatatttattttattttgtatttttagtcttttgttttatgtcttggaagttcaatttatgctgaattattaacttcatgggcatggcattttaaccccacaaaccctctttcctgcaggcagtttgtttcatccttgttaggcctctgtcaaa

SEQ ID NO: 99991 - DNA, 548 bp, Vitis vinifera
  Intron number 1 from transcript GSVIVT01035361001 (locus G SVIVG01035361001) derived from phytozome v7.0 (chr-ID chr4 ; pos 748382 to 748929 reverse strand)
ctaagaaaacccaacttctggctctacttcaagtggtatgttggtttaattactgctattattgaactcaattttatatgtctggcagcaatttgagtttgaattacaaaatggtcaattcttttcctcaaaaatattggaacatttttatggagaaacactgaagttagtttcaatgagtttgaattatcaaatggtcaattcttttcctcaaaatttttggaacttttgtatagagaaaaactgaaattagtttaaatgtccatgtctctaaagaaggctaaaactgattgaatgagtattttctttgaacttatcaagaatttaagggcttgatccaacaccaaagctgcaattggctgaaaacttaatcatgcaagatgggccatccttgtttttgcccagttctaatacaaacttggtcggaaagacttttcctggtttcagttactgatttggcttgtgctcttttcattttaggtgggtggtttagaattagtcttttgttactaaaatgacaacgcttcatactttttggactcaggttg

SEQ ID NO: 99992 - DNA, 1031 bp, Vitis vinifera
  Intron number 1 from transcript GSVIVT01038688001 (locus G SVIVG01038688001) derived from phytozome v7.0 (chr-ID chr1 6; pos 21000804 to 21001834 reverse strand)
cagatctcccctctctatcggctccagagcgaaaggtatcaagccctaaccctagatctctatccgtctcgtgttcttctacatttgagaaagctcatacactcgcattacgacgccgcacctttcatccagatatgctgtccaattcgatctttaaccttctctactgtttctgatttgatgttttctcaacgtattttcactggatctggagctccatttcttgttctttttttttggagatcgtcttgtttgttaaggaaaatggtgtaatgaggaatgtgacacaagaaggtttgttttaatgtgtttattagatgctgacctgatagatatgttgttgcagtgtgtgatatttcaactgaaatgtggtggctcttcatctttattgtgatagtgattttttttaatgttcttttatgatctttatctgggttttataggtgaagcttcttaaggccaaagggttacactcagacgtgaagaaaaaatttgggaaaccaacaggaacagccttcttttaataggaaaaatatcaaaatattttaaatttctgtttccataagcctattgggtgttatgttgatatttagtttaagacatgcatgatctctgagcattgtgagggtgataggaacagatcagtttttgatgcacaataaaaaagtctgtctatactgctatagtttagtttgaaagaaaatttttgctaatgttttgtaaacaattcgatttttaaatattgtttaattttacatccatttatcttttgttctgattttgatttgttctcttattataagttttttctagccctatggcaattactgtggaattctttaaatgtgttttcctgttctccaaactgaggcttgatgtgccaactccccacagttagaatcctccaacattatagcttctaacattttctgttctttcttgttcttgatttattacattcctgctgtttgctttctatcatctgcctggaatggtcagagtttggatttgtatctaaggagttgtagaga

SEQ ID NO: 99993 - DNA, 902 bp, Vitis vinifera
  Intron number 1 from transcript GSVIVT01035858001 (locus G SVIVG01035858001) derived from phytozome v7.0 (chr-ID chr4 ; pos 4949447 to 4950348 reverse strand)
ttcctccgtcgccaccaccgccatcgaagattcgagtaaacactatcccttttggtttctacatactgtgtttggctgccgagaaaatcgaagaaaattaataattcatacttttgttttaccttttctcagccaccaaactggttgttaacgttgtttggttttaaaatttgaatctcattttatgtgttggtttggctttgtgatgcaagtcagccaaatagttgtatgattgtattagacatggttaaatggagtcttttgaataaaataaaatatttaagatttagtgttttcttttcttttcttttttcctgctttttcttagcaaacgattaaggcatttattaaattgtttgccttctcaatggaatttttatgaaaaaatattctcaatcccagctgcatacttcttaaaatgatttgaacttcagaaatagtcagacaatgtctcaagtggaaaaattgtcccttctaatttttaccttgttggggttagttttcccttatattctgttggttccagagaaaactctggaggataaattttgagttttaggttttggttgttgagtttcttatgaaaaggaaaacctctttgtgagccaaataatgatacaatgtgtaatgggtgattgtttccttccttttggtttctcagcaactaacatgacattgtttcaattatttgtattttttctgaaacattcttccttttctatgctcacattcttgggtcagtttggagttttaaacatagtgggttgattataagaacttgttagggtttctgaatttgccattttagattcttcatcatgaaataggaaaataaagatcttcattttgacttgtgtatttattgtgtttgttttatttgatcacagatcaaccctgctttg

SEQ ID NO: 99994 - DNA, 651 bp, Vitis vinifera
  Intron number 1 from transcript GSVIVT01030496001 (locus G SVIVG01030496001) derived from phytozome v7.0 (chr-ID chr1 2; pos 6189981 to 6190631)
tcttctctgtttcttactcgcgaagaaaacctagggtataaaccctaatctagaatcaccattcttcgaatgttcctgttttttttttttacttttcattatcatcatcattattattatttatctatttatttatttatttttatttttgtgatcatgaacgttgattttgtatcgattaggttgaatgttgagatttatcaaaacgggattagtggctttgaatttggttttgaactgtgttttagcaatggagttaggggttcgtttggttgctgaggaaatggaggaaaaggaaagaaaacgggattttgagtcttgttgttcataacgcaaggaaacaaatgcagttgtatcaggctcgactaagttgattgtttagttaacattttgatttcgtgttcatttcctgttttttctaagcaaccaagcagagcatgatggattcaaaaattggcaacaagggaccctaaaaagaaataaaccactagttagattgcaaaaggaggatttggagttaatttgacttattttaatggtgctctcgtgccattacaatttgaaattcaacatctaaaacaaatttggagaaactgattttgttgccatatgctgtttatctgcaggagcaagtgacaaaatcagctgaag

SEQ ID NO: 99995 - DNA, 1039 bp, Vitis vinifera
  Intron number 2 from transcript GSVIVT01030496001 (locus G SVIVG01030496001) derived from phytozome v7.0 (chr-ID chr1 2; pos 6190730 to 6191768)
gaagctctttcagacatcttttctggttagtgggttctatactctattctcaaaaggcagctcctttctaatgactaatgttgtctattttgtgtatatgtatactccgtggttgatgcgttgtgttatgcttccccgtcatgaaatttaatgtcagcctcaaagcatgtggtgcccgttttacagtatcatatatatatatgtatagtgaattcctgccactcatcaattcctaaggaaaactgtgctttggctaacagtaatggaaaaaaaaaaaaacttcaagtttgaagttcttacaatgcccattagggcaaatatggaatattgcttcgaagtattgcagaaaacattaggatttatttataatgaattcttaatcataaacgtgccaattttacatgtaatctgagagttgtgatagcgactctcttttatatcttttcgtgtgtagtgttttttattatattgaagtgtgattgatgttataggtaaagctgaaaaatagaggttattttcttaactttatatttacagctaattattagatgtggttttgtaaatccttttttttttcttttttttttaagaacttttttttggggacagtatttgcctgggaaggcatcctgtctggaaataataaaattataatgaaaaaaattcctccaacttttgtgccaggtcatcagagaccatgatctatttatgcttgccctactgggacatctaattgttgcctacggcagcaaatttggaaagaatcaagagcccttataccattttttttatcatcacgatagttaaaagtggataccaacttgctactgaattatgatttatgagtttttctattttatatatataatttctacagctttgattctgtcccattccatacctaggattctagacatatttattttcctccatctgggtcttttttaattagtgcaccatgttggttttaaccgagtaataactcttccattttgtaatgacagctcagtcaattccattattcgagacagcatttaca

SEQ ID NO: 99996 - DNA, 754 bp, Vitis vinifera
  Intron number 1 from transcript GSVIVT01032524001 (locus G SVIVG01032524001) derived from phytozome v7.0 (chr-ID chr1 4; pos 28075873 to 28076626)
tacagaaaatacacttgagggttctattctctcaggtatacaaatttcttttgtagttcaatttttttttgtttttttgaagttctatttggtttttgattggcataacgaggaaatgggtcttctcagtccttccgagaaggtctattctcctacttttaggtttgtcttatacctttgcaatgataaaaactggtttttcttgaaggttagactgggtattttatgtgattccaacgttcttgcatagtataatgtccatttataaaatttagtttaaattaatggtagaggttttgatctgttaggacagtttggttagcatcgcatgttcagtgttcgaggaattgtcacgctctagcaatttggtggacttttcctttcaactgttgtttaaaagcattttgctcgaataacttgactggttttaattctagtttgagtagaaaaaccaagggtataattatagaaatgaagtttaaactggggaagctttatattcttaccaaaattgctgggtttttatgacaatctcagaaaccataccattatctagttctatggaatttgcatcttgagaattggttttctaggaaaaatgcctgtttgttcatattgaaaagcatggttgaagaatatatcacaccatacctttggtgttctctaatttatgattccagttattgattcttttacttgctgatttctgttggttttagggcatttttctggaagttttggtatcttgtgcaag

SEQ ID NO: 99997 - DNA, 552 bp, Vitis vinifera
  Intron number 3 from transcript GSVIVT01030628001 (locus G SVIVG01030628001) derived from phytozome v7.0 (chr-ID chr1 2; pos 7292703 to 7293254)
gataaaaacttatcagttactgaatctaatggccccgtagaaaatgctttagaggttctttcacattctcatcccattcactatctcagcacattaaatctttctgctgcagcagtagccttgattatcagcatgaattatatctggttttataaagagttgcccggtgttcagcattcataattgcatttcacatcaagtgtttgatagattgcataactgatagggtagcatattcttctcccgttctgcaattctgtaccatgtgtgtgccctttcttcttaatacattgaggacttattgaacttacattctgatattttgattatcaaattacaggaaatttaacttttgatttcgtttttggagctaacatataaaacttgtatgtgtatgactattacttttatgaaaatcaataggcttcgtcactgaggcaacacaactgcaatgcttttccatcctcttgtgctgctgggtcagctaatgtgatcgaggctatgagtggtagtgtcggctgcatgcttgtgaaccctagttgcagcagaaag

SEQ ID NO: 99998 - DNA, 793 bp, Vitis vinifera
  Intron number 1 from transcript GSVIVT01030785001 (locus G SVIVG01030785001) derived from phytozome v7.0 (chr-ID chr1 4; pos 16101767 to 16102559)
ccttgtggagtgagcagcgccgtgatctggtcccggtattttcactctgctccctatcctttttagtttcatctacccgtctttgtttctgtattttcttttgttcccttttgatttatttatagaatgtgaatgttaactgttctgattatgaagctgttgtgtggaagtttgatttttttcgaatttatttagccgcgaattcatatatatttttttcctttcttctgcctcccccaaattttgcgtgcccatatatttcctagtcattgccctcttgttgagaaaaatctaggggaataaaagaaatcaaagttttctaccttttatttttattttctcaaacaaaaaaaaagagaaaaattataagctgagtgtgatttctatcacatattattgttatcgagtgagtttatctttccaaaacatattgcattgtttctgttttatgggaatattatctttccaaaatggcatgtatatttttaaccatgcatgtgcatgaagtagggacttggacctgagttctcatctcaatgacattgagatatacatggtccagtaagaggcaagtttccatctagttgggatatggtagcagagtaaccctgctggcctaccccacacagaaactatgctacttccatctgtacttttcaggtggatgtgtgtttgaaacttctgattgatcacctgtatgattttgatgctttttgctgttgatgtcatttacgaattttattatggttctttggcaggtgtatttattcaacatcatctacaagcagtgctt

SEQ ID NO: 99999 - DNA, 447 bp, Vitis vinifera
  Intron number 4 from transcript GSVIVT01038718001 (locus G SVIVG01038718001) derived from phytozome v7.0 (chr-ID chr1 6; pos 20639745 to 20640191)
tacagccattttatcaaatcaatttcaaatctttggtgagtcttcgagcttctatcatttacttacttccttgcaatgatgggataacaatttggttttagctcttttcatctggaatcgtaagaactcttgctttttaaaggattactctggttttggttatgagaaattggatgtgactaaaatcagttctatgaaatgaaattcaaaatttactttttccatgaaattttttgtggcgattttaggtttattgaattaatttccaatccaaaatctacttgtatgcaaatccaagaagaatcaatgcaataacttccttaatcagcatgtaggaacgcatatcaccataaccttgcctatgctgctttacaaaataattcatatgtttaatatgtgattttatgttcagctatcgtcattggaggaagaactgtgctcgggata

SEQ ID NO: 100000 - DNA, 778 bp, Vitis vinifera
  Intron number 1 from transcript GSVIVT01033537001 (locus G SVIVG01033537001) derived from phytozome v7.0 (chr-ID chr8 ; pos 19878459 to 19879236 reverse strand)
tctccacacttgcatttaggaacctcgttgctcaagtctttgctgccttacttttcttgattaataatattgaagatttactaaataagtattatttttatattactccttttttttttcttttctttttgaaaagggataagaaaacggaagggaagtgggactcattatttatatatataattagacaaaaataaaaatgaaaaaaaaatcccttcgctaccctaattcataccatgattatatattaggattatttaattaaaatgattattaaaaactcaaattttaaaatttaatcctttattttttttggtttcatattgataaaaatcttcttatattttcttctaaaaatattttttttaaatataatataaatacttgaaatagtcaatgatatttatattaaaaatgagttaatcttcaaataaaaatatgaaaaaaaaaataaatttataaacatgagaagtatttcatcattttaataaattatttctatgtattattattattaggtaattttatatttataatgctttaaaaaataatatattatatattattttatattcaaaatttaaaaattgaatatacaattgtgacattaaaaatattaataggagtaaattttttaattcctttatttttcatgccgtgcgtgccgtttagtctaagttggagtagacggagagtgggactcggatggggaaaaatcatcaaaagggaggtgtttacattagaaccagaaagatctcggattaagttatttgactat

SEQ ID NO: 100001 - DNA, 996 bp, Vitis vinifera
  Intron number 1 from transcript GSVIVT01033830001 (locus G SVIVG01033830001) derived from phytozome v7.0 (chr-ID chr8 ; pos 17388007 to 17389002 reverse strand)
atctaggcaaagttcttcttttcgtcttccttctggtgggtgctcgttaatttattaatttatttattttttctgggatcttttttcactttagccttttgttctttcatttctttttcatttttcttttaaagttgatttagattccagttttgttgttattgtattgtttttcaatctgcctgcacaaccaaattgaacgaatgagcgatcaaaacgtaattaattggtgtggtaaggcattattaagaaggggaaaatcacgatgaagcgatccactaatggagtgaagagacgcctgtaggttttttgcgaggacagaaatggggaaatgataaaattcagtgacttgtgtctttgaaccaaacccctttgatcgttctctataaaaagctatgaacaaaaacccaacattttttgcctttgtttccagtgcaattctgaaagcaacgccttaacccaacagttctttatcacttaatgtgggcctgtaacatatggactagactccaagatatggtatatacttgactccaacttagcaaagtttctttaactacttgtggccaaaatgggcagcagcattatgcattctgcctcagttggggaaaggcaatgcttgtatgcaatttggacagcaaggaagttactcctcttgaaaaagtaaacagtttgtatcttgtatcaatataataagacatgcatgaatttgtgaatcctcccagcactggttaaagcatgatcacaatttggatgtgcccttgatgttcattgttactgaagatgctccttatttggatttttaggcgtttattggaccatattgaaactgtaaattgcaatggttggttgaagaggaattttgcctgtgaaacatgaaatctagtctaacaaattcattcccctctttgtgtctaggctttagtatgttgcttctcagtttatttggttcaatattttttgactattttcaattggaacttaaaaattccaggg

SEQ ID NO: 100002 - DNA, 646 bp, Vitis vinifera
  Intron number 1 from transcript GSVIVT01035091001 (locus G SVIVG01035091001) derived from phytozome v7.0 (chr-ID chr5 ; pos 1414294 to 1414939)
cgtagacaggtgagctgtgttgaatggccttagtttggctgttgctttaagattctgtttatttgcaacggttctagttttcgcctatgagatgtgtgagatgcatattttcagttgcttgtttatatctttgactgtgaatagccatggattgcataatcaatgatttcgtgagaattttataaacgtaagtacaaattttatatttatttgccgggaatttctctcctttgattctaaattctcataagtgtaaattttatatttatttgccaggaatttctcacctcgattctaaattctttttctgtcaacatatgttgaattttcaaccaacaaacttcacttaatgtctaaatatgaaatttattgcaaaatattacctgcaacacgagactcttgtttgtttgtattacaccaagctcaaggagaagaatatgcctctaattgtcaagaattctctctgaattatgagctcatgtgaactgttttcagtttgtgcttcctcgatttagttcttagacttgtatatatatattctaagatttctttgaagtttgctcatcaaaataagtaaataaataaaaaaattgagatttcttagtttttatgttctcgcagggtaacttacaagttgctagtgtat

SEQ ID NO: 100003 - DNA, 703 bp, Vitis vinifera
  Intron number 1 from transcript GSVIVT01036236001 (locus G SVIVG01036236001) derived from phytozome v7.0 (chr-ID chr1 4; pos 8445442 to 8446144 reverse strand)
aaaccagagcggtaagcaaattcttttcttggttctgtcagaatgtaggagaaaaattgaaagaatatccataatcatcgtaagggttcttttcgattatgatccaaattcaaaactttattgagcttgtatcagatgagttcttcgtatctattagaaaccatcaatttttatgtcaaagccaaattttggttggggtccggaggaaatgtagaaaaaattttaaaaaatccaaaattattataagggttctttttatttgtgatttagaaagcaaaaattttatacgttagtaatgggggtgagttttcctgtgtagtacaaacctaaatttttctgtccttcctttcgttttgatcaactggatctagggattaatgaaatgataggtgaagtttttttatatttggttcctgagaaagtataggaaaatgaaagagattcaaaattatgagaaggtggcctttatttttgaccctgtggtaaatcctataaggttggtatatgatgaatttttcaatttttttagaaacctaattttttctgacattttttccctttctttgttctgtcaatcaaatgaatgggctagtaaaatgtcagatcaagtttgttttctttttgtatttttagaaatcaaattggtccttttgtatttgtttaagcagaggttttatcttattgggagtgatcgcaacaagag

SEQ ID NO: 100004 - DNA, 937 bp, Vitis vinifera
  Intron number 4 from transcript GSVIVT01036696001 (locus G SVIVG01036696001) derived from phytozome v7.0 (chr-ID chr1 9; pos 23782950 to 23783886 reverse strand)
accaaggactgcctttggagattcagtatcctgtaagtttttcgatcactttactgactagactgtactagttgacaatcaatcgattattgacttgttcctttatgggtttggcctgagtggattttggttgtttcatctaggttagggtttcttgcttttagttttattctccttctgatttctgggcaagtttagagaaaatggaaaatgaaaaagaattcagaaaccccaagtgggtaccctcgtcttaattggtttactatttcatctttcttgttttcctagaacaaaaaaaatggactcttggattctgtttcaatggaaatggtttccctccaggaaattaaattcgatatgcccaatgatgatgggcatttttgctaaggtgcctgaaacatgaactcttccattgttttaaatgggaacctgctggcatagaaataaaaatgcctttgacattaacatctattatgtgctgtctctgtttcccttaaccacaattctgatggaaagactctagtgtcggtggccgggttgtgttattttttattttttttttgttttattatgccttagacattaacattgctaatgcaattgttttctttacctattcaaacacaacatgcttgataacagcaccttaggaacttgctttactagcattcttggtggtaggattattcatatcaccttaggtgtatctgttgtgagactttattcatgcatgtgtttgcagtctgtctgatgcaggccgtatggctagacatagcatttgaatgaatattggaatgaaaaatatttggatgatgactaacggattggtttttttatttttgtcagttggaaatatgactgtgaggaactaactcacttcattgcatgtttatatcttgtaatcacatttaataataaattgatttttgtttaggtc

SEQ ID NO: 100005 - DNA, 828 bp, Vitis vinifera
  Intron number 1 from transcript GSVIVT01038218001 (locus G SVIVG01038218001) derived from phytozome v7.0 (chr-ID chr5 ; pos 24442673 to 24443500 reverse strand)
cgttgccaaccctagtcatcgcaatctctcctctggtacccttctcatgttattattattattattattattattagtttgatttgtttggttggtgagaaaatcttggaaatccaaagaaatgtttgatctcaagccatttttatttaaaaagatcagaattcgaactgaatggcgggtgattttttattttttttcttaaacaaaaaaatcaatgcattctgtttggtttcggaaagcagaggagagaagaaaggaaaattttgatctgttacattatttattgttttggttctttgaaaagaaaaactaagatttcactgtgctaggcaattggagtgcgctcagctggaaaatcgaagacagaaaagttattatttttattttccactcctgacagtttctcggaatccaaacagaacattgcaatccttttggttgcagataaacggaatcatatcgatgatgttgttttttctttttaaaataatcaatttaactaagctcatataactgtaatcttgtaggttctgtattttttcctctttctaatattttctctacaaccaaacagaactgtgttgatttgtccctgagaaaactgaggaaaggaggaggcaaaatttgaaatcccatgttccatttgcattagaatgcagtttttttttttttctttgttggtgggggcgagttcgggtcctatatgatgaaaaaaattagaaatcaaatttgtaacttcctgtattattcatatatcagaaacccaacagaacataatgtgtgtgcttttgcttcttgtttccttcatagttgcaaaggattcgcctc

SEQ ID NO: 100006 - DNA, 934 bp, Vitis vinifera
  Intron number 1 from transcript GSVIVT01030884001 (locus G SVIVG01030884001) derived from phytozome v7.0 (chr-ID chr1 4; pos 18320213 to 18321146 reverse strand)
gagactccagcctccgagtctataatcgtagcaggtaggccatccctctgttttcaagattctgaaatactttcttggattatgttttccttttccattcaatcaataaactctgcacccctgaatcgttcatcaactgtttgtgttcttggtaaatattatcgcaaaaaaactttgatatttagctatgatgctttgggaactttggttagttagtctgtctctttgaaccccagtttttttttttttttttttttttcttgggaaaatattttctctcggaacaagcagggaatcgaaccgtaaaaattcaaaatctgtaatagatttgtgggagaattgtgaacatgcacgagttctattgggcaataagtttatcatgttaaatccaaatttttttattttcttgggaaaaaattttctcctcaaacaaacagagcatcgggaactcctaccaaagattttctattagattgtaggagatatctctttaaaccctacgtttttttatgttatttggaaaaaatctctcccagaaccaaagcattaggttcgctagaaagttgtcattcccatgaagagtttgcatcagcccgtaggagaattttgaattcaagttgtatgtacggaccattagtctctcttttaaaccctaattaaattttaggctatggttccaaaaagaatttaagaggaaataagagaaagaaaattaaattaaattaaaaaataaaaaataaaaataaaatcaataaattatttttatatggtgcttaaattttatttaatttattttaattctacgatttaataatttaaaatttcataaaatcatatgttgttgggaaaaatatagaatcagggactctaaaagcttgacattatcactgaaggttttgttacattagcaggagagttgtggattgaagttgca

SEQ ID NO: 100007 - DNA, 431 bp, Vitis vinifera
  Intron number 1 from transcript GSVIVT01033726001 (locus G SVIVG01033726001) derived from phytozome v7.0 (chr-ID chr8 ; pos 18308779 to 18309209)
gcttgacgttgtttgattttacataagcttttgaattagaaagtgggctcttgtattagaaaccttatgatgttgtttaattttattttatttttttatttccctttattattcatttgcttatttcttttagttttttggtttctatttcttggacccacatagcttctggcactttaaagacagaaaaaatgtttgtagaagttgatccaagcagggcaccgggttttttctgaaccatcatttgcatggtcttctgttaattcagtttgtcttgaagtgagtgaattatattttgaaagcaaactcagtaggacattttattgtgtcagtaccatatgcatgattaattttgaacttaatccttgtgtaactgttaatgattttatgatataggtttcaataactcctgaggtgacatctcgagtcct

SEQ ID NO: 100008 - DNA, 570 bp, Vitis vinifera
  Intron number 2 from transcript GSVIVT01035901001 (locus G SVIVG01035901001) derived from phytozome v7.0 (chr-ID chr4 ; pos 5521660 to 5522229)
cggtttgttttctatttgtttatttttaaattttaatttcattttcaccaattttcatttgatcagtctgtttctcctttctgtactgtgtttacgtgttaaaaaattgtaagtttggccttacgcactaggcacaactgcctattgctcaattgcaaagactaacattgctgtttggtctaactattgaattttaaaaaatttgtttgcctcattaatagttatgcaatctgtttgaagatatgtttgagtatctgtcttcattaaacttttcttggaaaatttcaggtttgttacatttgttgtatattaatttgaaatacatagctgtgatttgaggccttttaagtttcagatggattgacaatggtgttcaagcatatttttaacattcgatagaagggattactgatttgaaatgtttctccgtctattgcagttgcacttgtcctggggtttatttgtcatgtttgttgctcttatttttgcagattttgagaatgcaaagttttacttgacttttttttcctctctctttttaatttcatcttgtttattcctaacagaaag

SEQ ID NO: 100009 - DNA, 695 bp, Vitis vinifera
  Intron number 1 from transcript GSVIVT01030573001 (locus G SVIVG01030573001) derived from phytozome v7.0 (chr-ID chr1 2; pos 6846788 to 6847482 reverse strand)
gatttgaaccccggttgcaaggtaaggacttaccacatttctctctctctctctctctctctctgtttttttatttgtctgtgttttacattttatggtctcttttatgtctggtgtaaagtcatttttgatatctataaacatagaattatctttttccaaatcaatacactgattatagtgacttgattatgaagaataagaagcaaaaacatggctgaagttcaccataaccacttcaatttgcagaaggattttacaatgggatagttggaacacaaatggagtaactgactagctagatttttccatttccctataaagatcgtgcaagtttgtgtttttctttccaaccttgtgcactctgagacacaaaccagtttttccaacccagttctctgactgattctctggcaaaatgaaacctaacttgatgaaagagggctaatttcatagagatggacacaagctagaaagaaaatgaggtatttcctcattaatgacatgaatttcaatactttttctctagtaagttccacaattctgatgaaagcatcattgattttgactctttaaactctttatgcatgtagttagccatatgggtcttgatgcttttacttgttgggaatggcaagtggataattttcttactcttttgtttccacaaggacaagaaaagcataaaacaatct

SEQ ID NO: 100010 - DNA, 939 bp, Vitis vinifera
  Intron number 1 from transcript GSVIVT01031759001 (locus G SVIVG01031759001) derived from phytozome v7.0 (chr-ID chr3 ; pos 4120724 to 4121662 reverse strand)
tcgattatcttaaccagaaggtgcgtttggttctttgagtttgcctttgtttgggttcccgggacatctggggtgaagagtatttttttttttgaattttgtgttgtatggtttcggtattgcttttgttttattcgttcccaaaaagtggaaaatttaagatactgaattttatctgctctccctcccttttacttggttatgagatggtgagttgcctattttttcgattgactgcttatactgtgtttgtgggggagcttggtgtgtaattctgtttttttggctatatcaataacttgaattttataaaagattttattctgttccttacctaaaaaatcgagggaaggaaagaaaagagaattttgaacagcatgttttagccgttcttttggcccgaaaagttggaaggttcgcatcaactgatccgatatctttgtattgggcacaatgaagtgaaataggttttgggttaataatctcccaagtaatgaaaagtttaaaatcgttattcatgtttagcaacacatgcctcatccccaagaaactgagggattgttatattaatatttcaaagtgagcaaaattttcatggaggcaatgttgttttaccttcttttctctgaggcacagaagatgactcgattagataacttcaactgtctaacggtgctatcaagtcctaatatttggaggttaaactgatgggagtctcatacaacacatcaaaaaagatatgccaacacacccaaagtctatgtaccataggttatatataatcaattggcttatagcttactgtttgggctgtatcattgaattataaaacaccttttgtaaacaattttattctttgtctcactttaaatgcaagttattaaaattatattaccttgtgcagttaggtgcagcagcagctgttgttgtaaaagaagg

SEQ ID NO: 100011 - DNA, 554 bp, Vitis vinifera
  Intron number 1 from transcript GSVIVT01035132001 (locus G SVIVG01035132001) derived from phytozome v7.0 (chr-ID chr5 ; pos 1715688 to 1716241 reverse strand)
tcaatttcactctacaggtgtctctctatctttatatattgtttctttgattcccattttccccctctgtttggttgctgagaaatccaatgtcaagcaaaagaagtaaaagttgttgatatttgggctctgtttgactgccgagaagatctagaaaaatgaaaaaaaaaaaaaaaaaaattggaatttgagtcataattgaactgagtaaaccgaaacctgctgatccaccccattgggttcattgaggtgggtatttggttttttagaaattttttccttttcctctgttttatgggcaaccaaactgagtgttttgaattctgttgttggtctaccaaaaaaatgaaaaactgaaactcaactgatttaaataattgtttcagactctcgggtcttaaacaatgaaaaatgtgatatccaaaatattaacttccttttactttttgaatatttgaccacttgttattgtctcttgtgattccatattgttcttcatgtgtataagtttgtctgaaatctgaatgagactgcttgcagcaagcatacttcaa

SEQ ID NO: 100012 - DNA, 827 bp, Vitis vinifera
  Intron number 1 from transcript GSVIVT01033721001 (locus G SVIVG01033721001) derived from phytozome v7.0 (chr-ID chr8 ; pos 18352853 to 18353679)
gccctattttcctctgctactctcaatcctcccaggtactaatctaatcttgttacttatttttatttttctgcaaccccgtttgattcccaagaaaatccatcccccattcgatttctgggaaaattcatcctcgtttgatttccgagaaaatccatgcaaaacccccaaggaaaaccagaaagattgcttttttttttttttgcttcctgtgttttctggatctgttctaggggtcgctttgcttttgtgccattggatttaaatttcacgaaccctaaatccacgatttttgagccaggctaaaaaacacaacctttgcctgcaaatcatgatcagattttgtcacctgtgcgcgggctagactggtaggaaatatcgggaaattttcagaaaaatcggaaaaaaaatcggctatacaaaccgaaaattcgccgataaattgcagtgtccggctattttttgaagatttcgccgatttttcgtctgcatccatttttcggcgattttaaccgaaatttggcgaaatttctcccatcgacatttcacccccctctttcgtatcgccgaccaccgaaacccgaaatttcggcgaaaaaaatggaaactttcatccttgcttttatgttccattttctaaaattaaaaaaagagcattttgaatagaaacggaaagttaaaaacggggaacggagtagagagtcggtttgtaattttgtaggagtgaaaaggggaatggttacaaaataggggttctaaaggcggtgagcgagcagtaccttgacttcactctcaaattactctgctgtttcctctctcagtttggc

SEQ ID NO: 100013 - DNA, 1054 bp, Vitis vinifera
  Intron number 2 from transcript GSVIVT01033721001 (locus G SVIVG01033721001) derived from phytozome v7.0 (chr-ID chr8 ; pos 18353816 to 18354869)
cacttgacgagccgaaggattcgagcatccaggcggtaagacctccttacgattatttctcatgttttatatgaatttattcgatctacttgcttgctgagaaagaggtcgaagggaataacaggagatcaagttttatcacaaacgcttgcgaatttcgagccctattaattggaatcagccgctgatcatattctaattattttgtttattttgggtagattctttatccgcgaaatataaccatgagaaatatgaagctctgaactttggtgtttctggattttttgcccttttttttgtcagcaaccaaaccctagattgaaggtgtttttattttattttatttttgtttatatctattttttaaattttattctgggttttttggagggtgggttatggtaggcgggggcggcggaaagaagggcgggttggtgttggtcggatggtttggttttgctcttaaggtaatgtaggtcatgacaagctattcgagatctcttctcgatgttgttctcattcccccgttgaatgccagattctgtttgattgatcggaaatgttggggaaaaaatagatctggaaaatttctaatttactctaatgatcttactgctggtttacttggctggatgaatgtatttcacagggcttcaaatttcgattttcttctattatcttccattttctcactgaccaagctaaggataggaagtttggtttggttttggtctttatgagttttgttatcaaataaatttaggcccgtcttcaatgtgtcatcattaaggtttttaaattttgattgttgatgcatttgtgctttaagtaaattttggctagacttgcccatatgttgtggatcggatcgccgatgcattttgttttaattcaaggtttggttttgactgtgatatatctctagtttgatataatttaggttgttgaaagtcacccaaaaagggggtagtggtgttagttgttattttttttattaagttggatcctaaatgcaggttacttctggtgatacaccatacacttctgccag

SEQ ID NO: 100014 - DNA, 660 bp, Vitis vinifera
  Intron number 1 from transcript GSVIVT01032377001 (locus G SVIVG01032377001) derived from phytozome v7.0 (chr-ID chr1 4; pos 26811735 to 26812394 reverse strand)
aagagcacaacccggaagttcccaaaagcatacctgtatgcattgctttgcattttcgttaattgattttttttttttgattcggcaaaccgtgttaattgcttttaattttcggtatgcctgtattaaaaaaaaaggaattttttgcggcctttattgagattcaagaaacagggaaatattttacaatctacttcgtgtttttgatttggtgaaggcacacttttattgaacaactggtagttattcaaatttttattaattatattgtatttttgatctggcaaaatcgttatgggcgttgtagtatttttggtttggaaaagaacatgcggatatgtaacaatttgtatctgttgagcattttgttgattatgttgaaatgcctattctgctaaaattatatacgtatgtaacaacaaattgtacttacttcaacttttttgttaacattttgtgttatcagttgagacaaaggcagaccgatatttagtgatttatattgtttgctagttgatagttattttgttttatgttttggtaaaaagcatacattttctgtgcaattaattgattttttttttttttttttaatttttaattctggagttttgattaggcaaaaattgttgttttcactgtctccaacaggtttgtgat

SEQ ID NO: 100015 - DNA, 523 bp, Vitis vinifera
  Intron number 2 from transcript GSVIVT01032988001 (locus G SVIVG01032988001) derived from phytozome v7.0 (chr-ID chr1 4; pos 24888642 to 24889164)
ttgaagtaaggtttttctcttctgacatttgaagttcgttttctgtttggctgatgaggaaaaccgagtaaaatgaagggaagtgcttatttattttgaattttatgttataagttgatttgaatttgtagtaaaatccaaaaaaatatctgcaagagtttgtacatactttctcaagttcttatccacaacaaatatgttacattattgatttcaccctcctttgaatcagtgctcatagtccatcaatatcacctgatatattaaaccttaatttaatggttgagatagttttctatattttgtttttaattacttgtattggtctcagttaagtggagattttattgtctccgatggaaagcgtattgatttaaactttcatttttcagcagcaaccatatagagcattaatattttttttccactatgaatttgaagcttgtgtgaatgtcaagtggttttgattggttacttcacttgctcaggcatttttccagaggtggtggagacagcaaagcaa

SEQ ID NO: 100016 - DNA, 1005 bp, Vitis vinifera
  Intron number 1 from transcript GSVIVT01034781001 (locus G SVIVG01034781001) derived from phytozome v7.0 (chr-ID chr1 8; pos 21443527 to 21444531)
cttggtgcggtcactgcaagcgtctcgctcccgaggtttcattcttgatccatcctttgcttgctttcccataatcctcagggaaaaaagaacaaaatttcatttgaagcggggagtgattacttcaattcatgaaatgcaaaatttttacatttttttttggtgctttggttagtgatccgtatctgttagtttggctgtactttttttttctttaatgatcgttgtgggcttataatggtggattggtgggaaaaggcggatcttgggttcgtgaatgggtgatttggtttgtttctaatgcgtgaatttggtttttgatgaatcaaagctggtgattcgcgttaatgttggcttttatttgtttctatggcgagcaagttttttcctgagatggctaaatggcctcttgttgaacatatagaatgcccaaaagttttagcgggtattggcaagtgtcaattgaagtaacaccttgggaaaatcctactgcctttacatattttagaattaatgcaatcatggttctctgtgaaatttggagggatttagccgccatagattcttcatataaaattagctcactgttgtcaggatgctgcctgaaataattaggttttggtatttgtatttgtatttttccttcataaatcggcctagtgtgtgattgaatggtggtaaatgatgtttgttccataccaaaaatttaacaggaagataagacaacaactgttgtacctttatatttgaattgcgctgtttaattttctcacatatgtgtaccttattgaatcattgccttttttgtctaccatgtgttctataagaagtttctttgtcgcccttttcacatgggtaacagcattctaattttctgcacatttgagatgcttattttatggagtttggtaacactttcccatattcttttacatcaccatattgaatgcaagacatgttttgaagcaagaaagataacaattctagctgttgcattgcagttag

SEQ ID NO: 100017 - DNA, 997 bp, Vitis vinifera
  Intron number 1 from transcript GSVIVT01031001001 (locus G SVIVG01031001001) derived from phytozome v7.0 (chr-ID chr1 4; pos 20666981 to 20667977 reverse strand)
gatagagcgcgggagattcttgaggttgagtttctttctctgtctgcttttgatttttgtgatgctaatatgtgcttgaaaaatcaaatagtgtgttatatatgtatattttcttttcgatgaaatctgttattgtgtacatcgttgttgaagggcactttttgggtaagctgaagcaactttgcctggtactatgagttccataatttgagcaacctctagctgttcttttaacaccaaattatgctatgtcagtatgcacgaacaattaggagcctccgcatgattggttcagttcctagattgaattttcttttagtgtgtatgaaattgctgaatgaaggtgagaatcaagtaaaaggaagggcaagatgtcattcaacagagtagaagttgaccaagtgtaccaaagctcatcttggtctggttattttttgtatatgtggtgtgaacttttcatttttctccctttaaatgatttaagtaaactgaatatgaatttatcttaggcattatttgtttttttaactttttgctgaaagtaactttcagatttcagtttatttgtgttttgtactttttcttaacttatcacttatttcttaaattttttgactgaatggaaagagctaaaatattttgccttttctaaatacaaaaagtaatgtgttaattttacttttcttcttaataattaatagaaataaaatattttaaaaacaaataacttaacacttaatactattaaacactatttagttataagttctatttagaattaattaaaaaaacaaacattaccttaatctgaactcctaaatcttgtttatgctgctattatatttatatttactagtctctctcactctctctctctctctctcatgttttccttttggaagcttcttatggttgcaatcttaattattattattattcttgttgttgtttttgttgagcagatcaagaccagaggcttggttatttggagtaagaa

SEQ ID NO: 100018 - DNA, 927 bp, Vitis vinifera
  Intron number 1 from transcript GSVIVT01035566001 (locus G SVIVG01035566001) derived from phytozome v7.0 (chr-ID chr4 ; pos 2362353 to 2363279)
gttcctcagtcctccgctgccgtcctccacaacttgtcagtctctccattcactctttctcttgttttctcgtttggattttggacttgtgatttctcaatctcgattctggttttagcttcatttgatttgcttttcataccgctgttgttggtcttggagaataatttgaatggatattgctatattttcgatttttgctcttacaaacaagaaatggagctcgtgttctagaatcgattagggactgtttggatttacacttccttgatttgataaccgatttcgtgtttttcagaaaaaaatgaaattgaggatagccttaagcttgtctgtttgatttttccttatttgttttatctgattggttgctgagaaaccggaggaaaaggtaatcacagaaaaaattatctcctcactctttattatttgttcagggggttttattagagggatgaaaaggcaggatcttgtgttcctgcacctttgggtcattgcattttgatattggggaactctaaaatggtattgagtgaagtagaggcattcctttaatctagtggccagcttatgagctttgccaaaggattttcccccctagagttggtagtttttgttgggttagctttgtatccactgctctgctgttttagctcttttaactcttttggcgtggcttcttctgaaggatatctaatccctttgttgggatgcctttgattctgttttttaattaaagaattcaagaaacatgaattgttactatcatgtatgaagtgattgtgcatagctccagcatcctcattctttagctattatcattttccagatgtaacttggtaaggtcatttattctctctctggttcactttgaattggttctaacttgcagccataggtttagcatcaaaggacgtgtttatcctg

SEQ ID NO: 100019 - DNA, 535 bp, Vitis vinifera
  Intron number 2 from transcript GSVIVT01034179001 (locus G SVIVG01034179001) derived from phytozome v7.0 (chr-ID chr8 ; pos 14598016 to 14598550)
atcaccactccccctggcctgtcagtttttatcaatctccgcaattctttttgtttctatgaattttgatctgacttgaaatagtgtttgttaaaactagggacttgactatgcttttgtttcaagagtatcttctgctgtacttgaggcttaggaaaaagaaacaaagaaaaaatcaaagggaagtctctaatgtgtgagacctctttctatgaggctgtgaaatttgtttgataaaattgatctcatatttcctatttaacaaacatttttaaatggggtctgttttgtatgcatatggaatacaagcacatgctgtttccggtttttatgtagtgaaaaaattgtttgaatcttagcaggttgagcaattgagcgaattaatcatttgaatgatagaaatatatgacattcttgtttgttgtaaaaagaaagaatgtaaatcttcaaactgcatgaatctagaaaaaatgttaaaagtttgaagttgatttatgcatttaaaacttttgcaggtactatctttcacttgccc

SEQ ID NO: 100020 - DNA, 918 bp, Vitis vinifera
  Intron number 4 from transcript GSVIVT01038236001 (locus G SVIVG01038236001) derived from phytozome v7.0 (chr-ID chr5 ; pos 24538031 to 24538948 reverse strand)
cagctttgaaaaggtcagtattcatagcttagaagcaattgcatgaggaggcattcatcaccacaaccatgctaaaagcttgaaacagtgagctttcatgaaatcctaatactaggctcatggcgtaagtcctctagcagtagttctcacccactttggtagcttcatctacaaacataaatttctacctacatggtctaagaaaaataacagagaaagcatacaatttatctccatggtctgcccaactattcttctaaaaatcagtaaattgttgtctttagcaatgcaaactaggctcaggctctgcctgggatagcatttaacttcggtgcttaatagtagaaaaagtagaagtaaaaataactaatgtgggaactatagtttaaaattacttgtattaaagacatcggtaacgatattttgtttttttaaattttaattaaataaaaatttacttccatgattgtgtttgaaagtattttccaaagcactttcaaacagggttaacttgaataactctaatgtcatcttaacacccacaatgtataccaggcaaacgccaacttgagacctaaagttaatggtagggtctagagctcctcacttgcaaatagttctggatcatataaccgagtagttatcggccataagagagactagaactcaaaacctctggttaattatagcttagatatcatattaaactaccaactatcccaaaagcttatatcagaatatgattcagtaacatgtatcagagtcaagtgatatagtgataagggagcacgatatatattaatatgatactaaccattacaatgtaataataaaacattcccaagaaaagcttacagtaatgattttatttgacactgaatgcaagttgttgtgggattgttatcaggtactgtcctg

SEQ ID NO: 100021 - DNA, 890 bp, Vitis vinifera
  Intron number 1 from transcript GSVIVT01038617001 (locus G SVIVG01038617001) derived from phytozome v7.0 (chr-ID chr1 6; pos 21449353 to 21450242 reverse strand)
tcaaggccaagatccaggacaaggaaggtaatcgatcatcttatgctttcctcttgtttctctggaatatgtgataaagtaatggaaaatgctagaaaattattaaactagaaattttgttcagttttcatgtgtttaatggaacgcatcagtttgttgaagttctgagcttctctcttgtaaaggtttaatgggtgcttgtttagaaattcgagagggtaaaagaaaatgctagaaaatgattgagctaggttcatgttttgaaggaactaaactgacatcgatttctctaagatccgagctttttatttcttgtttcttaaggtctgatgtttgatatttgtcggtttgattgtttagggacttgagagttgtatcaattttcgacgacctatttttttttttcccgtgtttttttaaggtccgacatatgatatctgttgacacgattgtttaagaatttgagagaagtaaaagagtaaaaaaaggcttaaaatgggaactggttcgattttctgtgtgtacaatcaaattgatattaagatcttgaatgtctgatctttttccttgttttgtgaggatcgacatgtgatatttgctggtgtgattgttctggattagaaggaaagtaaagctaggtggtaggaaatctttatgataggaattcttaaattgaactaattaaattgatgtcaattcctcaaagctaggtgtgatgttgaaggaagtagaaagtacatataatatgcttaagatatgaaattgttcagtttgatatagatctcttgaagatctcaacttggggtttcttactaaaggcatgctatgtgatgttttgttggtgcgattgtttagggattcctccggaccagcagcgactgatctttgct

SEQ ID NO: 100022 - DNA, 792 bp, Vitis vinifera
  Intron number 2 from transcript GSVIVT01035678001 (locus G SVIVG01035678001) derived from phytozome v7.0 (chr-ID chr4 ; pos 3248739 to 3249530 reverse strand)
ctaggccttctcttgtggtcagagattcagtaagaacactttaaccttgccccccctctctcttttatctctttctgaaaaaactctccatttttgttttttattgcatttttgtctattccagcttaaaaattttttaattcaatgagccaaacaacaaaaaagaaaagaaaagaaaagaaaagaaaagaaaagcttgttttggatccgaagtaagatacccacttttgaatttttgtagattttgttatatttgggaatgtatgaggaaaactgagatgggattaatcatggtatgtttcccaaaaatttcacaagcttcttggttaaaccccataagggtttcccaatttttctttttcttttttgacattatgaccaaaccccatttcattgtacaaaattgatcttttgaattcattgatgggcagtttgcttaaagtttgattttggagaaaatgcatacaagaaaaaataaaaatgatgcttcactttcttgggattccaaagcatgcgcaacatgaggaggatcttaaataataatcatagtaatcatgcatcccttttagctatgatcttatgatttttctgagtaaaaaaataatccttattaagcaaaaaaaaaatggtgttatatggcctggatgcaaccagccctacacaagggcaatggcttcgcacatcaacccatcttttgctctctttttggtcatgacttcctccttttaaccttttctttgtgacctttttttccccttggtgttgatgaaggtgcacatcctaccacgacag

SEQ ID NO: 100023 - DNA, 754 bp, Vitis vinifera
  Intron number 1 from transcript GSVIVT01034966001 (locus G SVIVG01034966001) derived from phytozome v7.0 (chr-ID chr5 ; pos 508360 to 509113)
ggggtttggtttccctggccgtggagggtctccaggtatgcgaagatcgaattgaaggtttatgagttcgtcttctatgttaagctgctgttgttggtagattgtttcttagggtatcctatgttttagaactttatattcactatatctttttgattggcgtacgctcactatatctatgcatatgtcaatgttcgtatttgaaaattgttgaacatttgatgaaattatggagaaattgtataaattttaaatgcaactttagtacatagtcgtggataacaattaggattgaacattattaaaaaaaaaaatggatatgaattcttcatgcctgttaagttctgttttacttttggctgggatggataattagtcagtgagaagtcataacacgtttcaggcatctgaaaagaatatcaaattgaataccatgatgccctgtaagagaagttgaaattcaaagtttaatttcatttatgaatagttcacatgaacggatgaacctaagagactgcatttttcaaataactcgtatgtctgcttaaccacttggcctaaactgattaagcatctggctccttgaacttgagatttgtctggtcattttatgtggtatatgcagatttgctacattgttaatgtagtttcaacctatgtttgatttcaccctgaatttagttattatcatttcccttttagtatttttcagctctttctcctaaggtactgatatgttttttgttagatcgtt

SEQ ID NO: 100024 - DNA, 829 bp, Vitis vinifera
  Intron number 5 from transcript GSVIVT01036596001 (locus G SVIVG01036596001) derived from phytozome v7.0 (chr-ID chr1 3; pos 18850365 to 18851193)
acgtatgtatccatagtcctcctgtctgatgcttagtgttttaatagtggattttatttttctattctcgtgagacaattatcttttatggttaagtttcatattgttcttctgagagttgtgactatgaaattgaaaggatagctttaaaaagcttttgaggtttccacctcatgacccaccttaatgcacaacttaatgctcatgggaatagaatgttcacaggtcacacgtgaaggtgttatgctctcattgctcattcgttttgaaatttatgtaaactaaaatgtgagtaataacttattgatttttaatggccttttggccttttgaaattcctaaaaactcatgtcaatgattatttatgaaacttggattgatggctgactacctctttcttgagcttgtgaaggcttatggcagaatatgttacttcttgaataatatattccatagttcacaatgggttgggcttcctgatcactagtctttgattgctgaccttccagttggactggtaggggcaagagaaatgttgtaaaatttatcgaagtggtgcttttatgttcctgctggtgcattctatgagtttgaacagcaccacttctttactgattactggttttaaatgggtgatattccttttgacacacaaaagcaagctgaaggtttcttatgacatatatgtgtgtgtgtgtatgtatgtatgtatgcatgtatgtatgtatgtatgtatatgttactttataattggatttaaagtggatttgcaactcttttgcacatccattttatgttttatctcattgatatgctgataatttcaggt

SEQ ID NO: 100025 - DNA, 936 bp, Vitis vinifera
  Intron number 1 from transcript GSVIVT01036060001 (locus G SVIVG01036060001) derived from phytozome v7.0 (chr-ID chr6 ; pos 21267782 to 21268717)
cggagaaatttggacttgaagctggtctctggaaggtgcccatctaactcctctttcttctcctcgttttcttttgattttggttggttgtaatgctgcaattttattgatttattgaattatttcatactgctaccgccttctacagtgaagctctgttttctcctttttcacttggatgagtttcaaggttttatatattcaattaccctccttttggttggcgagaaaactgaggaaaacatagaagaaagcacgattctgaatcctgagttccacattctttaggtttccgacgaatgaaatacttgaatagagagttgaatgggggatattgctgtcttgggtgccgaataaatattcaaaaaaaaaaaattatttgatttttattctgtatttctatgcaatcaatctggggtatcggaaaactccctttagtgtggtgattcagtggttgcagaacaagaaattagtgctatgttaataacaaagtgcagtcccagaaaatgataggcagtgacttcattctattatttttagattgctacttccttttttttctctctttttgaggcataatctttgaatttttatatttgtctttcctacctttttctaagcagccagtcgactagccatggattttaaaatatattcagcatttccctcaccaaggaaaaatttatgctttgcatctgtttttatttatttatttttttttcctctattgaataccattcaatagaatcagtagaatattaatggtaactcttcaaaaaaatttaaattaaaacagtgtagtaaaattaagaaaaaatttgcatctttagatgaaaaggaatttatgtgtaataatcttgtggaccataaatctaattcctgtattcctacttggtgttgaatttattgaatgagtgtagatattcagctcaaaag

SEQ ID NO: 100026 - DNA, 861 bp, Vitis vinifera
  Intron number 1 from transcript GSVIVT01031536001 (locus G SVIVG01031536001) derived from phytozome v7.0 (chr-ID chr6 ; pos 17393964 to 17394824 reverse strand)
ggaagaagaagattcttctgtcaatccttcagagagtagaattggaatattatagggtcccaagtccctataatacagtgagccaattttcgcaagttgttttgtatttcctcctttcttacctccattctcactacgtttttgtcactgttcttctgtttcatcaccacctccgcatacgatctttccatagcaaggttccccccaccccactctgactgcttttgctccttccttctcatgaggcctcccatttgctgtagtttctccgccatgatcacccatccccctttctcccccttccctttcggaataataatgctatgccgtttcttctccagatcgaccacccccagcctgaggaacagccccgctttgttctcattccgcaacagggagtaggatctcccactttctttccactccctttcccatttacctcctttcccgttctttatacaatggtctaggctctccaagagaaaccctagactcgccgatcccagtctaacccaagaagaaatccctttctttttctcccagatcgcgacctgtatttttccctttttctcttctgcatcgatttcaaaaatcttggattccacgacgaagctgattctctcccttttccttcgcttcgtcgcgctctcatctccctcatcccctccgctctctcgctctctctctctctcgcgttccctcatctccctggggccaataagaaattttgagcttatgtaaaggggattttgaaattaggggcaaacagaagataacatggcattggagctgttgaaattaaaaatgctctgtgtctaaattacatttataaatgtctaatggtttagatagggatttctc

SEQ ID NO: 100027 - DNA, 928 bp, Vitis vinifera
  Intron number 1 from transcript GSVIVT01031188001 (locus G SVIVG01031188001) derived from phytozome v7.0 (chr-ID chr1 4; pos 1373310 to 1374237 reverse strand)
atcgtcgtcgagttcataaaaaacgaagagtacaagtatgtagtggaattttaattttaggttccattttttttcttctgtttttccttttgattgctgaaaaagcggatgacagaaaaagaaagagatgtaaggttcgtgcttttcgtattctgagaaaattaaggaaatgagaagtttggcttattcgttcgctgagaaaactcaggagaagcaaaaaaattgtgggctttttttttttttgtttgctggggaatttgaggaaaaagaaagaagaaaagaaaaatggtacgttatcacatacgaattggtactcactgtcaaatttctggtttatgggagaataaaggaaatgagaagaaaagaagattgatgttgttttatgttggttttgttgtcattttctaggtgtaattcatctttaattttcattctcctatttatgcattgcttgctgaggaaacaaaagtattatcaattctccatctgctggaatgttggctgaaaagaagatgaagggaaatggaaaatgaacagaatgaagagaagaaaattttctgtcctgacttttatgttgtactgggtctaagtaaaataaagaaatcggcttgagatcgaatttgaagtattagaatcagttgagtgaagtttctattttctgcagtctcaagttcaagattcagaaacttagtttatttacctgttttgtcggtttctcatcaagctaatggggaaaaatcttaattttttttaatgctgtaagaaactgcaattcattgctgctgtgttgttatgtttttatgcatgtttcttttgcagtgatctgttccttggattttacaatttgtaatgtaatatttgcttttgcatagattgtttctattatgttttgcttttgagactcaatttcatatttttttttgcagat

SEQ ID NO: 100028 - DNA, 999 bp, Vitis vinifera
  Intron number 2 from transcript GSVIVT01033614001 (locus G SVIVG01033614001) derived from phytozome v7.0 (chr-ID chr8 ; pos 19296441 to 19297439 reverse strand)
agacattgttgttgctgcagttcgtggattcagtattgacatttttaattttattttaattttgacgtgtggaaatttcagtttatttattcagagcaatcttctcatcagtttatctaggaattggtaattttattttttaacattcctttcttaattttagtaagccaaatagatacatgatgcagtagattattacatgaagtttatgtgtttattcagaaaagaattaagatgttcctttcctttccttgggttgtgctcagctaatcaagaatttgttgtttatgataaaagaaatgccttgcacaacactcttgctgacaaaccacccttcccctatccgaacctccagattaagagacttcttattcctaaatctttcttccccttctttctgtgaagttgaatgagggcattttggaggttgaaagggagttatttgctaaaaatttcttaggatagctattacataatcttttgaccattacttttatctttcaactatggcactggaacaggctattgggcatcatagactcttccacgaagatgtttccaagcatgccctttcatagccaggatagtagttgggactttttatcatatctgaaatcctgaatttcttattcttattaatataaacaaacaacaacctcagacttcatcataagtcataactgacttcaacattttcttggtgcataacctcaatgatttttacgcatctgtgctgattgccatttggacttcatcattctgtcttctagtttctttagaaattgagatttttcaagacctttgttttttgtattatttgctctttattaaattgagttctagttcagagttcaagtaaagtggttcatttctcatgtaattattagaatatatcttatgtgccaaacctgatgtcttttgtttcttgtccactagataatggtctctctctctctcctccctccttccttccttgtcttgtaggcactgtttttgctt

SEQ ID NO: 100029 - DNA, 711 bp, Vitis vinifera
  Intron number 1 from transcript GSVIVT01033614001 (locus G SVIVG01033614001) derived from phytozome v7.0 (chr-ID chr8 ; pos 19297463 to 19298173 reverse strand)
cgctttctctaaccactcctccaagttcgattttggtacatttctccttctctcgtctcccctttgctttctctgattggtcgcttaaaaggtgtggattttcccatcttaaacttttcgttgttttggggtcggataagaagaatatacaagtgttttggttagtttatagcgggagaaggaaaacaacgtatcgcttgttctgttttagggcacaaaggcagcagaaaacgcgagacgggttttattttcatttatgggtttcctgtttcattggttttcttcataaccaaacagagggtgggggtttaatgttatcattttctttcacggtcctacttattagatcatattgtcagactctcttcctcttttttttttttttctttttttttttaaatctctctctctctctctctctctcccaatctccctctagtgggatgaaaatgaaggaatgagagctgagatacgaaaggcttcttgtcaattgtgtatgactctttaatttggcatagtttagattagtttttttttttttttgttttttttgaaatctaaatcaatatgaaaaataagtgtatattttaaaaattttattccgttatattctcaatgataaaccagaggattgacttttgacatgttcttttgagttgaattttctggttctcagatagaatttttggagaagattgtaaaactgctgag

SEQ ID NO: 100030 - DNA, 428 bp, Vitis vinifera
  Intron number 3 from transcript GSVIVT01032639001 (locus G SVIVG01032639001) derived from phytozome v7.0 (chr-ID chr1 3; pos 1952815 to 1953242 reverse strand)
cgcagcgtgtgtggattacccgaaattgtaaggttgtactgagaattctcaatcatctagttctgtgtgttctgggttttgatcattgttttaatctaaatgttgtggtgtttctgcactaaccattattctgtttggtagtagagaaaagaaaatgttttctgttttggaaaatggcactctcagaaaccattcctgagagcatttcttcgaatggattaatcgaagaactttgaagtgtttatttttcatgtatcaagaacagcaagcatttagcaatttgacatgattaaaagaaagttcattactttcatcttcaaaaatgaaaatgtctttaatttcagctgccaaacaggtcctaatattttttatgaaaccttttatgggggacagggattgcaggagaagatcaaattggttcctattga

SEQ ID NO: 100031 - DNA, 682 bp, Vitis vinifera
  Intron number 2 from transcript GSVIVT01033524001 (locus G SVIVG01033524001) derived from phytozome v7.0 (chr-ID chr8 ; pos 20029562 to 20030243 reverse strand)
ttcgatcactttccctgcagttttctcatttcacggtacttttttctcaattctcgccattctttcttccgttctgtacgcattttgtagttgaattttagggtttttgctctgcgatctgcatcggtttattaatttcgcatttttggggtgttgattgtttttatttatttcctttattggttcagaacgaatccattgtcctgtttggttggggtttagggttttttttttcctctcgtcttttgaaaagtaaataaaatcaatgcgaattttgctttctaacgcctagagttccgaaatactggatgaaagttctttgttttgatgttctggtcttgccttgaatccgctcaggagccgtttgattcgtgagaaaatgtaggtgcattctaatttttttacttttacgggaaaactgaacacaactaagtttgatgcagccttctggcttaattgacctaggtaattttcatttattgggaaaaagatgatacaaacgattagatccaattttttttgtttgtttcgtattgttttccactgatttttcagtgttcagacttaggataaagtttttctttcacgtagttgctttctatttgcaagtgttaaatgctgttcaactgctgatgttttggtatgtatacaactatggtcagtacccagtcagaggagagtg

SEQ ID NO: 100032 - DNA, 659 bp, Vitis vinifera
  Intron number 1 from transcript GSVIVT01033524001 (locus G SVIVG01033524001) derived from phytozome v7.0 (chr-ID chr8 ; pos 20030217 to 20030875 reverse strand)
tttttttttcttttaactttaaaaatcgttgaaaataatttttacttattttttaaaaactattatctatttcattttatttttaaaaattattttaagaaaataacaatcaaacaatcatactgccaaatagactcttaatattttagaaaaaaaaatatttttatttattttaaaaacaaaattattttcattaggcaactaaacttgaaatcaattgagactcaattcttagattctttgatgagactattaattttcaaaaataaatttggattccaaaaaatataatttatacgaaaaattatttctttaatgaaaattgaatagtaatattattattattttcaaaaaattaatttcattcagcttaaaaagggagtttaaagagagggagggcaaagtgggtaattacaggctacagcacatcattggtcattagatacaacaattaaaagtcaaaagtcaactgaagtaacattttcttacagtgcgcgtcgcctcactctaacttcatctcaggtgcatttccattattttcccctaatttcttatttatttccaaactctcttgattcttatcgactcgcactccatcggctttatcaatatttcaggaattagggatttaattcgatcactttccctgcagttttctc

SEQ ID NO: 100033 - DNA, 635 bp, Vitis vinifera
  Intron number 1 from transcript GSVIVT01036656001 (locus G SVIVG01036656001) derived from phytozome v7.0 (chr-ID chr1 3; pos 19923666 to 19924300 reverse strand)
agccattcaaccctatccttgcattgttcattcaggtacaacctggttttcacttctctttgtttatctttttcctttttctttttgaagttttttattttcatatttttaatattattgtcttagaagtatatttaatggacttagacatggatacccagatgtgaatttccattcaaatgttaggattttttagttgtggaacaaaaatgtattttgaaacttgaaacatttcttttaaccaaggaaaagaatcatattcattcttaaacttctcgaggagaagatgaaagaagtaaacatatgttggtagtcagtgaatcttaagctaaccatggcaacaaagggctaaaaagctggtgttgaatgaaagaatgaggaatgttgcattgcttatccaaatagcttcatggtataacatttctaattttataaatatttacattgtttcttactccaatttctatctgaacttactccttcaaccacttggagtgtaattataaagcaactatgtacaaactatctgaaaagagctcttgtttatatatgtatgaggttctctctgttttttccatgctaattggactgccaattttcattgcacatttacagggatccagcttaataaggat

SEQ ID NO: 100034 - DNA, 386 bp, Vitis vinifera
  Intron number 1 from transcript GSVIVT01031766001 (locus G SVIVG01031766001) derived from phytozome v7.0 (chr-ID chr3 ; pos 4235435 to 4235820 reverse strand)
agctatcgccacttcgccagagcaagcctcttcaggtggcattgcttattcttcgcttgtccatattcttaaactcgcgatttggccttagaaactcgtttttgaacttaggaggcgtcaatttataagtttgaaatttgaatcttttgattctgttttgggtgaaaatcgaaacaatggaaaattcattcaagtaagataatccgtggtagattttgagctgaggcgaggtcatgtttttagtttctgctgatgaaactcaacgactcaaatgttgtcggaattctattttttgcaattttttttttccattttctcgaaaatggtccttagaaactttaaggagacgagcctctaaatatggttaatcggttttatgcttgtag

SEQ ID NO: 100035 - DNA, 523 bp, Vitis vinifera
  Intron number 1 from transcript GSVIVT01035741001 (locus G SVIVG01035741001) derived from phytozome v7.0 (chr-ID chr4 ; pos 3843759 to 3844281)
cactgcgcatagacctctcaaaaccctcagaaaaggtatttttctttcgctttctcacgttttctcggtttattttttaattttaattataatatcttctggggttctgattgtttgattggagctctaatttcatcattcaatattgttcttttgtgggttttggtaattttctcgtctgggttttgattccattttttaataccaatttctgaatttccctttctcaccgtttccgttattcactgggtttcttccattttccccttcggctctcgttttctttttctacaagctccatcttgttcattccgttgtttttcttctgggttccttcgagttttactgttctttgttcagttcaagaaattatgtacaatgattggttaatggattgtgtttgatatttctcaagcagatctgtttctgaattttgatttttaatttcctcatatgttgatttttatcctgcgtgggtttggttgcaggcaaagctaagggtttgacaagaatttgattgttt

SEQ ID NO: 100036 - DNA, 699 bp, Vitis vinifera
  Intron number 1 from transcript GSVIVT01036474001 (locus G SVIVG01036474001) derived from phytozome v7.0 (chr-ID chr1 4; pos 22526126 to 22526824 reverse strand)
gaataccaatctcaaggttctctctacttctctctcttatatatcagtcgactcataaaatcatcttagggtttcattttcaagtttcttgaatgggaagttcatttttcgctatgtgccgtcgttaggatgcggagaatgtatgagaagacaagggattagagttttgaaattttgggattttgatcttcatcatttgggattcagtaaaactaaagtacggatacttaaatttgaattcttttctttgcctccttctcagtcaccaaatatagggttcgggtccgtttggccgatgaaaaatcgtagcactgaaatgaatactcggaaccatatgggagttggggttttctcgaatgttgtgagattcagaggtttcttttctttttccctggttttatcagcatccaattgaagcattatttcttatcataattgcccccatttatagcttaaggtcctgtttaggttgcatttcttgacgcaatttccttgcttttagaatctcgaatgaatgcacattttttcttctaaaccccccaccccccccaaaaaaaagagaaaaaaggcaaacgaatgatgctaaagccttttggttttagtcagtgttgatttattaaagtttgttctgcaaatttctgtatggttgagatctaatctcttgttcttacagaatctgaagaatctgctattcaaggc

SEQ ID NO: 100037 - DNA, 926 bp, Vitis vinifera
  Intron number 1 from transcript GSVIVT01032978001 (locus G SVIVG01032978001) derived from phytozome v7.0 (chr-ID chr1 4; pos 24773997 to 24774922 reverse strand)
acactggccaacctcattggtatgccgtctaatcccgattgcttcttttacccttcttttggttctaataaaaaaggaaaagaaaaaatattttttgaatctaatatctgttggttcggtttcagaggaatggaatttttttttctttggctacgttgaattgtttggcattaggcggggttgagtggagcattttggtttttccggcaccaaataatgaaaaaactatctcaatttgctttgcttttgttgcatcgtatcgttggtttatctcgtatctagatttatgcatttggggttttcacaaatttggaaaactgttgaaatctattgaaatgaaaagggtttgtgttcctgttcctgtgaatatatggcttgtttttgttttctaatattcagaattggttaccgctgtgttattcattcctgccaattgtgtttaatattcatatttttgaaccagatggttctttctgcttgtggggatgggtgagagtgctgtggctgttgtggaactgggcactcagggatttgagatttaactttttgccacaactcttgttggtgggcttacatagatttaaaagcaactgtttttgacattttgctttgatgtccagtatgttttagggcaatctccatccatttttagtcttttctattttgttgaagtttgttgattaattttgtcagtggatgcaaccctgttgttaggtaatccatttgaaatttgtggtctgatagtgcgaaattttctccaatctcttcatcagccaatttaaattctaaccacagcatccatggctcaaatagtgttattgaaggttttggcgatccatgagatttagctcatgatatttgactaaaccttgagtttttaattttgtgcagaacatagttctgaccgtgccgagtttttaaagctg

SEQ ID NO: 100038 - DNA, 370 bp, Vitis vinifera
  Intron number 1 from transcript GSVIVT01038685001 (locus G SVIVG01038685001) derived from phytozome v7.0 (chr-ID chr1 6; pos 21022330 to 21022699 reverse strand)
tgcagccccatatccatcgtctccacggtgagtttttatttttattttttatattttagtaattatttcatctccctttgtcgtcatcttgaattttatctctcgatctgtcggttggtttacgattttccaggatcccacgcgggtttccgccaaattaatttgttttttgggtataattttggagtatttctctgatttttccggccattaggggcggtttctgaattcgttgcttttctgttgttctgtgttggtcggccgtggatcagagcaattctgtttagaagatcatctgttttatctgtttgattttttatttttattttttgcagctttggaaaccctcgactagctctgagacttcaga

SEQ ID NO: 100039 - DNA, 966 bp, Vitis vinifera
  Intron number 2 from transcript GSVIVT01037074001 (locus G SVIVG01037074001) derived from phytozome v7.0 (chr-ID chr3 ; pos 8143941 to 8144906 reverse strand)
gcttcttttatcaagttggtatgccgagatttccacttcttcttctactcgttgagttatattatatcgttgattttcttgcaacgattcctaatgaagaaattagagaaaaacaaaagaaaacagaaattcgacagattgcctcagatattgacgatgcaaaattaaggttttttatgtaaccctcagatattgaaaatttaaaaatacccctaaattgtaatgcctctggaagggcaaccctcgctgagcggaacggaggggaacaacggcatttgccccttacatatatttatgtacagacttctattttacagaaaaaacttgctttagattgtatcccaagtcccaactgaaaagtactttgaagaaggatatgcatacaacacaggttagcaaaagtccacgcagtgttaagagttgaaatttgactattaaggtctatatagtgagggaaaaacaatgataactactttactgttctttaagtttagtttgaccttactggtgaaaaaatgatggagaggtggatccaatgcggccagagcacactataaatggaagaactataaaaaatattatctgggatatcagttagaggtctggaaagaagtgtcaaaactgagaataatattttataaggaaagattttaaattttccattgtgaaaagcatatattaaatacacatgaaaatccttatttcattaataaactttgatgacgttaacttcggtaatattatactttacataaacgcttttaatttagtaaaaagttttaagcagcttttcaagaagcttgaaagtccaatgaccacaatcgactattttccttttttcttctttgtttgtattttttttttttttttcctttctgtaattggtgattgcttgcagaaatggcttcaaatattttatgttcctctgtaggcccagtagttttcaacactacagattatactgga

SEQ ID NO: 100040 - DNA, 562 bp, Vitis vinifera
  Intron number 1 from transcript GSVIVT01038632001 (locus G SVIVG01038632001) derived from phytozome v7.0 (chr-ID chr1 6; pos 21331007 to 21331568 reverse strand)
gctactattctcttgtgcccacttgctccttttttgtttttttcccattctttaatcttcttggtttttttgttatttatgctaataaattctgttttttaatatacaaaaaatttccataataaattcacatatataatgtatacgtggggttttgtttaattgttcttctagtttttttttttttaatttttttgggtttctgttctgggtcttccttttcctccctttttctgctatagtttcagcccctccaaacagcaataatttttctcgttaaaggtatccttgttgaggaatcttagaagatgtgactgtggaaatatactagctttggaggaagagagaaagagaaaacgagaagtgggtactgttgagactcttgtttgatgaaagatctttattgggtttgatttctgattgactgattccattcacccacatatatttgtgatcaaacagactttctctgaggtttttctctggattttgacttctgggtgtttttctatctgggtttttctcagattgtcttctgggctcttgtttgtttggagttgtg

SEQ ID NO: 100041 - DNA, 261 bp, Vitis vinifera
  Intron number 2 from transcript GSVIVT01034759001 (locus G SVIVG01034759001) derived from phytozome v7.0 (chr-ID chr1 3; pos 9138617 to 9138877)
cttccagggtctgctcttcttgtgtttattctgcttcttcaatgttttcgtaggaaattgttgaattaaaacagccgaaaggttttcaggcctgcgacggtcatcaatgaggcgataatcctcacctattcctatatcttgctctaattctcttcttcgctaatcatcagagtggatcgctttctgcatcttaattacaacttattttcttttgattcatcagattgattttttggcaggttggaaaaggtttatccaagg

SEQ ID NO: 100042 - DNA, 457 bp, Vitis vinifera
  Intron number 1 from transcript GSVIVT01033385001 (locus G SVIVG01033385001) derived from phytozome v7.0 (chr-ID chr8 ; pos 21037669 to 21038125)
atcttttctccacccagaatacggtcagggctctctttctttaatgttttttgggtactattttaagttgtggtcttgttttactttccaagttctcctttccttaatatgggtactttgtctgatgagggtttgagtttgaggattgagtagagttgatgaagtgctcttgttttctgcctgtacttttaatacatgttctacatgccattgggggctttttcctgccactttaacttcttctggggtttcctcttttacatgttctttcttgtgcaagtctctgatagagatacacaatcttttttaactgggtttttgtcctcttacatgtatacatgctgtgtctgctctttttggtttgttcacctgtacagtattgggccaaatatctatcttagatttctgatactgatttttttttttcgttttgggcataaataaatgcaggaagtgg

SEQ ID NO: 100043 - DNA, 618 bp, Vitis vinifera
  Intron number 1 from transcript GSVIVT01031922001 (locus G SVIVG01031922001) derived from phytozome v7.0 (chr-ID chr3 ; pos 5429047 to 5429664)
gagttgaaagagaaaacaagtcaataacggttccccatctaaaccttattcttaatttcaccctccgctttgtctggtttatgttgttcaaaactactaatgcatttcttttcaagacttaatgataatataattccagaatccaaatacatttcatgttctcacattctcaagcttcatgcttgttcgcaaccaacaaaaaataaaaaaagaggaaggccatcatgattctctagactagttttacactagagttatatctacatattgcttccagtttgtcaaacccggctattctgtgaataattttctaccatccgtttgaaaggcttgcaaatttcctttataaaagaaaaaaaaaaaaaaaagttctttcgctttggtccaagatcatggtgattatttatacttcactatgttcattccttgatgtggacgtatctacattacaagtctcaaatttctccacctgactgtcttcctatgtgtccttgtattgtagcacttcagttcaatatttacttttgttttttgtttttcactttagatttcaatgaaatgaagcttctattaatgaataacattcaatggtggaacaggaagagctaattcagacat

SEQ ID NO: 100044 - DNA, 825 bp, Vitis vinifera
  Intron number 2 from transcript GSVIVT01034779001 (locus G SVIVG01034779001) derived from phytozome v7.0 (chr-ID chr1 8; pos 21331450 to 21332274 reverse strand)
ctgaggcagccaaaacttggatatatccaggttctgttaacagccaaagcatgttttttggatgattttggtgaagtgggttttcagggataaattgaattttggattattcatgtgtttgttgttgctgtgctactgttttaattgcatgtccattcatattcttgtgtttttcataatttcccaagtgggttggcctatatttgttgcacttggtagttgatcatattcgagttctattcacagtcaaaacatgaatttttacttttatttttttcattttgtttctgggtcattttgtgaactgggtttctaggaacgaatttaatttttgatttctttcttgctattttttttggggaacttcaatagtgggttatgcttatatttgttgcatttggtatgggtgattttaatgagcaacggtgggtgttagcctatgaaatgattgctgcgtgaaagtatgttttggggaaaaaacttgggatttttttattattttattggagctctcagctctgcatagcaattcatcttcttgcttctctaaaacaaaatttaatatcatcaatatcatcaatataatacttcttggttttgacccaagagggtcctgataattagctttgaatatggctttgtaagtttgaatttatttaatcttatcgatatcatcaacataatacttcttgttcttgattttgatgcaagagggtcctcaaaatcaaccttagatatagatttcttattatgaatttatgaactgatgatatggcttggcaaaaaaggttatgcattgatttttctttgcttgttttgcagtta

SEQ ID NO: 100045 - DNA, 1015 bp, Vitis vinifera
  Intron number 2 from transcript GSVIVT01035494001 (locus G SVIVG01035494001) derived from phytozome v7.0 (chr-ID chr4 ; pos 1758462 to 1759476)
cttctttttcattttttctgtttgtttccgggattatttatttattcaattgagcttgaatttcaacacgaatttgatttttggccgcatttattcttgcgggttaatttgtccattattggtctttattgagaatgtatgactaaatttatgtatgaaagtttgaatcttgcgtttgttttcgcttccgaaaacttggaaatcagttaatttaagctatatgctggctctaaataatttacttcctttttaggtatctttattgagcttcaatttctgtaattttggttttcggttattagcacttttatattaccgtcgttgcgggtttgaagtttcgcttccgcatttttgttctttttggttgtactttatggcagtttccttttaccttctgtttggtggctgatgaaacgaggaaaaagaaaaggaaagaaaataaattctgaagttcttgttctgttttgtttttattttcatttctgaaaaatttaaaaaatctcttataatacgttaaattttgttttgggcaagtgaagtcgggtttttctcatcattcatctcattttacagcaattagcctttataggcctttagaaaaccttaaaaactgaataaaatcttgaaaaaaggaagctaacctctataccttcttatttctatccttaaactcttaaatcttccaaataatggaattaaaaagaaaatagaaactttcactttagaatgaagaacttaaaactttataaacacttcttataataaaatgtttctaataaaaaagactttttagattctaaaaaggactcaacaaattttagaacaagaaacctttttttttttttttagaaattagaagtttagaaatattgaaacttctttaaattctgaataaataaagtcttccttttctcgaatgcattttgaagattcatttcccattgatcacctattaagactaagatggtttttaaatgcagcaatttaaagttataaaggacagtacaggttttga

SEQ ID NO: 100046 - DNA, 501 bp, Vitis vinifera
  Intron number 6 from transcript GSVIVT01037843001 (locus G SVIVG01037843001) derived from phytozome v7.0 (chr-ID chr3 ; pos 7228047 to 7228547 reverse strand)
gaaactcattcagccggtagccttgaatgtatgtacactacctgacctctctgtctatgaaaattgtctactttttcttttttgaataaatgcatacaatctgagttaaatatatataatttgatatgctcttgattttattgactgagacaaaatggcaaataattatacaattggtagcagaatatgcacatttcaaaaagaatatctgctgccaccattactgctctttgtcttcttttcttcttaatccatacttaaccctgtttccgaatatcttcttttatttcttagtttttctttttcaatgattgacttctcagttttttagttagtgcttcactaaagtttcctaaaattttgaatttccccaatgtctaataattctgaatgccaaagtattgtggtaatcttgaccataatataattgaatgatgctaatgttgttgtgcaatctatctgctgttaatgaaaaaaatttctgttttaattcttaggtca

SEQ ID NO: 100047 - DNA, 940 bp, Vitis vinifera
  Intron number 1 from transcript GSVIVT01034027001 (locus G SVIVG01034027001) derived from phytozome v7.0 (chr-ID chr8 ; pos 15738616 to 15739555 reverse strand)
ctgtcaaaccccttcgagtattggaaaagatcccggtaagtgaagacactcccagaaaatcggaaatcaaaagtttcgttgtctgtttacattctgtttggttctcgagaaaactggggatttaaaaacggtctcaaaattttgattttatttatttattggggatttgatttagtttatctaatgtaagattatccacttaaactactcctactgggttattggaactagttcttcttgcacaaaggttcgaggattagttcaatgttcttttaaataaatttccgaaaaataaaatttccatagaaaatttcattcccttttctttcacgacctttcttttctctgcaaccaagcagagcagaaaggtctcatgaaaggtcttttggaaatattagaaaattgaatgaagtattctacttgtgattggtctcttccttttcttctttgtttcatttattttttaattttttatatatatatattctgtaagatgatgttgaacggttggttttctttgtatacaattttgacccacaagaagtgttgggtagcaagcgagttcattgaatttaggtttgcctctgaccgacttgtactcactattgaggtcgctttataatgatttgttggccgttattgcccttttatgcctttcggttttacatttctataacatttaaagaatacttctctttttgatgccttctctatatggcctggggacctggtgttatctaaaactttaatgatgatgatgcctttctattcctatattcatgcctgtataattctgtattcattattgatgtttgctatcccaactaagttaagatagccgtggtaggtataattgagtgttcctttttttccttttttctttttgcatatttttctatgaactcactattttcattgattgcagattcctgaaatttgg

SEQ ID NO: 100048 - DNA, 745 bp, Vitis vinifera
  Intron number 1 from transcript GSVIVT01038361001 (locus G SVIVG01038361001) derived from phytozome v7.0 (chr-ID chr7 ; pos 13670951 to 13671695 reverse strand)
caacaacgttcctcatctcggcaacatcattggctgtaacttccccttctcttccttttttaattcttctctccttcttgtcttataattcaatccagtcaattgctttggtattccttaattactctttgcaagtcatgatgcgtgcttggctacttggaaaactttttctttttagtacaagaggatgtaggatgaaggcggcagcacaaagtagaataagtactgaatgcatatattcaggagatcaggtcaaggtctgaagagtgggggtccataggaggaagtcaactaaggtggtttatacatgtctgacaaaacacgctgataagtaagatatgaattaattcaagtacaaggcgacacaatgaatagaggaagaccataagggagctgtctcaagatggttagaaaataataatggcttacctcgatggagctgaattgtgaaaaatatcaagttaaacttgttccttaattttgagttcgtttctaattttatcgaaaatcatgtcagctgttcagagcataaggttatgaaaaaagagaaaaatgtgcatgcttttgccattctcttttgtgttagtaccttaggaatctagcattcatgtgtttgcttgcacctttttaaccattttcttggcttgttatccacctaatcactggagagacttttgtggattctcaaaattcccttttttttaactatatttccttggcccttttccaggtgttttaagtgctg

SEQ ID NO: 100049 - DNA, 623 bp, Vitis vinifera
  Intron number 1 from transcript GSVIVT01031171001 (locus G SVIVG01031171001) derived from phytozome v7.0 (chr-ID chr1 4; pos 1540229 to 1540851 reverse strand)
aatttatatgtatatagtattaaaaacttttttctccatccgaagtaggatatcccaatcacctttcatgaaaacacatagcctcggtgtatatatcccacgagattacgagttcaaatagataaatatttgttttggggttaaacaaactcttacatcagggttggagatcaattctgatattagttgtgacgactcacttttaattgtatatatattgtctactttaaactcaaaggacactcgcgattttaaaacatgactatgtctacatgcttaagggatatccaaacacacacgcacacacttatgtaagaaaaattaatttttttccccatccaacaactatcacattaaagaatcttcaccttgttttttattttttgtttttctggtcttttcagcgagcatctttacaatcttcctctatctttctcccatgtgagtagtactataaatatcttctaaatctagaacctttttggaaacattaatttaacagaaaatttgaaatacaatttgcagaaagacattttcacatatagtgaaacatagatcaactgaggagtttgagagccttccttatgttagcacattattgtcttcgtccgtggggatctact

SEQ ID NO: 100050 - DNA, 952 bp, Vitis vinifera
  Intron number 2 from transcript GSVIVT01038261001 (locus G SVIVG01038261001) derived from phytozome v7.0 (chr-ID chr5 ; pos 24777513 to 24778464)
ctcttaccagagctgaaggtcttcgcttcgctgtggtcagtttctctattcctccccagtttttgcctttcattttcatttcttctgtctatgcttgcgattccatgaagctccgttactgctttactatgaatttgagaaattcagctggtgaacacacgaataaagtatatatctagaagtacctttaatggtttttttttggaggaaaaagttggagcaagttttggtttcaaatagccctcgagcatttcgaaaaatacaatttttaattttaatttttttaattttcaaagttggatcaagactacttcgaaagaaaaaaaaggtttatctgactatgcctaagagccctaatgtgccatctgcaagaccaaataccagtatgaatccaggtcagaatgtagtatttgcatttatcatttgatcctgtctttaacctctactttttgagaaagtaacccttctatggatctctgaactccggataggaaaggggaagaaggaaaggaaagaaaaaaaaagggaaagagtaaaataaaagctgaccccaggaaatattttcttcactttttcctcaattattctcacattttctgtaaccaaaacatggggagattcaaagtgttttggtctttccaagatccaaactgagccaaaagcaaaatgctcaaatatgtttaaagaggaaactgattttttttatttcataggggacattgaagcctcaagtttttagtttggcttcttatttttgctcttttggtgtgtgattcttagagcttagttaagcatgacatatgttgtaagatttattttgatattttatatacgtcacataagttatgctttttaatgcttatttgattggttctcattgttgcaatttgatcacaatactattttccactccaaaggttgtagcacggtttaacgagattgtgacgaagct

SEQ ID NO: 100051 - DNA, 432 bp, Vitis vinifera
  Intron number 1 from transcript GSVIVT01031053001 (locus G SVIVG01031053001) derived from phytozome v7.0 (chr-ID chr1 4; pos 21476100 to 21476531 reverse strand)
ttgaggttctttcctttcctttctcaattacgatttttttttttttaaatgctgtttggttgctgagaatttcaatcggaattgaatttggaatcctatttattcttgtctctatgaagtggtcatgtaaatgtacggtccacttgttggaaaacggacttcatgtttcttttcctctattttcttgatagccaaacagaggctttactgaaattttttaatctctcttctaagacctgtttgattggcattttgaaagcccttttcttgcttagaaaagctttaacttgccttggtttcgcaattaagagcatgagaagtacctcaaaatgtttttcccaaacagtagcagcagtggcagagacgttttttcatgttgttgaatattgttaattttttgtgttgtagaagctaggagttgtggtgaagcca

SEQ ID NO: 100052 - DNA, 733 bp, Vitis vinifera
  Intron number 1 from transcript GSVIVT01033473001 (locus G SVIVG01033473001) derived from phytozome v7.0 (chr-ID chr8 ; pos 20406702 to 20407434)
taccctccgatctaccaggtttgttgtcagttatcatattttctatcttttctatttttttgttcctttttttattaattgcttaatgttgagttagatatttcaagttaagaattatcaaattttgttgtggtcaatatgcttgtaatcttgattcacaaaattaatatgctagagtgggtgttttggggtataaacatatgtaatcggtgaattgcaagttctgtgttaagggtctggagggaaggaacagaagtttgcttggggtttgttatgtatcatggcaaagaaaggagagtgggggttatgaaccaaaatgttgcttgaagaaggatagtctatgggaatttgactgtgatagtgaagtgggtctcataaagcatgagaaatttacaggtaaagttttagaaggcatattctgttaaagacataagttttgctatggcatgaattcatctatgagtgtcattttggacttcataaaatagtgatggacaatgaagcattgcttatctttgtatcagtaccttttgaatagttgatcaggtttaaagtttgtttaacatttcaaatctagaatacaagtgtttccacttatttatttttgtctttgtggctaattgtgaaactattctattttatcatatttatttggtatcttaaagtctatctttttttttttatctgattttggttctctaaatatattttagtgtccaagtggccacacctt

SEQ ID NO: 100053 - DNA, 1034 bp, Vitis vinifera
  Intron number 4 from transcript GSVIVT01035883001 (locus G SVIVG01035883001) derived from phytozome v7.0 (chr-ID chr4 ; pos 5240091 to 5241124)
attgacactggggactgtggctccccaatttacaggttggtttgattgattttcaggttcgtgtcatggggtttctgaatttttagcaagtgacagtcgtatgattggattgacaaatatatcattaatttctgattcttcacctttgatgttcaatacttcttctatgaccttgtacaatttctatcatgtgtggtaaagtattagcaacatgatctcaggttgtgcccacactgttgcttgaatatttctctgtgacggattgcttaactcatctaggcctttgatgggatgggatgggactcaaagtgatgtttactcttcattattcccattgtttctcattgaatgagagccctctgttttcttttgaccctgacggggtacttctctgttttgcatcattcatagagctaatttgttattcatctgatatctaatatctcaaagactacgtacctaaaattgtaaaatagcataatctgtattatgattctagtttcctcttatgttcaatcagaatatttgatattacattctcaagaagatgatcctgattcttgaacttccgtgaaatttagtatttcatcatgacatcattgaaattttacgagccataatctcttccacttgagtaaagtattctacttttcttattcaatcaaagaactcaaatattgagagtttctctggacaatcatccctattgttcagtcttttgaatgaccatctctgaaactaaggttgttgtagtactgatctatgtgtgataccatctgaatgagaaacctcattgcatatgaatttccacaagtgaagatggtatgctctcgatgtataaaaattttgatatggatgatatagttgtaaatattgtaacagaagatttttgtgccagtgttctaggagagacatgttggtattcaagcagagaccacattgattttatccatttggaattaagttctgatacttatacgagttgttcatgtcctataggagtttctatccttgaaggtgaagcaggggaagtt

SEQ ID NO: 100054 - DNA, 681 bp, Vitis vinifera
  Intron number 1 from transcript GSVIVT01036069001 (locus G SVIVG01036069001) derived from phytozome v7.0 (chr-ID chr6 ; pos 21077800 to 21078480)
gttagcagctcattactttcatccgttgcaagaaggtatgtttgctttctatgaaattccttgtttctcttgtttatttatttatgttattaacttattacgcaatgttgttgaagaactcaactgaacatgtgtatagttatgacaaacttgaactaaaacgcaatccaattatcaaacttttcactgttctttgatcttttcccagaatcccaactaatttagctgtaaaccactgtttgtcaagagttgagagaagaatcagagggaaaaaaatatttgtcaacaactctctcggattattacttcacaattttgaattttgtcctttttcaattgtatcattgaagtggtattctcctttcatctgagtgagacgagtcaaagaataaagacaaaaacaatcctagaattacaaacaaatgagactgaaatcattgacctcaaagatgggcttcgtaccaagttgtgtaacttcagtctaagctgtccgagcagggtcatgatcagtgatccccgattagtgggttgcaatgacctatgattcaaagtaataaatttcatggaaaataaaacaatcagaacaaaacagctcgtaaggtatagtgctgacttttattgctaatgtatgatgatgatgatgaagactggaagggaaggtggccgtgatcacaggcggtg

SEQ ID NO: 100055 - DNA, 886 bp, Vitis vinifera
  Intron number 1 from transcript GSVIVT01032902001 (locus G SVIVG01032902001) derived from phytozome v7.0 (chr-ID chr1 4; pos 23956526 to 23957411)
aagcttctgctattagacaacggtactttttccaaacccttattccacatatctcatttcaattccactgtttacgagatttagggttttgagattgaagactcgtataattcccagtgttgtccagatttagggtttctaggttcagtgagaaccatataatcgatctaagattcaaaaaattcgtataatttgcactatcgattttatccagggttttaagattgaaggaaatttgtgtagttcagatttagggattcgccacattattgctctgtttataggatttatcgtttttacgcaacaataaatcgatcaatggatggattggttggtgttggggccatgtgttagtgttttgggtttgtttaaagatggtaatgctaggttttgtcaccaaacttgtggtcggatagagacggtgcatgaaagcccttcatttcagcactatcattttcccaaaaaataaaattgaatttagggtatgtgcaattcaagacattgattattttgtattgttagtagatttataattttgctaccattctgtgctcttatgtatgcgtctatttttaaaaaggatgtgctgggttttacaaagtaacttaccggattgtttcccaaataaaaacagttcccttaaatgaggtttattttgcaaaatactactagatatttcaatttgtcaatgggcaaagtagttaggtgaatcaattgttttgccaaaaccaaaattacaatctggacattttcaatttaagacattgaggttcagcgatctaatattgtttaataacaacatcttattctttgatattatgcaatattttaactgtgattatgtattacagaaagaagagaaagtgggatcagcctgcagagtcat

SEQ ID NO: 100056 - DNA, 905 bp, Vitis vinifera
  Intron number 1 from transcript GSVIVT01036887001 (locus G SVIVG01036887001) derived from phytozome v7.0 (chr-ID chr2 ; pos 18191886 to 18192790)
cctcggtcacgcatctcgtctccaatttcagaaaggtttaaaacttgattttcttttttttttttgcttttgttagaattgcctgctttattgtttctggaatgcgcctttttttatagaataatggtcataatttttactaggaaagactaagaattggtaaataacaccaacaaagcgagtgagaaccatgccacagcatactctcatagttatgtgaactgggtgtggtgcattgagaactgatccggatgtgcaacagcattaggcataaatattttttctaagaatttactgaaagcatccattgattggattgaattattgactttggcttgcttgggaaagttacaattagaatgcaatgactttcttttctttgtcgaaactgaggaaagttggaatcctagaagtctattcgttttgtaaatgtaaacttcccctgtcaaaataaatcatggacaaactgatgattcgtttcctctggggttaactgctgtagaaaagaactacttaaaaaaccctattatcatagaaatcttcttcttgatcggttaatccatatttgattctctacataggaagaaaaaaaacagaataaaagtgttgtacttggtgaagctgtgtcatcattatccgcttttaaccaacccaaaaaggttgaattttttttttttaaattttatattagaaacaaaacatgtattaattatggataaaaagtatatcagaaggacgagggttcctctccacaatatacaagaaactgataaaaaaaggtgtatgctttaatgaacctgtctttttactatgttataaagggcagttggtgttggtcttttcatgtctgttcttcatgaatatctaaatattctatttatctttgttgcagaagctttgtgata

SEQ ID NO: 100057 - DNA, 563 bp, Vitis vinifera
  Intron number 1 from transcript GSVIVT01034938001 (locus G SVIVG01034938001) derived from phytozome v7.0 (chr-ID chr5 ; pos 250391 to 250953 reverse strand)
acgtcatcaactactcaaagcttcgtatttgggaagtaagattacgtttttttgccttccatattattacttttgcatggacatgactgtagctgattggaagcaaattgtcatgaacttagccctttcctgaccatttgtgcgtcattttaaaaacaaatttgttttcaatgaaattcattgttttcatgaatattttgagagaaataataatggcgaaaagatagtagtgtaatgaagatcatttcgttaattagaaccatttatggaatagaatatttttcccatatatatatatatatatatattttatatgtttgactactgttttcttagtctttccgtcaccacaaattaatttatataaattaatcgtgatttgggatttattcaatgctttgatcggccatgatagatctttctttactaaatgtaatctgtttcccataatttttctcattgttttgattgactttctagtgttgaaattttgaaaagcacttttggaatcatattaaaaattttcatgtaatcaattgttgcagttcgtggagtacagcaag

SEQ ID NO: 100058 - DNA, 862 bp, Vitis vinifera
  Intron number 1 from transcript GSVIVT01031212001 (locus G SVIVG01031212001) derived from phytozome v7.0 (chr-ID chr1 4; pos 1148104 to 1148965 reverse strand)
acatttcaagcggcagtggaacacagttttcttctgtaagtgcgagttccttcttgttttttttctctctctacagttctctgtacgtatcaagaatcatatagatatgtatttctgcccttctttggtgaaatcgtcggtttctcgtttgttatttgtttgtttgtttgtttgttttttaatctctgtttggctgccgagaaaaaccgtggaaagaaaaggagggaaaattttgaaatttgtgttttatattattttcgttttggaaaaaatgttgaacgcgcctagactaaggatgagtaagtacttctgtgacgctcggtttgagaactttattctactctccgtttggttgcagggaaaaatagggaaaaaaaagaagagctgaaaattttgaattttattgtttatattattttggtttcagagaaatgataaagttgcctaacctacaaggaaggcttctgtgaagcgcagtttggtaattttattttttgtttctgtttctgtttctatttctattgattgtcttgtctcttttttcccttttttttggttgtttggagaggagaggagtttggtgggtgtttcaattgttgtgttagttttggaaatgaactgcaactctgcttaaaaccttttttcatatgaatatgtgggctttcctgggtatttatttgatcataattgccgctccagaccagaccaaaagctatccaccttcagtataaaggaagaaaatgaactatatgatatactgcatttctttggagcaacccgctttgggtttatatatttggtttaattaatcttgatttctttgtcagaattttttagaagggtcagaaaaagaagagaagaa

SEQ ID NO: 100059 - DNA, 340 bp, Vitis vinifera
  Intron number 1 from transcript GSVIVT01031517001 (locus G SVIVG01031517001) derived from phytozome v7.0 (chr-ID chr6 ; pos 17729218 to 17729557 reverse strand)
tgaagattttccgcggggatactattctcatcaaggtattccttttggcgtgtttttgtctctttttttttttttttttgaaaagggttttaggaagatttgagaattgggttaatggcaacgacttgggtttttcaatgttttattttgtcatccatgactgcatgattatgctcctttatgtttgtcaagaagaaaggaatctgaatttttttttgagtcctattttattagaaattacagatagattatggggtctgaatcttgataactctgtttgacttatttcactatttggtttacagggcaagaagaggaaggacacagtctgcattgccat

SEQ ID NO: 100060 - DNA, 884 bp, Vitis vinifera
  Intron number 1 from transcript GSVIVT01036545001 (locus G SVIVG01036545001) derived from phytozome v7.0 (chr-ID chr1 4; pos 23286204 to 23287087)
tccctcttcctctccttcacttactaactcttcaggtattggatatgggggttggatgctctgttcagtgttcaatttgatgggttgaaatgggtcttttttgtttttttgatccgtgaattttgctgggtcgatctttgtttttgtcttttcacatgggaattattattattattattatttttaattccatttgtgttcgccatgtttgtttacagagttgtggattttcccttcggttggtgtgttcctcttttttttccttgttgtcaaaggaaagaacccctttcttgattttgaagaaatcctgaaaacaagttctaacttttcattgaaaataagagaaaatttgttgacatggattgttgctttctcatattctgtcatatgtctgggtattggctttgcagctgtccttgattcctcgccaaaaattattttgaataagatatatttgtgggtgtatagcttcttcaagaaagagaagtattgcttgcttgctcagtggttaatttataatctctatgaaatggatgcagttttcagttgcctttttaatcaatttgtttacgggacaattctgtttgttcttaatgccattaataaagtaatttgtttcataattatccagatatgacttgtttttgtaaaaaccattttgttgggattgttttttttaaggaagggtaggcgtcaaccacgttaatcagtgattaaaatttgtgatatgatacaatgtgtatggattgtttccttctagctgcatgattcattaaattgatcagatgttaaaatcagctctttccggtgactcttatgctcatgatatatatctttcttattttacaggtgaatcctacaaggacattagaattttgggtata

SEQ ID NO: 100061 - DNA, 428 bp, Vitis vinifera
  Intron number 1 from transcript GSVIVT01033895001 (locus G SVIVG01033895001) derived from phytozome v7.0 (chr-ID chr8 ; pos 16942127 to 16942554 reverse strand)
ggtttgtttttcattttcttggtgttcctttaggttgatgaggaattgtgaaaaaatatgacgaaaatttcctggttttgaatctttgattattccttttataaacttccatggaatcaaaaagctccatctagtcgagtcttattcaactgctaagtttttcttctaatttatggaaatcaaattcacattgaaattgaattcgattttattttctcttgcttcgcttacttttgtaagcaattaaatgaaagatttgtaagctattaaatgagtcctcctttcattttgcctttttatcattgaatttcttgaatctttgcttgttttgtgaatttttattaatatttgttagaattatttatttacttaggtttttgcttgtggttgtagagtcgcaaagacgttgaaggatctctctttgtcgt

SEQ ID NO: 100062 - DNA, 1005 bp, Vitis vinifera
  Intron number 3 from transcript GSVIVT01031418001 (locus G SVIVG01031418001) derived from phytozome v7.0 (chr-ID chr6 ; pos 18819545 to 18820549)
ggagctttcttcccaaagattcacccctctggcaggtgagatctctctttcaattctccttttttttttttttcctcatacataagagttcgaatctgtctctgtgtattgtagttgtcttttttcatttttataactgtaggctgtaagcattatcatgtgtgatctaagtgttctgttcaagatatacacattagcaattttaataatttatatctaaatgttctattgtgctgatgctgatgatgagaaaaaaaattataaatggacaaagatggtctgatgtcatgcggttattttaaaaagaaaaaaaaattatttggcttttgtgatgaaggatataaatgaaatgtaaatacttaataactgtgtactttcatgatcattcttcaacattttcttatctggtaatatttttattcttcctgggtgcagtagcacttgattgttggagttgctggaacttttgtatttttccatttcttaatttccaatttgatgtgttgctctaatatgttattgtattgaatctattgacagttgcatttgttttgaaaatgtcagtgtgcttttgtttccaattattttagctataaaattagcattttttaagtcttggaagaggttccatggtgtggttgggtgtgtttgggaattatggtggtgctgcatatgttgtgtagtataggggagcttaaattgaatggaggtcttctgccatgaagtgtttttctttctgattagcttgcagttagatgtttctctatcttggtcaatagatctagggtaattggttaaggtttttacttcctatgcaaaggcatttttacttggtttgatcacaatggacatttggttgcttcattatttctatttgcagaatgagaattggaaactgtttttgaagcgcaatcatttgctatttgttctttgttttctgcttgtgttattgtttgaatgaatcaaatttgtatactgtgatatgatattaggatcccacttact

SEQ ID NO: 100063 - DNA, 567 bp, Vitis vinifera
  Intron number 1 from transcript GSVIVT01035051001 (locus G SVIVG01035051001) derived from phytozome v7.0 (chr-ID chr5 ; pos 1187290 to 1187856 reverse strand)
aaggtatcgttgaattactcgagaaaaaggatttttctttttcttcttcttcttcgttctgcttggggttttctctaattggatttgatcttttgtatgtttgatatttgttctttttttttttttcacttgggtattgttaatttatggtgtgtaccagttgggcatggttgttcttgtatttgtctgttgtgtttgtgagattggaaatctgtggtggaaaagaacagaaggaaggaaacccatcaagttgggtttaagatcacatcataaatcccataattctgttttgattcaaaatatggatttatgtttagactctgtgatttgcttggacccagcatattcttgtgggatttcttatactcatgaagttcttcacatgttttaaagaataatttgagtttttgatccttgactctgctgataaaaagtccatggttttgtttccctgtttcttttttcttggtttctgctggattaatggtatcctagagattggagggttccagttgagtaatttcttggatgattgatttaatttgttgggaaattttcagttactaa

SEQ ID NO: 100064 - DNA, 703 bp, Vitis vinifera
  Intron number 2 from transcript GSVIVT01035953001 (locus G SVIVG01035953001) derived from phytozome v7.0 (chr-ID chr4 ; pos 6413160 to 6413862 reverse strand)
cggctacacgattaacggtcgggtcaagattgaaagtatgctattttgcccccctttcattggcatttctgggtttttttttgaatttttgaatttttctttcttgttcatgtttatatagggatgtggttttgcatttgaactaggaattatggattggttctttgtttaaaattgtgatttattattttggtttaggttgcgtaagatttggacaatttgattgaattagctatatgtgctgacagattaatggatattagatggaatttattggtgaagtttgattctttcctgctaaaacaatgtatttagtgctcaactttgttagagtttgagtaatcacctctgcagcactttgatcagtagaagtggaaaactcaatcattagtgtcttcttaatctatcatccttaccagaggtttgaacccctgacatcattagaggcttattgattgattttctggaccatttgtttcaagttttgaactgccaggtaactgttgtcaccaattataaattttggtgcttttgttttttgtactggagttcaaacttgctatcatggtgtgtttcagtttctttccctcactatgtttctttaataattatgtactttttgttcaatttattggctcttctagattgttgatgatctagtatggcaggtactggagtgaaaggatttggtcttcctggaaaa

SEQ ID NO: 100065 - DNA, 362 bp, Vitis vinifera
  Intron number 1 from transcript GSVIVT01035953001 (locus G SVIVG01035953001) derived from phytozome v7.0 (chr-ID chr4 ; pos 6413837 to 6414198 reverse strand)
tcgtttctctcaactacgctcgccatctcatctgggtacgtttctgcttcaattttatcttcataattgtgaaaaaccctaacttttagctttctgtatgtttggttgcttagaaaacgtgggaagataatctgaattatcattttgaaatttgattttttgggttgagctttatgcaactctctggttagtggactttatattgaaagaaaaccaatcacatattttattttattttcctgtgttttctcaaaaaacctaaccgagaattaatgcatttttagggttctcacatgtaatttctgtttgaacgttgggtacttgcaggagtagtgacggctacacgattaacggtcgggtca

SEQ ID NO: 100066 - DNA, 861 bp, Vitis vinifera
  Intron number 2 from transcript GSVIVT01035293001 (locus G SVIVG01035293001) derived from phytozome v7.0 (chr-ID chr4 ; pos 130393 to 131253)
cctgctggccaggagagttcttcaagccctctgaggtaatctccacctttaattgcttgctaatataagattatttcgttgaaaattccagttgtattttagctgctaaatatatggatttatattttaccgttcaattcatctgtccggtgctttttagagcattgatatcgtcagccaatttagtcgagttattttcacttgagttcatttagaatattgcactctgccgcctaattttgatatgaaaagagcaatttaatctcctaagaatccccttcatggatttcattaatgttaaattataaatttgccagtgccataatggcacatcaaattttgttgaagaggatttttaaagaaaattatgcaaaaatgtttgttgtttctttttaaatttcaaattttgatttattatttaataatccatgcatattatattgagcatgattgtagaaaatgcaggatgtgtggtttgtaagcatggttttccatctacatacacacgtatatagtgcatagttttctgcagtctggttgggttttgtttgtatattgcttgtatacatagggttcaccccctgtttttaggcatttattaattcaatctgcctttgtctatcaaaaaaaaaaaaaaaaaaaaatgtatataatagtacatagtctcggttgtgtgcatgcttattaggttgtgggaattgggaacacactgatagtacttcgaagagatactccaccttgatgaaatacagttttaacgaatttatttatttatattttttattccattgggatttatgttcttttcttaacttcttgtttgcaggaagaggatagtgtctggggttcagccaactggga

SEQ ID NO: 100067 - DNA, 838 bp, Vitis vinifera
  Intron number 1 from transcript GSVIVT01036750001 (locus G SVIVG01036750001) derived from phytozome v7.0 (chr-ID chr1 9; pos 23011033 to 23011870)
gcctctcgtgagtctccctttccttctttacgtgtctggaaatgtagagaaaattagagttttgtcttgtactttttctttttctagatttttattatttggaaatagacttcatgagtccacgtcttgaatttcaatttaaatagagaaaataaggttttatttgataattgtttgacaattagaaaatagagaaaatagaaatagggtgttagttgtttaaaacataatcaaacgtagaatgattaaaaatataacataattatttttagaatatatttaaatatatagaaataaattaaaaatatttaatgttcctaaaaaatcatttttaaaaagtagttttttagaattgttttttaaaacactttttaaacagtttctaagagtctgtttagaaagtatttttgaaaaaaattagatgtttgacaaattttaagaaatatttttaaaattataaaaactcagttttagtactttttttttttagaaatattttatgggtgattcttacatactttacttttcttaagagaacagctcgattagaaatactgtgaaatgtaatctaaaacaagtttttgttgttttaaaaacaaatttttattttattttatttagaatattgtgagtaacatttggaaaacataatttaaaaatatattaaatttaattttatagtttttataacaagcacaactattcccgatttttatgaagaccaatattattcaactataaatgtttttatttccaataataattacaagtaatcacttatatttcttttactataaatgcagaagagacggaggcgaggctgtgcgagtcgcagagc

SEQ ID NO: 100068 - DNA, 490 bp, Vitis vinifera
  Intron number 1 from transcript GSVIVT01030679001 (locus G SVIVG01030679001) derived from phytozome v7.0 (chr-ID chr1 4; pos 13445934 to 13446423)
gtctacaagcgcacatctattgcacttaggtctctctcttttctctcttactatttcctcctactacacttctctatatttgtcattttctcatacatgcttgcttaagctattaagacacccacttaatggatttctatttagtttatccaatatgtcgaatttcattattattattatttagatttttatgggtggggcttgcaatagttgggaaaatgcttgaatctattctatgttgcctttgaagtatgtggacatccatgtgaagagtcctgttttaaaaatgcttgaatggttgaatgtaatctgagcatgtttggtttatttggtgcgagaaatcaaatgttgggtccaagtgacaacctaattaggaagttcataatactaaattattgtatatggtgctttacttccactactgctgacattttattttctaatgtaaatttaaggtatttgaaatctagttttgtcattgatttacttt

SEQ ID NO: 100069 - DNA, 913 bp, Vitis vinifera
  Intron number 3 from transcript GSVIVT01030679001 (locus G SVIVG01030679001) derived from phytozome v7.0 (chr-ID chr1 4; pos 13446505 to 13447417)
ctagatttttaaaggttggtttagtttttattattgtcgacatgtatgaaaagtttctgcaatcaacaaggtttttttttaggtgcttgtttttttgatatattctttattagataattcaagtcccaccttcttgatttctcttcatcattttgtatgggttggaatgggaaaaatgacaaggcattgttatagaattattaagcacgaaaagatcgatataggcatagtaattctaaacattttatggaagttgaattagttccttgtgtttatgtatgattttgcatgagttaatcctgttggtgtagcatttaagttagataattattttctgtaaaacattagttttcaacttgtgacctcctttctaccttattttggtgagaatgatgatttctcaatattgtgccttcaaaagatttgtaatttacaatgaattgattcattttcatggatggaactcttgttgtcttgtgcaactccttcaaacagtgatctaagtcattcatatgcattgtatttaataatgtgatgcttctctcacacaaaagcctttggaacagaattatatctgtatgcatattttgcatagagttgagtttgtctttgagattttcctccatcagtacttttactagatacatggaatcatatccatagctccttcatttagagtcataccaggttcctttcaaattgagagcaggatctcgctactggaccattgaattataaatcatgatttgttgaagaaaaatgttccttacaaatgatacatgtcaagttatatctctttctgtaatcactttggttcctctgttttaatcaggcttgtgggtgaaaataagtgaggtacctcttatggattacattgattaggatacggaaagtcacagattttttccaaaag

SEQ ID NO: 100070 - DNA, 538 bp, Vitis vinifera
  Intron number 1 from transcript GSVIVT01038751001 (locus G SVIVG01038751001) derived from phytozome v7.0 (chr-ID chr1 2_random; pos 466592 to 467129 reverse strand)
gaccttttgttaatttaggggtccatctacccccaaaacataattctcccaatgatatactgctctaaaacccaacttataaataaagccctgaaaagcaatagttttttttttttttcttctttttaattttgagcttgttctaatatgttaacaatctcaagtaatgttacagttacggtttgtttgggaagtataaaaagtgtctttataaaataaaataaaaaataaaataaaaagacttttgataaaaaaaaaatttagaattacttataaaaaaacaaatcacttataataattctttgacacatacttgataattttctcaaaaacatttgtaaaaaataaaactttcactaaaagcatataaatagaattgcctgataaaagcactctaaaaatacttttaaaaagtacttataatctaaaagtgtttttgaagaaaataataaaattaacaaaatttagaaattgctaaaaaaaaaaatgaaagttagaaaaagtaaattcgtccaaggctatactgagaacatttcct

SEQ ID NO: 100071 - DNA, 798 bp, Vitis vinifera
  Intron number 2 from transcript GSVIVT01034186001 (locus G SVIVG01034186001) derived from phytozome v7.0 (chr-ID chr8 ; pos 14575020 to 14575817 reverse strand)
ccaacactgactcttcttcagatcttgacacagaggtcagcagtatatttattattatttttatttttatttatttagttttagggctctgtttgattctagagtctagactacagtgaatagttctttgatagacattataggaatatctgtttgactatacccgtgtttccttttttcattcgtgctccggagaacagggaaagtattgaaatatgacaaagcctgtgaaattgttcaggttttcaatgtagatacacagagcacctaacagagtcatacccatttaatcttttaggtctattgattcttacatttaaataccagctaacagaacatcatttctctcaagcttcacatctaccctctgtaccagcagtttttaatgtcattttattttctgggtccggctgattataagcccaaatcactttactttctccacatgattttgtatgatatgatggcatttcaggaagtgtcgtctcttttatttgtttccatggagcctttaataaattcatctttttctagacttgatatcatatgctgcttttaatgctcaataccagaagagaactggcatgggcaattgagttcagaggcagggtaagctagattctataggaatatgacaccggatcaacctctggaggatgtgctttttcattatcaagaatagagaactgcatacgtgaatcaatttcaacatgattaaagagtccatgattttgtttcgatttttgttgtctctgaattttaattatgatggatttcagtccactggttcattcttcc

SEQ ID NO: 100072 - DNA, 998 bp, Vitis vinifera
  Intron number 3 from transcript GSVIVT01035369001 (locus G SVIVG01035369001) derived from phytozome v7.0 (chr-ID chr4 ; pos 834075 to 835072)
gcttgattcacaaggtaaattcaaaagggttatgatttgatttgggtaatttctctaggtttgaatttgttattgattagttgggataatgattattgatcagtgaagaacatatggaaaccatcaaaagagccaattgagttctgtatgggtcttggaaggtggtcattgtgtttcaataatttgattttgtcaacattttttttgaagttcgggcatatatatcttggttggattctgatgtcttgtttcattgaattgggtttatttggtggagagttggagcattctgccatgggtaccaagtcattatatgagaaaaagaaaaatctataattggaaataaaaggatgttccatttcgaatggagtttctagcaaaaattaaggctatgcttggttcttggaaaatttgagagaagatgtaagggaaagaaaatagagatgaaaaacaaaaggaaaaaataagttcaggaaaatataaagtagatttaaagtatactacttcaaatttatttaacttattttaactcttttgtataaagattaaataatttaaaaatgtataagtttttaactaattttaattatatttgattttctttcatattttcatagtaaaatcaaatatgagaaaatcattttctctaatattttttttttctttagtactttcaaggaaccaaaaatatcataaaagtattctgcagaatcttgatgatcaatccgtgaatagttaagtggttctgaggccagtggttttgcaatttcttatttagaagtttatccatagacaagctaggcaagactgaaaagctattaatgacacttgctctcagttagccagttacagacttctaactcatattgcaattctcaattgtctggcctgctagattgatattctctttattatattcaagggtgtgtgcttatctttttgttgatatttttcatgttgtaggaagagcttcaattggcattgttcaagtctccgca

SEQ ID NO: 100073 - DNA, 426 bp, Vitis vinifera
  Intron number 3 from transcript GSVIVT01033353001 (locus G SVIVG01033353001) derived from phytozome v7.0 (chr-ID chr8 ; pos 21265393 to 21265818 reverse strand)
aactacgagctgaggtatgttttccatgctctttcatacatgtcttggaattttttgttttgttttttttttccattctctttttgttatagataggaaaacatagttttctttcaaggcttagttttttggacaacatagttttcttcctaggcatggtgattggtgtgtcaagatggcaaggtgggcctctatgaatttggtgtggcaaattgtgtttcttttgtcttaaaagcatcagcaactaaaaacttctactaatttttaatatgaaacccatctctttgatgcaagccctttcaaatcagtcaagtaacaacttgtatacatatgttatggggttaatgataagcttgtctttgacatgatttgtaactcttttgagtttcctgatttctttgaactgctgggtttgtcaggttgtgg

SEQ ID NO: 100074 - DNA, 794 bp, Vitis vinifera
  Intron number 1 from transcript GSVIVT01033933001 (locus G SVIVG01033933001) derived from phytozome v7.0 (chr-ID chr8 ; pos 16614589 to 16615382 reverse strand)
gctctcactccagacgtagcctcgttgtcagggctgtaagtattttccttggctctattgctcttattttcactacctgtggtggatttttggtacttccgtcaatgcggtttagactcactagcttccgaggttttgcgatttccatttggatgtacttctcgtgaaaatgccccttgtttggttgcggatacgatggttgaaaaccatattatgtcaaaatttaaatcttatctgtaattcctctgagagtaggttcttcttatgtttctctcgtttccctacgctttctcgacaaacaaacaaagaatcgaggttttgtagaatgcgtttatgcattcgggttacttcctttcggtctataacttttatgtcattatgagcttattccattcaactttgcagtgctaatatgctgcattaattgggataaaaacagcgtgtcatcagagttgatctaaaccactaaacccttaaattaggtttctgacacgagttttaagttaatcatgtggctactcaggctcctaatattccgaattatgggattacatatcatatgtgaatcacattcacataatggctgattttctctgctaagcattaatcattaatgtaacttgaaactagattggaaaatagatctacttaaatgatcagagtttcaatttccttatcacatctgtcagctgacttggctactgtgtaacttttatttttaatttttattttagttccatttgatttcttgttttacagagtgaagctccactggttgggaataaggcaccgga

SEQ ID NO: 100075 - DNA, 879 bp, Vitis vinifera
  Intron number 1 from transcript GSVIVT01030556001 (locus G SVIVG01030556001) derived from phytozome v7.0 (chr-ID chr1 2; pos 6705751 to 6706629 reverse strand)
attactggcatgtgagtgaaccataattatctttatatattgatttaatctatgttttgggttctcttttggttgagattattagatgggcatccgcgattggttgtttttggtgatttatccttatatactgaagggtttatctcgggtttctctttcatgagtttgaaaaaaaaaattctttttgtttgattttgctccccctatgcttggcagttttgaagtgggtatgtattaatttactttcgttctgctcagtggctgatcttcaaggatcatgttcttgtccatgtgatgtaattgttggatcatgctagattttgagcttagtttatgttttccatgctcattatgaagcattaaaccaagattaatccatttacttaatgaagaagattttcttggtaacttttttttcttaggcctctatgttttgcaggaaaaattttccagggtatttttctctgagaagaaaataaaatttggtttttgtggatttctttgaaagcaattgaagatgcattattaattttcttcaagctgtaaaatacccttggaggtaaatggagcctgaaagaaaagtgtcttttttatcctgagaaaaattttctgtgaactattttccattatattacaaacttcagggtgaagtgatggataggatacacctaatatgatgaaaaatttctcccaaccatcttcagaatctgtactgtcaaaaaagtgcaacagataaaaaccaaggagttaggatgagttccttggtcattttgatttgcaaaaatcaaaatttgtttctagttattggattttatatcccaggactaatttcttatcttcttatttcacaggggtggactctatacgaggtattgaggt

SEQ ID NO: 100076 - DNA, 524 bp, Vitis vinifera
  Intron number 2 from transcript GSVIVT01031903001 (locus G SVIVG01031903001) derived from phytozome v7.0 (chr-ID chr3 ; pos 5272676 to 5273199 reverse strand)
caagagctgaggttcagaattctttgaagcaagaggtaaaataaatgataataataactaaacttgttgatctgggtactttatatggggagtattaacccagcttgaaaaggcatttggaatagtttgttctgaagtttgaatgaaacaaattcattttacttcttgaattctcccatttatttctagtacttacgaaattgaaggttacttagaaccgttgataagttttatttctgatttttaatacccttcagttctatatattgaggacacaaacacaagtttcaatctttctaacaccaggctctcaaaaaactgaacatgaaagaactatgaaccaggagcaggatcagtggccaaatacaaaaaatccacagtactaaactataaattgaaaaaaaaaaccttgttcagtatgttttgagtccatgttcttttagtgcacatcatgttgttagctttcactcattttgttttcttctatagattctacagcttcagaagggattacaagaccaatt

SEQ ID NO: 100077 - DNA, 1042 bp, Vitis vinifera
  Intron number 1 from transcript GSVIVT01031320001 (locus G SVIVG01031320001) derived from phytozome v7.0 (chr-ID chr1 4; pos 394270 to 395311 reverse strand)
cagcaccggcatcgccctcaaccacgtccccgctggtccgtacgctctcatttctccgattcttcttttcctatttcgtaattcgctctgatctccgactgcgattcttggaatcattgctgaattgtttgattatggtggttttgtttcgatcgatgttcgattcgagtgtctttgttgtggtttcatgacctccatttcttgtgcctcttctaattcatggtgctttcctaaggttttttttctctgatcgctgacttgacttgtttaattatgacgttttgctacgatcagtcttcaattcaacggattttgttttactgagtcgtaatcgaatctttcttactccttttctgtgttggtgagtggatctgccgagattattatattttctgctgaattagaagttcagatcttgacttttggctggtagaattgtgtttgatccgaagataagagctctccttcatttagactaggggttttggtttataacactagttttgttgcagttgaacctctgcttacacttatggtggagtgcatacctgagaaaccttctcatgaaaattaatggacatttatgatttttttcatacgatgtcggactgctacaatttcttgccagttttcttaaatatagattattattttctttcatgagtaacataatactagtggaatttagagttcactgccaaataggcttctctttctctcaagcaaaaaggaggtattatttgcaagagatgctgttaattcattttagttgtatccaaccaccagtaaatgtagatgtgatttagttttgcctgaaggaagcatttccaaaatgatgtgtaatatcgattttcaaaaaataagaaaataaaaaaaaagggggaaagaaaaaattcctcatgtcttgccacatggaatctccaactttctgttccctttttgatttgtacagtttattattcatttgtctaaattggagtgttaagtagttcaattatgggttgctctgtattgacgttttgattgtaaacaggcgttaaag

SEQ ID NO: 100078 - DNA, 597 bp, Vitis vinifera
  Intron number 2 from transcript GSVIVT01036777001 (locus G SVIVG01036777001) derived from phytozome v7.0 (chr-ID chr1 9; pos 22679078 to 22679674)
tctctcttatctctcttctcctacactcggaccaggtactctcttcaatttgcattttcatcttcacagttttgctattttttttggatttcttttttctgaaaagtttcattttattttatttttctggaattggtgttggaagtgtgaaggtatcagaatttgttttgtcaaaattgttttctgaaatttttttggagaatttttcttcactgtcatagaaggttgttggcgtgtttatggaatggaggtgtggtttgtgtggaggcggatacagctgagacagaagcttactttgttgagttgccttgttttcttgttagttgagtttcgttctctgttttctctgtttcttaattgcgcttgttggtggaggaacagtgatgaaatgaagatgaatttatgattgcaaacaatgtcctggaaatggatcattttgccaaatgttcatttttttttgtttgccttttttgttctgaaatttctcattgaatgtctgaaactactgaatttacgtgatttttaatttcttttggtgaaaattttccagtgggtgatgattggagcgtggttttgtgtgtaggtgtggtttttgaa

SEQ ID NO: 100079 - DNA, 808 bp, Vitis vinifera
  Intron number 3 from transcript GSVIVT01036777001 (locus G SVIVG01036777001) derived from phytozome v7.0 (chr-ID chr1 9; pos 22679682 to 22680489)
cgagtttctgtggaggcagatacgactgagaagaggtgggtttcttcgttttcttttttaccatctctctgtttccgttgtctctcaatttttaatgttgttcaaccaataaccggataatcgtttggaacatttcctcacaataatcacttgtagaggcgtttttcatttttaaaaatacaatgcacttcgaaaattgaaaactgagaacgacccaaacaacagaatatatatatatatatatatatatatatttttttttttttctgattagttctttcttcaacacctttattttcatttttctacaacagaatttcattgcgtttttttttttttttgaatttctgtctgaaatttttcctgaaaatctgaaattactgaatttattctgttcaaaattgttttctgatttgtttttttttttcctgaagattttgtggtgaattttttttccccctgtaattggaggttggtgtgtttttggagatggaggaatggtcctgtggaggcagatacaactgtggaagaattttgctctgtggagtttatttattcgctgtcgtctctgcctctcagttagacatgttgtttggaggaaaaactaggagaaataaagatgaatttgttttggaaactatttcctgaaaatcattttttgaattaatattttttaatgtaacctatataaaagaaaagaattaaatttttttaatcttatatgttctgaaatttcttgttaaaggtctgaaatactaatttttctttgattcttttttcccaaattgttttcagagacttttgttga

SEQ ID NO: 100080 - DNA, 861 bp, Vitis vinifera
  Intron number 1 from transcript GSVIVT01038680001 (locus G SVIVG01038680001) derived from phytozome v7.0 (chr-ID chr1 6; pos 21043981 to 21044841)
gggaggaatctcctgattggctgcattgcttccaggtattaccataatcaaaatagtctttaactaagtagtctgctgcaggatttggctgtaggagtttaaagataatggttgtgttcatcttttgttctgatttcagttctattgcaatttaactcttgggatttcaagcttttgaattttaggagttttgcaccacttggggtctctaatgactgctgggcattttaagagaccggcatggggtaactcaagtatataagctgtatcttgaggtgtcatccatgagtatctaaactctagttgatgtaggagaaccctcaaattagttagctgattacaaccaaacaacggtttttcgattttcagcttcttaggttttatggagaagagggtggggttaggtcttatgaatgatttaagattcagtttgacaatgactcaacgcctcttatcagttgcaatcaaaaggaaaatggttttggatctgtcatgaaaagagaatttggggggttttattgttaggtactataggttttattaatagtaacgttcttagagtttaccagcctttagcttgttgtcacaccataatttaccccaaaaattattgttaaactatttcatgtattagaaatagtttgtcatcatggagagttgtaagggcttggccatggaaggttccttggttatcaagaaaaaaaaaatagaaataagtatgtatttgccttttgtttttagggattttacttgctttgttggctctatagtagtttactatcattttgtctggacgctagttgagagagtttaatttgttgaacaggcaccaactcgttcagctttgacattatcttcgga

SEQ ID NO: 100081 - DNA, 963 bp, Vitis vinifera
  Intron number 1 from transcript GSVIVT01034516001 (locus G SVIVG01034516001) derived from phytozome v7.0 (chr-ID chr1 8; pos 20045503 to 20046465 reverse strand)
tcggctgcaagttcgtctgcactgccgttaataaggtctctctcgattgctttcgttttcttcttcttttttttcttttatgaggaaatgattttgttttcatgtctgtaagtttgttttttgaagttaaggaggtcgtgggtcaatgcgatccgtgagattaatttgaaattgagatttcctgttgtttgatttaccgggattgaggctaccaaattattgtgccagacttgactggttggatcactatttgtttggggattcatggaaaaggaatagagaattcccaaggaagaacaagatggaggttagggaagaaaaaggaaaaggaaatgaggcatagggccccgtttggatattggaaaccgcggggaaaaggacaaagggaaataaagaaaaaggaaaaggaagcaagacagctgaatataaataagattttccacaattcttgtcctggctttctttcctctttctatctgttttctaactcaacaacaagataatattctctctaatattatttatatattattattattattattattattattattatgaagcttttctcatctttttcagacattcaaagggagatcaaggcttatgttcttttttatgttttattccttccttttctgctggttcctcggcaaccaagcaagctgttagttcaagaatattttgattttattagtgggtagaagtgagattgtcagctaatcttttctatatgcataatggcttgttcatgtcaaatagtaaattaaatttgcggaaattctttttatggaaatgaattctcaaaggagaaaagacctgttgctgtgctttttgagtccttgtaatatttggagggaagaatattactgttttaaactttttctgtcctttgggttattgttgtctgagaaatttcacattgcaggcgggtcttgccaaactgattggacttgctggaga

SEQ ID NO: 100082 - DNA, 748 bp, Vitis vinifera
  Intron number 5 from transcript GSVIVT01035933001 (locus G SVIVG01035933001) derived from phytozome v7.0 (chr-ID chr4 ; pos 6090573 to 6091320 reverse strand)
tttgaggttgcacactttgattcttcttggtctttattttgatgattcaggtcatcataacatcttagtcatgtataatcaaactcatagtcagtaattgtgttagtttttatgattttatctcaaagaagccatttgaaaatactagtgacactaaagggaagacattacactcaggctaggtttctatccacataaattcatgtatattggcacctcttttatttatgtgagtgttcgttcatccatttgagtgtagcgggctctatgcatgtatatgattataagaaaggactatgtggctgttaaaattatattgaactagaatatgaccgtattctgacttcatcgaccttcatgtgtttatggggtaaacaaattacatgaaaatattttgcttatttttactgtttcattgggtaaaatatacctctcttatatatttagaaatgattgagatgcaatttctattggttataaataatattttcttgttagtataggacagagggtcatttgttgcttacaatttgcatataaaaagagaatgaaggggtgtggactctgatctttcatcctttcttcatctactacaaacagaagtcaataatcctttcataatttataggctcattatgaatgatagtatgactgtagttaacttctgggagcacctgtttgtgatttaatcttgtgcatcacattttacacagggcagaggaggggaggaattgtcaacagaactttc

SEQ ID NO: 100083 - DNA, 327 bp, Vitis vinifera
  Intron number 1 from transcript GSVIVT01037413001 (locus G SVIVG01037413001) derived from phytozome v7.0 (chr-ID chr6 ; pos 14191139 to 14191465)
ccataaggcaaaaaataggacttagtaagtgaaaccttggtgttttttttgaatttattgtgatatatttttgcagatcctgatatatagtatgggttacaatttatgtgtttgttcgtctcggtgaatgagacttgatcctgaacctatgaatcatgtgtttcatcccctattaccaaatcatttccttcttcctagactggtgggtaaatggcttctcatttatggtggtgttgttcattgtaaattattggtaagaaaagcattttccttcctcatggattcatctcaacaaccacaataacacaaattgaagggttgcagggc

SEQ ID NO: 100084 - DNA, 622 bp, Vitis vinifera
  Intron number 1 from transcript GSVIVT01033402001 (locus G SVIVG01033402001) derived from phytozome v7.0 (chr-ID chr8 ; pos 20945094 to 20945715)
gaagatatctggatatcaggatttggagaaaaattgtaagtgaaaactattcaaatatatagatgagatttacagcagatctgctttgattttggaaatccaagtaattctcatatgggattcttcattcttggacttttaagttttaacaacatggaccatcccactaataggacaattaaccatcaaattgtgtgtttcttgaggaattggtactgtttaatgttgccctcatacaaaacgggaaaaggaaactcgattctgggtgtttttgcttctgaaatcttgctgccccacaacaaaatgctcatataatgtcatcaatctcagcttattacagagattgatgacattattacctaatgggtttgcctccttgtcactgaaggatgtgaatgaggtttatatttatgggatcatcttcccttattatatcttattgtgtttgactttcagttggtgctcctcactcagaaactgttcatctagtgatacgaaactgccttcctgcttactttagcataaaagaattggctaagattgatctatttttctcattttggagttgaaaagagagagatctgatctgaatttaggtctttacacagttccaagaccaacc

SEQ ID NO: 100085 - DNA, 446 bp, Vitis vinifera
  Intron number 1 from transcript GSVIVT01032951001 (locus G SVIVG01032951001) derived from phytozome v7.0 (chr-ID chr1 4; pos 24539288 to 24539733)
ctgtgatttgggttgatttcttggaagaaattcaggtattctttttgggtttttgtttggtgttattgggtttgcttgatttacctgatttgagttgttctgtatctgggtttttgttggtgtttggtttactcttgtttgtggaggaggggggcatggccaccgatcgccggactttcgagtttttagaacggaaattaaaacataaccgattcatagaacccctttcaagttcaagtcatttctcacttgctatttcattgtaggatgttcttccaattatttctgcatttttctcgttcatacatcagccctgagtttccaattttcaaatttgctactatgtctgcaccatttcccaattgtgtaatctatataatttaaattcaatgtggctttgaatgtgggcagcctcagtttcgaactcttcccaattgagagaattg

SEQ ID NO: 100086 - DNA, 745 bp, Vitis vinifera
  Intron number 1 from transcript GSVIVT01032727001 (locus G SVIVG01032727001) derived from phytozome v7.0 (chr-ID chr1 3; pos 1218163 to 1218907 reverse strand)
ctcagaaggtcaatccattgattttctagttttcttttgcttttgggcttcttaatttttgtgggtttttgttgttagcgccattgtcatcatggtcatgtgtgtgctgacacccttgtttttcctttatgctgtgcttgctttatgagaaaaattaggataagatgggacattgaacttttgagtgttagatatttattgtggttgtggtgttcctggggacgcgtatgaagtgaaaattagattgttgtaatgaatactattttttggtttcttaattttctttctgttttttttgtccagatacgagatttaggggatgtagggtagtattagtttttccccgcatatgagttgtttggttgctgagaaaatgtggagaagaattggatcttagattgctataaaagacatgtttctaaatattgctcaatggagagacaagttatttgcatagttgagcgggaatataagacttattgacttgaagagactcggcatattataaggattcaaaactttgtttcttttttttccccctttaataagatttatggccagggtgaagaaaattttgattcattgctttgcttgatctgtcaagttgttgatattagcattttctatttctttgatttgattacttgggactttctttttttttttttaatgttttactttatgttttatttttaattttggcaattcagggccgggcttggattagtagagcttccaagagtcg

SEQ ID NO: 100087 - DNA, 476 bp, Vitis vinifera
  Intron number 1 from transcript GSVIVT01032096001 (locus G SVIVG01032096001) derived from phytozome v7.0 (chr-ID chr1 3; pos 22748289 to 22748764)
ttccttgaggattagaggagaattggagttttgaggtgattttctggggggttttgggttgttttgttgttgattttgatggtttttcttttattttctttttttttttttgatcggttggtcctggggcaagagtgttggggtggtgagaaatttgggtaatgggagaccaaatatgtccagtcaactgagttttgtgttgtgttttttttgttattttcgatgattttctctttggttaatgggaaatgttgcaaaaagagggaactttgagttttggaagctgggtttgttgttgtcaatttgctggttttctgtttgattgttgagaaaatgatggacaaggagagaaatttcaaatttgaaagctagatttttcattattctttctattcagacgaggctaatgccagtaacgagcttagccaagttgggttttttcttgtcttctgttttcttagccaccaaacggaact

SEQ ID NO: 100088 - DNA, 540 bp, Vitis vinifera
  Intron number 3 from transcript GSVIVT01032096001 (locus G SVIVG01032096001) derived from phytozome v7.0 (chr-ID chr1 3; pos 22749532 to 22750071)
caaaaccagatacaagaggcataaaggtcggttgaatatgataaacattgtgcccatatcagttgatcagatagaaggaaaataagtagatttaattatttgagatgattgtttgacattttgtgcatagccttattttgttgcatgatattcattagtttgtgatgctcatgaaacacattggagattgcagaatgttctggattttctttcggaagaacttgtgctcaaacagtcctgttctctttccccccactcccacctacccagctgtccttgacttgtttttattcttgtattgtgaaaattttgttttatttttctcagaacctactctaaaattttagccaacttttgttggtactccttgcttaccaactcatttaatggttcgtcccaagtagctctcaaactcgtattggttctctcaatgggcatatatatatttttgcttttgaatcagtcagtgtgggtatgaatggttgtgctttgtgcttgattccaggaagccctgctattcgtggtgacggagaagaggat

SEQ ID NO: 100089 - DNA, 571 bp, Vitis vinifera
  Intron number 1 from transcript GSVIVT01032634001 (locus G SVIVG01032634001) derived from phytozome v7.0 (chr-ID chr1 3; pos 1989893 to 1990463)
cgctcgtctctagattacagggcctcaagagaaaggtaatcggactcttaacccttcgtttggttcctaagaaacggggggaaatgaaagaaagaaaaagaaaattattgagtctttatgcatgtgtttcttttggtttccagtaattctgttaggctcaataatgaaaaattttatgaagctacaaattttgatttcttttttcttttctccaatattttattggcaaccaaacggcacatatttaaattaagttgaattgtgaatcaaattcgaggctccgatcatttggctgatctgatacttgcattgatattgatcggcaaatagtagtttttctaaatcgttatttttatccaagattttcatatgatggataatttttcttaatctttcttgtggcttgagaaattttattctttgttaaattctcttgccgtgtactcaaactgaagattttctttccccgagtccatgaataaccctagtagcatagagtgattacaatttttcaattatttttgtgatttttttagttggaagagggaagccgcacagagcacttgcaagc

SEQ ID NO: 100090 - DNA, 905 bp, Vitis vinifera
  Intron number 1 from transcript GSVIVT01035951001 (locus G SVIVG01035951001) derived from phytozome v7.0 (chr-ID chr4 ; pos 6388443 to 6389347 reverse strand)
ttctctacaggtctctctttttctctctatctctccatccttacttctagatagcctagttctgtgtggtttcttattattgttttgtttttagaacttttttttttccttttaaaagtttatatttttattgccagaaagctgaagaatggaagaaaatttgatgggtttgtgtttggaaggaaaaaggatgtgtttttttttcttctgcctctacttgttctgcgagcaaactaaggaaaaaaatgagaaaaagaaatagaatttcgatttcatgttttttttttttttttggataaattttggaattggaaaagaaggaacatttgtttgtttcccaagacaactgggaaaaataaacgaagaaaatgaaagaaagtagaaatttcaaaattttctattcatctatctaattttttttttctttttaaattttgaaattgggaaaaagaacctccttttccaatacctctgttcgtttcctggaaactcgggaaaaagtgaatgtaaattaagtttgggattctatgttatcttggaattagacaaagatatggagaactcttggttggctggtaaaaaaatttgagttttctattatatttgaattgggaggaaaaaggaaatcacacttcaaataagccaaattgttgtgttaagattaatagaataaacccttttttccccactatcaaggatttaaaaaatttaatatcttttctgtttctacatttttcttaggaaccaaagaaggattttcctttttgtttgagatcagttttatgtatttactttttgttgcttgttgtaagaagtttagtttttgcagtttgatgtttggagactaatttgattcaatttatgtattgttttggaattaggcagatacctgaggcatttggagt

SEQ ID NO: 100091 - DNA, 819 bp, Vitis vinifera
  Intron number 2 from transcript GSVIVT01037706001 (locus G SVIVG01037706001) derived from phytozome v7.0 (chr-ID chr1 9; pos 7122734 to 7123552 reverse strand)
gtcctggacagcatccaacccaggtgtgtgcataattcattaatgtgataatatggaaattttcgaagtgtttcttgtcataacttgtacaagtccagtaaactagtttctaactagattatgttttgctattttagttgactgatttaagaagttacttgagcctttgactttgtttaggtccacaaactagggatatatgcttgttcaaagaaccttgtaattatctttttctttgatttacagagcttaattcatgaagttaatgttagatgcctaagaatctgtaggttgttgtgttggagttttccaagtgagtaatttggtcatgttgctggtatgacatgattcatgaccattatgccgcaggctctccaatttatttggcctcagaatgggaatttatgtaactatggcaaaaccttcttagggcactatatcctgatgacgtaatgataaagaatttgatctaaagaccctgaaaagggaaagttgtccttgtttttttgttaattatatacttttgctgctgggaattaggaaactggcagcattatgatctcatatgatattcatgacctactccaagcatagatgtgggatattgagtgtatcagccaaggttattcatgtgtattgggacaagatatatttaagagcgaatcttcaattcttattagggttatttgtaattataattgtttgccagtgtgaagatttgtgcatgttttgtaatttccatttggtggtaatgaattttacaaatcttttaacctctaacattcactcctctttttataacaagataggctcttttgg

SEQ ID NO: 100092 - DNA, 866 bp, Vitis vinifera
  Intron number 1 from transcript GSVIVT01033469001 (locus G SVIVG01033469001) derived from phytozome v7.0 (chr-ID chr8 ; pos 20433776 to 20434641)
atcgggacgatatcagtttcaatcagctccagaaggtatggttattggactaatttgaatcgctttgtatcgttttgttgattttatattggtttttgtgcgaattttgatggttgctttggttttgaattggatctcacagctcaaacaattcaatttaaggtgttttagggttttagggttgcgcctagtttgctggatgtcttgttttgattggatagcgagtgtttgatttatcagatccagttttcattggtatctgcgccttgtagttcaactttttattttttatgtattcatatatatgtggtttactatagagaataaaaagctttcaatcttgtattttaagatttgtagatatttgaatgtttatatataaagcggaattgtgtttttcgtgctgtcctaccagatgctgtttggttgctaagaaaattttacaaaaggaaaagaaataaaaattctaggtgttggattttacgtggattggaccaagcaaacaaaaaatttcgttgcctagcctattttagttatctgatttggttcaaatgaattttttggtttttggaaacgaaacagctttagaaactaaggttacaaattttattccgaccaaaatgcacacattaaaaggaaatgcgtttgaatcttaatctgtttaccttttctagtcaggatttagagaaggccttacttctttgtgtgagttaatggatagaagtggcaaatttcttgtgatgatttctgacatgcattcaggctatgggctaggcaggagagagactaattagtagttactaaccaagtgtttttgtccttgtgatgtagttctggagtgagctgtcaccccaagctcggcaaga

SEQ ID NO: 100093 - DNA, 1012 bp, Vitis vinifera
  Intron number 1 from transcript GSVIVT01037159001 (locus G SVIVG01037159001) derived from phytozome v7.0 (chr-ID chr1 8; pos 28445758 to 28446769)
ttttcttccattttcgactcagacgtttccatcaggtaggaatttattgcagtcaaaacccggtttttgtttctatgtttcaggttcttgatcgatccaagaagatgtatttttcttgttatttttcgaattaatttaatctggtactgtaaaatctctttttgttttggacccatatgttgttttcttttgggggagaaaatctctgcttgtttcgatgaaaaatttgcaatcgaagtcaaaacccaagttttattttcatgttttaggttgttgatgagcccatatggtaatcaaatgtctgttttatggtatttatacctactgaaaattttgctgtagatttgaatacctgggagtttttcataaaaaaaatagggtggattttttattatgttacttaaatgcccaagtgatgaaccgtattaaggctcagctgtattgtaggaatgtgatgatcacatccatgcttagttttatttggattttttgttttgagtatttaaagttgtgaatcagggaaagataaaattggtatcttgttttaattaactatctattatttgctgaaattaatggatggaagtgacacctggtagataatattcttggcagattttctctttgatattaatttgggataacttatttttagcaatttttgtattatattcaatgattttctaaatacagtttatttgagcaaaatttttcttaaaagatgaaaaccttaatttgttattggtttggttactctttgttaatgggcggggagcaacattttgaagacttgtggttttaacatttagaaaacagggtattgaagcaaattctctgacaaattttacttaccacaacttctagaaaatgaaaatggaacctacaagcccaaattctttcttggctgacggtattttacttgaaatacatttttatttaatgaggggatatgtttgactctactattaggcattggctaattagttttctgttttgtataattgtcgcacag

SEQ ID NO: 100094 - DNA, 471 bp, Vitis vinifera
  Intron number 2 from transcript GSVIVT01038195001 (locus G SVIVG01038195001) derived from phytozome v7.0 (chr-ID chr5 ; pos 24267811 to 24268281 reverse strand)
ggagataagattagaggtgattcaaccaacaccaggtaatttgacatacttggttgaacttcagttgtttttctttcaaaatgtcaataatttgaatgggagttctgttgcttctacatcgtctttaataagaaaccaaaacgctaattaacacgctgcatatttgttaggacgtgacatacatcatgaactcaaatcttaataccttaagctttcaaaaaagtaactctcgggtttttaagtgtttttcacataatgtggatgcatatgagctcaaatcttaataatcctaaacttttagaagaattcattactcaatatagaatcaaaactctgattagtgggaggtctcaggtaaatctatcctttaaaatgtcaatttatgttcattttctccacatgcctgatgattgattggtataaacttcatttgcagaggcctctgatccctcagactcactagccttaaca

SEQ ID NO: 100095 - DNA, 487 bp, Vitis vinifera
  Intron number 1 from transcript GSVIVT01038195001 (locus G SVIVG01038195001) derived from phytozome v7.0 (chr-ID chr5 ; pos 24268398 to 24268884 reverse strand)
ctcttgctggaacaatctcctttaaggtcctctctctattggttttcttgtgctttattgaatttacacttcctggatttcctgaattatagaatcaggattgatgtgggaaggaattgaactggggtttgagagatggggtttgattttggcggatatcaatctcctataaggctacaagaaggttgtgttgtttctcttcaggagctctcactttactccagccatggtggccaaattgagccttcactcaatgcgattttgttaagattaggttaatgtagataagatattttgtgttagaaaaatatgaacccgaaaatattttgattaatgggagttgaaggtataagcattgtcttacttcaatgcttgtgtcccaacttgaatcgacctcaaagcgttcattgttgactggaaaattttccatctcataattcatttgtacgctttgcaccagcactgcagcaacgacaagggcgcagca

SEQ ID NO: 100096 - DNA, 674 bp, Vitis vinifera
  Intron number 1 from transcript GSVIVT01033494001 (locus G SVIVG01033494001) derived from phytozome v7.0 (chr-ID chr8 ; pos 20251896 to 20252569 reverse strand)
taccgtgttttagagagagagagcgaaattcacaggtattttcctctcagttttgctctttctctattcatagatgttctctttgtttgtctatagatctgcatttgtttttcttgggtgaaactgtatcatgggaaaatgaaaatgtaatgttgggtttattgaaatgtggcgtttgatatgcaaaattctttgatttgtgatttggccccttttcccggtgagatattagagtatatgtatatgggtgattagtaatgaaaatgattgttaatgtttccactgacaaaaacgatctgggtattgtgaattattgtgaattagtttgaattattctcatgaacttgaaattagacaatggcgcggagaattttttaatgtgggttggatgatgatctgaataaaagtggacgtgaattttttggtttttcgtgataaaaagatctgggcatcgtgaattgatgtgaatttttgtcgttaacattaaattggaaaatgagatgaacaattttgatatgggtgttggataatgacaagaactaaatggaattgtgtgttttgattttcactgataaaatggatccgggtatcacgggttaatgtgaattactgccttgaaaatgaaattggatgatgacgagtcttggggttttggtgcagttgggcattaagga

SEQ ID NO: 100097 - DNA, 729 bp, Vitis vinifera
  Intron number 2 from transcript GSVIVT01037716001 (locus G SVIVG01037716001) derived from phytozome v7.0 (chr-ID chr1 9; pos 7221740 to 7222468)
gcgtctggtcatacatcaaggccaacaatcttcaggttttgtatctctctttccatgtttttataattgataatgaagaggaagtttgtcttccttattgtctctttacagggatgtgtctgtatgcaaaaataatctttgatatgcatattatttttgcatctcccttcttattagttatcacatggaacctaagtataatcactgtttggagtgaaaatgatttatataatcattgttttttcttacccctaagtatctttcttcattattttgtaggctgtatatgattttttttttaaaatattttgaattttgacggaagttacactatttccagttaaagttgtttttagagggtggattaattggaatgaggttggacccggttaattaaacaaaagagcagctttctaagagtttctaataacagtgactcagttttccttagtgatgatgtaatcatgtaaggcactggttgatggttaataagagacagttactatattgtttaaccacatgcacacacatagatgaagtacattcatattaccatgattgctagaagcaaatggaagaccatatagtagctttatcctttccttcatgcacttaaagtaattaatgttgcaagagtttttattaatttagtgtattgatatgattttccttatacctgaatggaactgtgggctgcactgtttcttgttcaggatccaaacaacaaga

SEQ ID NO: 100098 - DNA, 830 bp, Vitis vinifera
  Intron number 1 from transcript GSVIVT01034907001 (locus G SVIVG01034907001) derived from phytozome v7.0 (chr-ID chr5 ; pos 11791 to 12620 reverse strand)
agatttccctttctatctactctctatcaccactggtagacaactcatctcttctcatttgtctggggttttattgctttctgctcttgatttcgtaattcccaatctgcttattgggtaaaggaaggaagaacggggaaattgagtaaatgaatggagatgaaagaacggagaagaaaatgaaacgaaattgagttgtttgatggatttcatttagtatctcatgtgtgagaaagtgcatttgattgggtcacgttatgcctgggacttgttaacgaattattatgattcttcagacatttatattgatgtgatccctgaagaaattggagcctgccctttttacaaggttctactgaatggtttgtttttatcagggttaaacttatactagtccatgatttcggaagatcgtttgtttgtttgtttttgtttttatttatttatttataaatctctagttaaaacattttttttgtcattctaagtggtcagacagagttgtttcagttgaattgttgttttcaccgcattatttattgtttggttgcaatcagattcttggtggtaaactttgataacatttttagggcctgagaagtccaatgccaagaattaattaaatggggcaaaaattttaagggcaaagatcttcaatttgattggcggcgttattcgtatctttgtttgatcatattttatgtaatgtcaaatgaaagcttacctcatttatatggctcaaaaatcaaggctgaaaatttttattgatcataattagattaaccccacttgtaggaggacaaaaccctggtcaaagagtggctgctgcc

SEQ ID NO: 100099 - DNA, 1037 bp, Vitis vinifera
  Intron number 3 from transcript GSVIVT01032335001 (locus G SVIVG01032335001) derived from phytozome v7.0 (chr-ID chr1 1; pos 15149767 to 15150803)
cactagaaggtttgttcttgtgctttcttgataatttactataagacttcttagttgcatttttggttgccgagaaagtagataaaaaaaggaaccaaaagtaggaaaatgttccatgccttttactgctgtgataagtggacatgcttttgattagtgatggcatatttcaaaatttatatgtgggactgatcactaattaggtttgaagaattgatttgattaaattgacttgctttcctataggcattatattctaaaccaattagggttaaatgagagtaatattaaggaattgaagttcgtgattttcatctgcattttatttggtctcagaggtttatgattttgagaccttggccctctctgaattcttttcttctgctggatggcaccacatgttttaatgaatgtggtttttcaaaatgtgatttcccttgcttgttcatatgccttttgtctctccaatattttgtcatggattagtggtatatatatatagattccaaaccctaatttttctggctttgtgattatgatattccgatatgcattttttctttctattttgctatggcaaacctagtttttctttggagatagtttcttcatccccttgttcaatcacaattgtttctgtcttactatcacagtataagaatcaaaatttaaccaatgtttactactttttttcttccttgcttttacttctctaatctttttctttttctttttcatttttttaaaaaaaagcaggatttgtggtgatgtaaagatgaaaaattcaacttaattaagcctaatatttgtattgtgtgctattgtggggaactttttccttttctgtttttttttggtcagttttcaattgaggaatcacttaaaatatcaaaaattgatttgtcttgatttgctgcatattcttaacagcaataccatgttttgattattgtgtatataactttctgatgtgctggttgttctctattgttattgtctcaggaaaggacttgattgggcttgcacaaacaggttct

SEQ ID NO: 100100 - DNA, 767 bp, Vitis vinifera
  Intron number 1 from transcript GSVIVT01032936001 (locus G SVIVG01032936001) derived from phytozome v7.0 (chr-ID chr1 4; pos 24359206 to 24359972 reverse strand)
cttatatcaatattagtaacactaataaaaaattgataattttgattagacaaattaagttgctttgatacattattcacaacaattggattttcaccaagatataatgaaaggctctatgtgcactaaaaaatgtaaaataattactcaacaactcttttaagcaattgtgtattccccatttttttttatagaatatgcacactcaacctcttttcttttaatatttctaaaatgataaaacctctttttgtgaattggaaggtgagagacatataactaaaaattgcatttaggtagagaaaaagacaagggacaaggcgaaagtagtctgaagttattattataaaaaaattttaaaagagagacttttaataaaataatatttattatttatcaaatttaatttattattagtttcatattattaaatgagttgtaaaaaaatacttataattaagattaatttcactcaccatctctaaagttttgattaaatacatctagtcctatagatctaagcttgatgaaattttaaacttacgaaaaccagatgtatttagtgaaaatatggagggaggtggtaattatgtaaagaattccaattattagattttaaacaaatgttgcttcaaaattgggaagattttttttatttttaataataataaatttaaagataggggcggaatggctggcgtagcaaaatcaggtgaccaccgctgctctgcactaggtcattgctttcctgagcaaagaagagtaag

SEQ ID NO: 100101 - DNA, 462 bp, Vitis vinifera
  Intron number 1 from transcript GSVIVT01033751001 (locus G SVIVG01033751001) derived from phytozome v7.0 (chr-ID chr8 ; pos 18124059 to 18124520)
gttccacaccgcctctttaggtccggtccaactcttttttcttttgtttttctatgcaatcaaacggaaccttgatttgcttatttcttcatttttatttttaaatttactttctcttttgttgggggagagcctcgtgaaaacgcaggtgagggggttttggattttcatttttaatatttaaagcgaagtttcggaagttcttttcttttattttccttcgttttctctgcaatcaaacaaaagcttatcatcatcatctttatcattattattaactcactaagcattatcaggaccatgcttatgtcctatatcctaataataataataatacataacattatgtttttcaatcattacgattttataaagtaatcgtcatgaagatgataataatttaatatgttaatgatgataacaacgacaataaaaataatttattgtcaatcaggtgaagga

SEQ ID NO: 100102 - DNA, 1040 bp, Vitis vinifera
  Intron number 1 from transcript GSVIVT01038604001 (locus G SVIVG01038604001) derived from phytozome v7.0 (chr-ID chr1 6; pos 21552281 to 21553320 reverse strand)
gttggatcaccagaaccttgcaacttctcttcaaggtcagtgaatataatttaatttaatttttttttaatttttttttccttttctgcaaattgagttcttgtgtttttttgggttgaattatcaattgctcaattcttgtgttgcctgtgttgaattctcagttttgtggtgagatctaagatgggtatatgttgaatattgttttttgattttggttttattttttatttttcatttttttcttcttaaattgttgtggtttatgtgtggaattctcaatttggtggcaagttttgtgcgttgaattctcggttttgcggtgagatatgagatgggcgtattgaattaccttaaattttgcaatttgtttgtttttttcccttcagacctagtttggttgccgggaaagctgggaagtaaatgagtgaatagaattctgggtcttaagtgttttagtttttagcatttccgtctttctttgtaaatttcagattgagtgttctattgtttgtgttgaattcgccgggaattgtgtaattcttcgtcctgatttcttgataccttgtttggttactaagaaaaccgaagggagtgaagcaaaagcagattttgaatgctctacatgatattgctttgggttcagaataaagaaagaaagaaaaaatgaagatcacatcaattcagtctctgatcattaaattaggggaaatttttgttttcctgaatctcaaactattttgattaaacctttcaattccctctttcccaccttttctcagctgcctaatagctgaaaccaacccttcaacttgatttaaactcacccattttttcaccctaaccttcttcttggcaaaaatcatctaattttctggatccacagactttcctttcctttccttgtttttgttgctgagttcacagcttgaattctcaatgttagctagttgataaggtttgtttgataaattaacaaacatggctgtttgatttcatataaagtttgcaggaagtggaaggtgttggcctcagacaac

SEQ ID NO: 100103 - DNA, 364 bp, Vitis vinifera
  Intron number 2 from transcript GSVIVT01033096001 (locus G SVIVG01033096001) derived from phytozome v7.0 (chr-ID chr1 4; pos 25682590 to 25682953 reverse strand)
aagagccatcggttctagaaatcatcaacatcaaagtccgtttctttgattttttttttttcttttttactcaattgctcctaaatcttaaagcattagtgttattgttgattaattagcaattaaactactactttttgtttctcttttttttttttctgtttcaatatttctctaatcaaactattgatgttcgctttctcgtgttataaatgctccgtctgatttgggttttgagacggagtattattttttaatagtgttgatttttttttttttaaactattatggtttttgagtgtttcatctattgattatctgatattctttgcagttgatcgagagtggtgaaaaagaaagattg

SEQ ID NO: 100104 - DNA, 643 bp, Vitis vinifera
  Intron number 1 from transcript GSVIVT01033096001 (locus G SVIVG01033096001) derived from phytozome v7.0 (chr-ID chr1 4; pos 25682975 to 25683617 reverse strand)
aaaatatataaaaaacaattttcttgttatcaaatgtgtttttttatttttgttcttgaataatagaaaactattttaaaaaacattattgaagatatccttaatttttatcaacataaatatatattttttgaaatattaaaaaacatttgtaattctcttaaaattacttccaaacctatccaagctcaaattcaaatggtctcttccatcggatgatatttttaaactaacgtatctcttaagttatacgaggccgtttactcgggacgaggattaggatacgcaaacggtggaaaactagggcagtgtgcaaccgaccaagtaaacgacgtcgtttgaggtaatgaatctggttttggccccacagactcaccgtcctcataaaaccccaagcattttcctttttctttttaccagcaaagagacaccatagggtcgatctgaacacagcaaaatttcttcatctctttggcttgtagctttaatatcacatgtcagtcatctcctcacttctttcgatatcattttaatttttatttatttttctctttcgctgatgctttttttctttctttttggttcgtgtatttgattgttatgtaaaaaaggaggccttcggtgaatcgtcctccgaccccag

SEQ ID NO: 100105 - DNA, 943 bp, Vitis vinifera
  Intron number 1 from transcript GSVIVT01038535001 (locus G SVIVG01038535001) derived from phytozome v7.0 (chr-ID chr3 ; pos 11194335 to 11195277)
catcaattaaggctgattacattacacgccaacaggtgatttttctttgtccaatttaattgtcaaaatttctattttaaattgagttaatttcaatcacatatgtaggtgagtgtgtgtgtgtgtgcatgcgcctatctacacacatgcaaaattttgaaattatggaggtgttgctttaagactatactaattaaacaagataaatttttggttttgggtgactggaatgaacaatcatcttggtaatctctagatacatggaaattgaagtgtgagatcaggttggatgagttgctagcttgttttatttatgaaagttgagttaatgtgctaggaataagatctctcaggttttgctttcttgggattacttttactctgtttctgaagtgaaagattttaagatggtccccaacaaggaggagtccaattaggcttgtaagaggatttaaaactaatgtggaactcaaccattctcggcatccgatcaatagggttctccatcaattgacatgtagaatctttattgacaattgattgagaaagaaaagccttagagctaaatttatgaaggggctcaatctatcaattctcaaacatactcctagcatgtgtggagatccaattccccatgcaatgagttagggcatttaaaagattggtggggaactaaaaaccatccatgtcctatgttctctaggtcatttggcatagccaaaaatgtgtgctgactgatcctgatggtcttcaatgatgcgttcaaggatcgagttcagagcatgctggatcacattggacagctgagggaactctgactaacctaactagattttttaatggatcataaaaatgctaaattcctaacatttcttatattaaatttatgtaaaaccttcatgttgccttctgaatgttgctatatttttttaatgtcaggcaa

SEQ ID NO: 100106 - DNA, 817 bp, Vitis vinifera
  Intron number 1 from transcript GSVIVT01033081001 (locus G SVIVG01033081001) derived from phytozome v7.0 (chr-ID chr1 4; pos 25594627 to 25595443 reverse strand)
actgctttgttgaggtattgtgggcaataactttttctgtttttttcttttattctttgttttgtatattggtgtgatcgtccacgtccgatgaaaacgtctcacgctggtgttttttcctatatacaagtcccttggattgtgattatggggtgctcaaatgagcaagcgcagatgagggagaaaagagagatgttccttctagtaagaatcttgtttttctgcaatggaagatgtggtcacatcggaaaaaaaaaacccgcctctaactcttgcacaatttggtcaatagaacttgagaaaaagtcaactggctcaaagactaagattctcaagttcattgttactcgatgtgcagtgaagaaaaatggcacaacgccattaaatgtaaaggacaaacacacccttgagtttctttatacaaggcgccaagtttcaatgcaaattgattcctcctttgaattggacaagatggctgcagtcagctctacatctcaacccctttgttttctcttgtcaggcacaatccatttaattattatagaaattaagagaaattttagacatttttaaaattttcttatttgagagacaaacaaagttggtattcaaacaaggaaggaagattcatggaaggagaaatttgggggatcggatttgcattcttttaccttccaattttttttaattatctcttttctcatcattcttagaaccaaacataactattgattcattttacatttgaaaatggaacacccaacaccagaaattaagcaaaatatgaaaaaacatttcaaacattatctttgcaggg

SEQ ID NO: 100107 - DNA, 1012 bp, Vitis vinifera
  Intron number 1 from transcript GSVIVT01036686001 (locus G SVIVG01036686001) derived from phytozome v7.0 (chr-ID chr1 9; pos 23853958 to 23854969)
ccccctcgttgctggcctcaagcggtcttctgaaggtttgatatatatatattttcttttcctaggtctattcaattccttgtttcatcgttctgctctattgtctattgctttcgtcttacaactcaacatttctcattttggaaatgcaatttatttgaggtaagtagggcatagtgatatctcaggcgagtttctgttttgttcccacattttggatctatgagaacccagatgtccctggatcaaaattgaacggggtgcatgaccggagattatccatcactgttattactgatagttatttttatatcaaagccaaaggcttttactagtgaaatgcagtttgttctagaaagcaacgtttgctccaaaaaggaaaaaattgatgtttgctatgttactacaaaacaaagcttgatgagatacagactagccagcagctttgagagatatattgaaaatgaaataattattcaaacaccattattgtcaaacagccaggtgtcctcttaacttggtgttactggcacatccaaccttttgcatgggagcacaggaagacaatgatctagcttttcttgctaacccggtggattccatccttaattgcattataaatattgttaatatatgttaatgtgttatacctatgtcttataattgtgtggatttgtcaaatattaataattagaacaaattttgttaattttagtgtataagtgaaattgtcccattttcagttatactatttaatttactttagaacctattgatccagttacatatttatttatcatatgtcttgcctaaacctgtaaacttgtaatttttaatcttcatttagttccatatatggttgctatgatatttaattgtatttatggatttgtagtaaatctattacaccaatttaaaattatatttaagttatacttatataataacacatatgtttggtctactatctactatagcgctctaccatccatctgttctgggtgcccataac

SEQ ID NO: 100108 - DNA, 1030 bp, Vitis vinifera
  Intron number 1 from transcript GSVIVT01034511001 (locus G SVIVG01034511001) derived from phytozome v7.0 (chr-ID chr1 8; pos 20141356 to 20142385)
ttttcctttcttttggccttttgtcttttctccccgtcttttcctttgcataattcgcaatttttaaatctttgtttttctccttggaatttttaaaaattagttttatcaatctagaaatataaaaaaaaaaatgggtttgtatattttgttcaaaaaaaaaggggaatatacatttgcttgaaagagttcccaaataactattttacgtctgtgagcaggcatgaaacctttgatcatatgcaaataattcattgtttttataatatggtcaaattaattttaaatgtatttaaaatatttttaacttcaaatctaaattggtttcaattaattttaaaaacaaattggatttaggaactaatataaactcggtttatgttcaaaacaaatataaatttacaattgagttaagaagaaaaaaggctatgaagttggattgaaatcgatccatgaggatcgaatcaaactaacgtcaaaagacttaatttgattagattttttactctaaatatgatcaaactgacatcaaaagacttaatttgatttgattttttactcaatatctaattgatttggttttcatcgcatacagtcgattacaaaaccaaccttatttacaccttaatgatatatctcttgtttgttagtttcaaaaaaaatttaataattttaaaaataatatatttacgatatatcacttgttttttaaaaataatatatacaaagcaaccctaccttatcttgatatcaaattttgtttaagaatgattaaaataattcttttaaaatttctttatttttttaatatctactaataaattttaagattaagagtaaaataaataaaaaatcgaaactttaatttatagaaattgagaaaaaaaaaatcagtgaaacggacagccattattaattttcttttccttctgtttttccagtctgcactctgcactctgcactagtcgaaacgcaccgttttaagggtttgaaagacgaggggtagtggaagcagacctcgccatctcga

SEQ ID NO: 100109 - DNA, 978 bp, Vitis vinifera
  Intron number 2 from transcript GSVIVT01035817001 (locus G SVIVG01035817001) derived from phytozome v7.0 (chr-ID chr4 ; pos 4590409 to 4591386)
gccttggtgacaaaggttcaaggtattaatgctggtttcttatcattatagtcttcgctgatattggcattcctttggttataaattcaagatgtttctttcccttgttttcatctgaactttttgtgaggcaaaaccatcgagctgcatcttatatacctagtttgagtaatgggattgaagtgagttgaatgtacatggtagtttgtttggttaagtttatacacattgtgttattccctgctttctaagcaccattgatgaagttcaaagtctttctcttcgttttaggaatatgcctgtgtgagaatggtggactggttttgttcaaaagaaaaaagggagtaagagaatgtcaatgtcttgtcttgttcatgtggagaattttgatgtttaattaacttcttgaaccttgtcttcttctaaaaaattcacattctgattgatttgatgggggaagaactatgtgccatggattatataagatatcatgagctgtcgttttcttccatcatctctcttgattctaagttttattggagcagcctcgaatcttaaaactgtatatgccaaaacctaaaatgggggaccactgtttcactgtcttgcttgtcctttcagctttgcaagagttatactatttatatttatagtgctaatgcttaagtattattccctaaattatcatcaactgaatcgtatagtttatgatctctaccatccttgctaaagcttctactcagctttgtgtgtggtcccattagtatgatttaaatagtttatatcgtaatgttcttctaacttcttgaagagccctaacagctatctgtactattggtttctcatgctttattatttcagcatttgcttatcccggtttcccagttgaaggatggccaatagaaactaacatgagtttctcaatttttgttttcttttgcagctggtcccagatcttggagaccttgcctcttccaa

SEQ ID NO: 100110 - DNA, 903 bp, Vitis vinifera
  Intron number 1 from transcript GSVIVT01036806001 (locus G SVIVG01036806001) derived from phytozome v7.0 (chr-ID chr1 9; pos 22300522 to 22301424 reverse strand)
ttcgtttccactttggacactcattcgatcactaggtctgttacctcaatctctttctctgttttctcgtgataatagggttttgattttttttttttatgttgattttcttctaatacaacgtggaatttgaagtaaaatttgggttttggaattacttttttccaactcaagtttgtgatttgggaagttttgagttgtgtgagaattgggtttgggataagcattttctttacatttgggaagttcgaattgctctctcaatagacagcgaaatttaaattgaatttggatattgaaattattttcagaacttcgcttgaaaattggattttaattgtgaagattttttttttttttttaaaaggacaggggaaatttaattgtatgaatgtatggggaaaaactattatccaacagcataatcatgatttgggataaatggaaatgaatttttttaattattgtggcttattaaataataatatgaattatatttatatgtgcaaatgtgtttactggttgggttagaaattcgaggaatgtgtttttccggaaatgattccataatgcaatatataaatgctcaccattttagaaaagcttacatgacatgccactgagtaagttggacaaacaattctgtaaaattttcatttccatggagatttccctcttgaggcatttaggttccatttggattatgaaaggtatgaggaagggtaggtgccaagaaaatgagggaaaaacagggttgaaaagataaataaaattagaactgaaaacaagcttaaactcaataacctttttctaccatgcgtgaggtatttttatttttttcccttactattacttttcaagatccaagtgaaacattaatgaactttatttatatacaaaggc

SEQ ID NO: 100111 - DNA, 828 bp, Vitis vinifera
  Intron number 2 from transcript GSVIVT01031366001 (locus G SVIVG01031366001) derived from phytozome v7.0 (chr-ID chr6 ; pos 19537554 to 19538381 reverse strand)
ttctgccgaggatttgaaggatattcttggatctggtgcgcccactatcttttctttgtttcatttttttgtttcatcttttctttccaattaatgttcggatctgattttttattgatctgtagtttaggtctatattatctgtaggatctagggagtcattctggttttgaaaagtaaggaaaaaaattgttagatcaaatgttttctgtttgcagaatgcaaaacgaagagaaagcctaagaaggagaacgtaggaatttttttagagaacagaacatgcttccaagataatcctcaggggaatagatatttagctttcggtgggtgagttgtgttgaaaaattgattttcgcacgtatggattcgggtctggatggttcgaatgagggatttagatttcaaccctcacttcaaactttcaaccatgttccgaaaggatatatatatttttttaaatttcttaattctgatgaagttataatgtaaatcagatactagtgtaatgttttcgaggtagtgttcgtttcaaattggtagtacagaaaggtgttatgggaaagttttacagggattcatctgaggggagatttctgaatttgaagtgttactgggaggaggtgttcagaaaccatcctagaaaggatttgttggatttggagtcaagcccatatgtcatttttaattacttcctttccttaatcttagacccttttgtgctgttcttcaaatcctagtatccagatgttaccttttagagggagcgttaaattttcagtcatgttaactgatatggattcttctaatttacagttggggctgaagctg

SEQ ID NO: 100112 - DNA, 643 bp, Vitis vinifera
  Intron number 2 from transcript GSVIVT01035666001 (locus G SVIVG01035666001) derived from phytozome v7.0 (chr-ID chr4 ; pos 3150578 to 3151220 reverse strand)
gatgtatccttccttcaatatgagcattgcgttttaacttactatgtgtttggttgctgagaaaaccgatgaaaagggaacgaaaattgttttatgttttttgtgatgcctctgataaaacatgaaaggtttatcaactttatctaacctaagccaaaatgggtttggtaagattatttggagggaggtttccattttttgtgtgtatatataatgaaaactctatgattaaacaatttgaaattctttttcttttcaaccaaactgtattctgcttttggatttttgggtatttagttaattatctttgtgtaaagcgtttagcagtgggagagaaggatgttctgaaaaatccccgtttagcgtaatggtttgattgatcctaatcaccggaggttttagtttttcaaggttctactttttttttttttaatttcgtttcctgcaaaatatcagaagccaaactgagctttactggacactcaatcaactatcttttccatctccctgtacacccaagctctctattggttttgaactgtgtatttgattatatttctggtatgtttagtttctcttgtcctttttgtccttgactgtgaatacagtggttagtttggctttgatttgttcattttctcgg

SEQ ID NO: 100113 - DNA, 540 bp, Vitis vinifera
  Intron number 2 from transcript GSVIVT01033231001 (locus G SVIVG01033231001) derived from phytozome v7.0 (chr-ID chr8 ; pos 22371528 to 22372067 reverse strand)
agagcagaggtagccaaggtaggcactataatttcctacctagtttgttttgctttgttttatttttatttttataaataattcgataggtattatgtagtgtatccaagggtttgtttagttgttgagaaacgaagtctcaagctcctttcactgattgagacccaagagaaaaaaaagaaaaaaaaaagaaccaacatgcaactctgtctaacgcaactatttggtttattgaactaagttttcggttgtctggaaactgaaatgacaaactttaggctcgaaatctcattttcaaatttcgaatgggatgtaggttttcttgtttggatttgagtaaagtcacaaatagccactttgatccgcagtttgcaaacgtggttatattttactgattacctctctttttttctatgtatatttaatttaatttaattcagtgttggattttttgtggatcagaagatttgggctagagaggtgtgaacttatgtatgctcatatttgtgtccttttggtttatcattaataggtggaaca

SEQ ID NO: 100114 - DNA, 320 bp, Vitis vinifera
  Intron number 1 from transcript GSVIVT01033231001 (locus G SVIVG01033231001) derived from phytozome v7.0 (chr-ID chr8 ; pos 22372132 to 22372451 reverse strand)
acggcttctccttctcgaatctcttcaatcttgaggtttgtcaaacgggtttttttcttttttgcaaattcaaatgggttccttttggtttcttgatttgctgagtcctcttgtttttactagatcacttaggtttgtgaaaaactagggtttttattcttctttttgttctttacgatgaatcataagggctgggtatcttagaatttgttcgaaatgttacttttttttttttttagtttatacttattattattattttttaatattttgggtgctatcgtggttttttattttcttgggttttattgtagtctttg

SEQ ID NO: 100115 - DNA, 404 bp, Vitis vinifera
  Intron number 1 from transcript GSVIVT01035381001 (locus G SVIVG01035381001) derived from phytozome v7.0 (chr-ID chr4 ; pos 905643 to 906046)
gggggatttgagaggacctggttttgggctggcaggtaagccggagtgtttggtttcctggatttcattttctaatggtgtgtgctgctttttgagttcattactctggatggggttgtgttttttggagttcttttctggtttgattttgaatttgatgactctgaattgacttctggggtattgatttggagggtgttttttttggggtgaagagaaactagttttttctgttttttgaaaaacgggttctgtcttggaggaaatcctttctagtttgttctgtatttcctttaattttcgtctgtttatccttcatatgggtctctgaagctcacaaattttagttctttgattttttgtaatcaggtgactcacacaaactgaaatttggaccgctattc

SEQ ID NO: 100116 - DNA, 684 bp, Vitis vinifera
  Intron number 2 from transcript GSVIVT01031116001 (locus G SVIVG01031116001) derived from phytozome v7.0 (chr-ID chr1 4; pos 2044943 to 2045626 reverse strand)
ggttggaatcccattgaacaaagcaagtggacgaggtaacttttctatttcaaaattttgatttgcatgttcccagttgccgaaatatatagagatgctcgttaaaacacattgacaagcttgggtcgattcttaactgtgtgcatccactacaagtgactgggctggctgtgtattcaatacgtgtaaacttgaatctgatttcttagtcaatttgggctcaatagacagttacaagcagagtaatgcttaactgttacaaaatataaaatttttcttattgaaatttggatgttagttatttattttcttctgaaaattgaatttaagcctgacaataatacagaatcggttggcaagtcaaaactagccaagctttgaacatttttactttcctgtagaatgtatgctttcatcattgagttgttgtcattagaatgaattaatattttctgtttttatttatttttctatagtattttattccggatgaattatttgctctttccttaactcgctgcacttttggcatctttgggtgtgatatttcacacaaagagttgcatttataggttgcgccaggttgcttattaacgattcacatatttgacttctatatcataacacatctgttgataccttcttgagtttttcttaaaggctttccctgtttatacagctggc

SEQ ID NO: 100117 - DNA, 767 bp, Vitis vinifera
  Intron number 2 from transcript GSVIVT01035936001 (locus G SVIVG01035936001) derived from phytozome v7.0 (chr-ID chr4 ; pos 6129821 to 6130587)
tctaggtaccaacatattggaaggatcaattcaaggtacaatggatttctttcttcctcttttattttatttgattttcccttcttcctttttgaatatccttctctggatgatatattttttggtccatagttactgtaaagtttcttcttaggtggacttcttaagcttagtccccatcaatttaaggaaacctgtttcaattcttgcattttaaagcatagaagccatgtttggtatttggcaaatttcatggaaagaaaatagaaagaaaaaatagaaggaaagaaaagataaaataaaattataaaatttttctgttgtttgattgtccatgaaagagttggaggaaagaagacttaattattgagtaatgcattttcccaaactttctccaactttttctcaccttttccatattatccaaacagaagaaaaatattatgtcgaacatttcttttttcctttccttgatactttctaggaaccagatatagccttagaaagtaccctagattcctcaaatgtacctataactctgctgaattgtattttccaatgttttcatatcttctggtgctgtctaccatttcaattttgattgtcaataggtttgtattcaagtttttccaatcatttttcatcttccatgtggcatcctattgatctgtattgcaaacactggtaagtatgttgccttttctgtatgatttcttatattggcttttgcagagttggctgctttgcacaacttggaggagttggat

SEQ ID NO: 100118 - DNA, 654 bp, Vitis vinifera
  Intron number 1 from transcript GSVIVT01034111001 (locus G SVIVG01034111001) derived from phytozome v7.0 (chr-ID chr8 ; pos 15082244 to 15082897)
tggattcgctgtggcaatctcaggtgactcttggatctattctttctctatagcttcctccgtttttcagaagcctttatgctgtaggctccgtttggttgccgagaaatgcaggaaaagaaaagaaaagaaatcaaaactttgagattgagtaagttttctcgttactcatgtctggaaaagaagcaaaagaaggaaaaatggaatatagattacagagtataaatttcttggcaaccaaacattgatttaagtccatgaatattttgtcttcaatttgccgttcctctgttagaatttctgttgaaattcaataaatgacacaggtcaggggcgtttaacaagtgcttcggttcatgttctcttactctcgcctataatagcttttgacttcatttgaatgactttcttcaataatttcttgtgtgacatatttgattatgtttcttctccatgtcgataagtatgattcccccctagaaatggagaatgatgcattaaactattctaaaattcagaatgcataaatcattgttcgctcactgtattaattccaccttttgttcccttaaaaaaacttgtatacttgtatctctgctcttcctttttatgtaatcagagtctggaaagctcataacgtggggttccgaggat

SEQ ID NO: 100119 - DNA, 1019 bp, Vitis vinifera
  Intron number 4 from transcript GSVIVT01037427001 (locus G SVIVG01037427001) derived from phytozome v7.0 (chr-ID chr6 ; pos 13945508 to 13946526)
agtttgttactgggggagagctctttgacaaaattgtacgtcaggaattctatgctcatttatcttctcattattgttataattttaggggctttgagatgcaaattacaaaaaaaaaaaaaaatatttatataagaaggaatcctcaactgcataatcatattccatgagtcagttttacctagggtcacgtcctccactaaattaaagattaccatggtttttctcacagcttagacctaagttatatacttccatctcttgcaacttgtaagcaccatgtaagttgttatattgcttatcaattccaacgcttagatgtcttaattcatgaattttgtgctatttgaatgccattggtgtcacttctagttccaaggtagggtatattgggcccttaggcccctaaaagttctgaaaatttctttattaggatttataatttgcagttgaactctagaattgtggttctctccctccctctataatgggatattcatacaagaacaatgttttcagcatgacccaagaaaatatgtgagtcgcaattcaaaagccctaaacatagtcactttacccttcggttttccctcagttttacggcatactatacatgattgactttgtagattggttatgattgtattgaaagagttgttttttgtgatctatcttttgtgacattgccatttggtgcctcatatatatatcttgtttagtttggtcctctgtttcttttgccttatagataaaatttgatcgcctatcaatatatatatatatttattattatacaagagataaacaaaaagaaggggaagaaaaaaaagagaccacccgaaaggagaaattcctgggtttgccattgaatggacttctatatgtatagatatactgagtgtttagacagtctgtaactagggatgaattttaatgatcgaaaattttaatttacatagtctgataattcaaaaagctcataaatttgtgtgaatggccttttgttgtgaaggtaaacc

SEQ ID NO: 100120 - DNA, 601 bp, Vitis vinifera
  Intron number 2 from transcript GSVIVT01037249001 (locus G SVIVG01037249001) derived from phytozome v7.0 (chr-ID chr6 ; pos 16913084 to 16913684)
atcacaagtaagtgttttctattaggtttgtttgaatttttgtgggttttggttattttgttttttcttgtttactttaggtttgggacccctatgatcatgtcaacaactttaactgtttgggcattttaatttggtttcataatgtgctatttggatttattttgaattgtagttgtcgatttgattatgatctttgatgctttggatagttgctaaaacatcaggaattaattcttcaaaatggaaattaatctctctttggttttcatttttactttttgctgtcacacttctgtatttggttctgggaaagattgaagggggaaggaaaatgcttaggatgacctttttcttaagaggtttcctttccctttgtatctgcctttctattggtgaaataaaccgaccaaaagaaaatggttagaatgtagttttatgggttattttgtagccactgttagcaactcttaaccagtgtgaggacacatgattcaccatggactttcgttcttcactgactgtttgcagaatatctcttgttgtatgtatgatttctgatgtagtgattgtgggagaggttgctaattttgtggcatat

SEQ ID NO: 100121 - DNA, 517 bp, Vitis vinifera
  Intron number 2 from transcript GSVIVT01033728001 (locus G SVIVG01033728001) derived from phytozome v7.0 (chr-ID chr8 ; pos 18295170 to 18295686)
ggttgtgttcttgtagcaggttattcataactttaatttgttctctctctctagatttctctctgtgtttttttctttcctgaatttcaatttaatataagtaacagaaaataaccttagccttggatagtgtaatttgatccattggttcctgcaaaactatgcactccattaatttgatatttggttgctgagaaacctgaggaaaacaaaagaaattaacttttgatgtgtggaatttttaatttctgtttagctcgtctctgggaagattttgttctcactggtgtcgggtaatggaaactggaagattcaaaatcatttccttttcccgtgatctctgggagtctcatagtgggtcattgtaagatgaaaccatgactctgtatctaatagtggaggcagttacttagttaattgtgtgtttcatatacgacactttttcttttaatttgatctacatactgtttgaactcatggctcattaacttttattatggttcagctgctggaattt

SEQ ID NO: 100122 - DNA, 858 bp, Vitis vinifera
  Intron number 1 from transcript GSVIVT01037400001 (locus G SVIVG01037400001) derived from phytozome v7.0 (chr-ID chr6 ; pos 14369841 to 14370698)
agccgcgggaacttttcagtttaacaacactccaggtttgatcctctctttcccctcctctcaggctggtttcaaactgttttccctttctcctccaacaatttagttcttttcggcttttcccttcttatccgtaaccatattttctttttggaaataaagatttgcctggaaaatttctccatttttttggttgaattgggctcccggacctgatatctaaaggcgggcgtcgaaattcctttgtaattaatttcagcactgaggaagatggcatctacttcgattggtcgaaaattcgttagaaaatcctgaatttgaagctgtgatttgtggagctgttatctgtattttcaattcatcaatcaactgctaattccaataacctaatttctcatgttcccttagatacttgctttaacatcttttctgctgatgaaattgcaggaaatgtagtctttgaaaactagatcatctgggatatttaagttgaaaaagaaaaaaaaaaatctgtaaaatctgaagttttccttaatcaccatcagataaggtcttgcaattgattcatggataggccactacgagttaaatttttgacattggatattttgcttgaaaacgcttattttggtggtcctcaattcaggttgagaaattcaaatccagatattttgttggcaactttgcagactgtgaaagggtagattgtttgggaataaggttgaaactgtctctcccaattttgaagggccaaatgatctttgattgtgatatgcagacggttttgttgtttgtccaataggccatatgatatttgacattttctgtttcttgtttcatcaacagcaacatctagcc

SEQ ID NO: 100123 - DNA, 602 bp, Vitis vinifera
  Intron number 1 from transcript GSVIVT01033574001 (locus G SVIVG01033574001) derived from phytozome v7.0 (chr-ID chr8 ; pos 19636617 to 19637218)
ccattagggaacaacaaattggcggtattgttcaggtttgttttgttggttcgtgtgcagtttgttttgattaattacatgacagatttgcaaaaatttcatttaaacctagagagtcaaaaccataaacttatggaaataggaagtcaaaccacgtgaattgagttcttcaaaattttctaatataaatggataacagttgttaacctttttgtgtgggggaaaagtagcgttactcataagtcatatcccagtggttcagttttatggatagatgttccagatgataaagccctttatgggcattaatgacattagtggagttggaggctagatgggctgactgctgagtttcttatataaatgtaatagaaaattttccctgtataagtattggttttccgtcatattataaagaatggagtctgagaacatttgaatgatacaggcggatttcagttgtgctggaaatgacaataaatggtaaaaaaaagaagctagagtactagagtatcatcttgtataaaggtatgccttttttgactttgtaccttagatcttggctttgatttcttcatgcatcggtttttaggttggtgcac

SEQ ID NO: 100124 - DNA, 931 bp, Vitis vinifera
  Intron number 1 from transcript GSVIVT01031229001 (locus G SVIVG01031229001) derived from phytozome v7.0 (chr-ID chr1 4; pos 1034147 to 1035077)
ttctgcgaaagtcttctttgaggagcgattcggtatgtactctccctagagccttttttttgcgttgaatttgggatgagtttagtgggatttgtgatcggtcggtgttttgtctgttttcgtttctcgatctaatggttctggatcagtgtgtgagtgttagtgtaggatttcgaattttgtaatggaaatgctttgatacggaaatgtttactgtatttgatgtttagattgtgggagtgctagtggttttggttgatttctcgatctggttgcgggaatttgtggcgttttgcatgtgttttggagttcaaaatcttgatgtagtgcgctttggtcctgagaattttaacgtatttgatttctttttgagtttgtgtatcgtgttcttctggtcatggaaatgttggtggtcttggacaaagctcttgtttggttgccgggaaagtggagcaaagaaaagagcagtataaatctggatctgtgagaacataactgagcggagatttagtttagtcggatctacagtaacgagaagttcaagattcagacttttatcgttttctcttttcctgcattttctcagctacgtaatgatagaggggtgattttgatcctatggataaatatttgaactttatttcttactaccattatgtaaatgtagctgttgcccatatgcgaatttagagaattcttttgatctatgttgactgtgcgtcgattgatgaaaacagttattggatgcatgatgaagatgtatatataccatgtacatgttgtttatatattttctggttaatctcttagtctgcagtactgtttactattctgataatccatgcttgtttcaattaataaatcagtatttgctttcttatgactttcctgcattgggtctaatatgtaattcatttttgaatactttaag

SEQ ID NO: 100125 - DNA, 826 bp, Vitis vinifera
  Intron number 1 from transcript GSVIVT01036720001 (locus G SVIVG01036720001) derived from phytozome v7.0 (chr-ID chr1 9; pos 23341466 to 23342291)
gcaagactattcaggtttgacagaacttttacttctctttttatttcctaacacaacaaacactgcctccaaatttctgtatgtgattgcatgtagaacatgccggaggtcggtgccaagtatcggtgttgtaactataatgagcaattcagtaagtactaaagtaatgactgagtacatgaccttagattgcgcttgtaaaagaaccaatttgtgtggttgattcaaccaactgggatttaaatcttttgctgaattgagctgattaaacatataggaaattgttttgatttgtttttttgttcgctatttatttattttgttgattacctaattctatccatgaacctttggtctatttcattcaaaaaccattgttccgcagaaatgatggcgcagaaggggtttctctgatatcacattgttccttaggcctctgttttaaaggatttttaggatatccttcatgatcttttacttcatgattgggtctgctatggttaatggatgtttgagtgtttgcctaggttgaggtttttgctaacctcttctgggacattggctatgaacctctgtctgtgtcctccctctgagtcttgttcctttcttcgatattttttatttatctcaaagctaacagaaaaattcaaaggtttgccctttttctcagagagacttgacattgattcccttctgtctgtttcttttccatcaattcattattcctttattgatttctaccatgtggcgatatgcatgtcgaacactaaaggtgtttcatttaatggtaggtccacaaccctgctactggtgaagttatagcaga

SEQ ID NO: 100126 - DNA, 685 bp, Vitis vinifera
  Intron number 1 from transcript GSVIVT01035675001 (locus G SVIVG01035675001) derived from phytozome v7.0 (chr-ID chr4 ; pos 3211199 to 3211883 reverse strand)
tctcaacgatctccatcaccttctcaaccttctgggtaagtcttccatttcgctctaaccctaattcagatcttcctccgtttggttgctcagaaatttcttcaaaattggatcttgttgttttggtggttcaataaagtgcaaaaaattaagcctcgaacaggattgatggttggatccgatcatccgaagcattgaaaagtgtatctgcgagaattttagtttatattttgatttcgtatgttgtcatcaaaattttattcaatttaactcttacagaaaccctcagtcaatgtctgcttttggccattgaaacaactgtaggaaactaaagaaatttggatgtttgaatcttgtgatgctctgtttcattattaggaaattagaaggaacagacttggaactttgaggctcagaaataaaattatgctcttaactgagcttaagatgattggtttccttagttgagtcgcgtgcttattattttctatttttttttttttttagtaatttcctctcaattttagcaacttccaaaccgaatcagagtgaaagttacattttcctgggaatgaaaaagaatacgatgtgatttgtgaatgattcaaattcacttctatctcactctctttgaaccttaatcctaccagaaaaggtgaagtctcagatctaaagttgcagctcc

SEQ ID NO: 100127 - DNA, 551 bp, Vitis vinifera
  Intron number 1 from transcript GSVIVT01037114001 (locus G SVIVG01037114001) derived from phytozome v7.0 (chr-ID chr1 8; pos 28991710 to 28992260)
gtgggaacattttgtttgattgtgggaaaactgaagtaaatgttgaaaagggtaccattggaaatatatttctttcatgattgaatatctactgctcccaaatctgaaatgaaatgaaaagtcattcctatcttttgaaagccattctggtcaccagaaagggcctaaactagtaatttgttgatactcctttaaccaatatgtaaagccatttgtaatttgttattcctttaaccaatatgtattagaactcaaagccatttgtaaagccttttaacttgtctcttcttctgtttgttcttctttttcttcttcctttttttttaaggacggaaaacttctattaggaccaaactactcgtcatattgtgcctataactgatccaccttgaaagttcatgatactgtgttttttgagaataaaaccatagatagcacgcataaaacatcatctaaagaactgtgccattcagatctcattctgatttaagtgccaatgggttagtcttctatttcactttaaaggtttattattgaagtccattctttct

SEQ ID NO: 100128 - DNA, 849 bp, Vitis vinifera
  Intron number 2 from transcript GSVIVT01037114001 (locus G SVIVG01037114001) derived from phytozome v7.0 (chr-ID chr1 8; pos 28992390 to 28993238)
ctacctatattttgattgtcaagcaaactggcgtaaaagaattctcattgaactatgtgtcatcaaactttatggctctcattgttacatacttgaaccttaggactggaattattgcaaagctggttttacaatttataaatcttcaatgacttcttgattttgtgttgaaatagggtgagtttcctttttccctctagatataggcctaaatgcaccttggaataggataaatttccaacgcaaatgaattagtaagttatgggggaaaatcaattcagatagtttactaaatcaaactgttttttcatacacttttagaaacagggaccggtagatggtgggtcccaatcattctcttttttctttttcctttttttttttttttcattctttctttttaagagattttttcaatgtttggattgcatgattttcgcaataaattttgtcatagcatagttttactggtaattggacttttttttttttgtattttttttttcatttgacatggcaatcattatctgtaatattgaaaatcagatggttattattgaaactgaaactgattttggtacacataatttactaactaggagttatcagatgtgtcccataatttattttgttctctgcttctctatcttattgtctgagttaaacttttgaactcaactttaggggcttggcactcctgtttggtttttgatgatatatagggctttgtaaaaattctctttgtctgaggtgatgaactaaatgactaaaatacttagttgctgagtatcaataatccactgattgcttgcaggagaaagggatcgttttagccatttcacaagttgc

SEQ ID NO: 100129 - DNA, 387 bp, Vitis vinifera
  Intron number 1 from transcript GSVIVT01030715001 (locus G SVIVG01030715001) derived from phytozome v7.0 (chr-ID chr1 4; pos 14450439 to 14450825)
cattcaattttgtttgccactttgttaatttatttgactgccataatttaaatttggagacaaaattgatttccaaaagatttccttaggcaatccgtttcttctataaattcagctcatataattgttttttcttcaagcaactagttttatgttccaaatgtaattaaaatttgatccaagaatcataattatttaacacaaaaaataaaaaataaaaagtcaaagtccatgaagtattctcaaccacttaaaaaatgaaatttaatcagatttaagtgcatacaacaaatatggaaggaaaaaatcaagattagtaataaggaaaaaaaaaatacagttaaacgtacatgttatgatagatgttgaaacaaacattactgaagc

SEQ ID NO: 100130 - DNA, 541 bp, Vitis vinifera
  Intron number 1 from transcript GSVIVT01031289001 (locus G SVIVG01031289001) derived from phytozome v7.0 (chr-ID chr1 4; pos 593283 to 593823)
attccttttgcttattttcttgagaggtgatggacagaaattttgttacatttgattgattccatgcatggctttggctttaatgtctttctttctttacaggctttagtttctgaagttgagtccatcttttggtttcttgagtagttttttctttagccttcgtttggttgatgagaaaacacaggaacatgtttccttttactctgtttttcatcttattgatttccttgatgtctccttaaagaagcttcttcatttctgaacttccatgaatcaaaaactctctgaaaatctccaaactgatcatatcctgacggggttagagaaaaactcttgaattttcttttatcatcttccttctttctcttgatcaaaaagaaaaaatgatttagcttccatggcaatgcaatattattctttacagattattctatgcatatatatatacctgttcaaatagttcagaagcatgtaggctttaatctatcccattttttttccaggaaaacaagacccaagattacaagaattgttctat

SEQ ID NO: 100131 - DNA, 841 bp, Vitis vinifera
  Intron number 1 from transcript GSVIVT01037655001 (locus G SVIVG01037655001) derived from phytozome v7.0 (chr-ID chr1 9; pos 6592475 to 6593315 reverse strand)
tcgtctccaaatctgcctactacgatctccaattggtacctcagaaacagaaaaaaaaaaaactcttctttcatttttactctctgtttggttgctgagaaaatggagaaaagatagggaaatgcaagtgaagatttgaatagtttttaaaatctactggatttgaaaatgcattgaaatgttaggttggaaacttctattttttctctcgaggtttccggggatcaaaagagtgttgatgtgattcataaattatgttcgtagactggtttggattgctacaattgagcgttgtttacctcgtattggttttttatcttgttcaattttcctctggttgctgagtaattataggaaaatgatatgatttgagtaattgatttaaaactaaaataaaagttcaaaattttggttttattttttcaattttcttctagtttttgggtagccacacataggttgatgggagaaattggaagtactacaacggagcattatctgcctcagattgatctgttatttcactctctttctgtttggttgttgggaaaaataagaagaagaaatttgaaatttgaattgtaggtttttagttgtttggggcctgagaaaccaaaagctccactcagctggtattgtagagttatttggcttacatgaggctaggtttgcatggtctggacgccaaaatgaaaaaaaatataaatttgttttcctcagtttctgtgctaccagagaagggccagtctcagttcataatttacattattccatcttattaaaacgacaatgattagatattatttctctttgtggattgatattgcaggcaagagaggag

SEQ ID NO: 100132 - DNA, 560 bp, Vitis vinifera
  Intron number 1 from transcript GSVIVT01034753001 (locus G SVIVG01034753001) derived from phytozome v7.0 (chr-ID chr1 3; pos 9014745 to 9015304)
atcgcatcgattgtctgagacacctttatattaaggtgaccgctttttttgttttgttgcatgtaaaatttcttttctgaattggatgataaacctgaagggatgtgtgtgtgttttttttattgaatcaagatattgtttggttgccggaaaagttgagaggaaggaagggaaaatgagttggtggctctgtgttttttgttgcctggtttcctaggggggaaaaaaacccgagttattttaagttatgtttctttcggtaaatgatcacggggcttcgattttctttttcttttcattttcattctctctggagcaaataggggcatatggaatttgagaagagcttgttgaaattgtcaacttagctagctgatatattttctttccaatcaaatagggtgtgatgaaattttggatttttattttttacattttcaatggagggatatgatcttatgaatccaatttctttgtcttataaatttgatgtcttgatgtcctgtctgactcaatgtgtttcaggttaaatttgaggtcttggattttcttcatccata

SEQ ID NO: 100133 - DNA, 943 bp, Vitis vinifera
  Intron number 3 from transcript GSVIVT01034753001 (locus G SVIVG01034753001) derived from phytozome v7.0 (chr-ID chr1 3; pos 9016021 to 9016963)
ttcgaaacttcatccttcacacacttcagttgcaggtaatttaacagttctgattatgttgaccatttaagtttagcaaccaattgtgtgcagaatttcttgtcatagttaatttttttattccatttatttatttttgtgtttatataactgagtttaaatttgccattgtattgttttaaatttgttattccttatttctttattttggaagtttcttagcactgttaagaggaatattaatacatgattacttctatttttccaccagtttgttaattttttatgattaagattcacatgagtgatgaattttgactaagaaaactagcttctaaattcaaagctgacccccctccctagtaaaaattagatgatagtttatattgtacttgtttgtaacttctgttaacataaactcatagtattgatggtagttcatcctgttgaatgaatgttaatgggaaatgcattcagtatgtaaacaaaacttctgcatagtcttacttgttcagttaaattgcgtggtttcatattttatccactccttcttaaaacaaaaaaggttacatatatgccatacccaaattgcgtggttttgtattgtgtttgagtgatcacagctcttcgtaagaaattgtatatgtgaacaaatgcattagatgtccccttgttcaaaaattttaactttggaacctgtttgattgaagatgtctgtatatggtttcatgtgcaatcaaaatatgaaatagaacacctgttctcacatgcatgcgttgatggatatgtaatttgtgtccatttgacaacattgcatgtgtaactgaagatgattaattattaccctaactatttatcatttactttacttccttttaaacatggagtttatttgcccatttgggcacgtttgtggctcatcctgcagagctgggagaagaca

SEQ ID NO: 100134 - DNA, 950 bp, Vitis vinifera
  Intron number 2 from transcript GSVIVT01037691001 (locus G SVIVG01037691001) derived from phytozome v7.0 (chr-ID chr1 9; pos 6924791 to 6925740 reverse strand)
tcaattcttttatattcatatatgttccgagatcatgttgcagtcttgagcatttttcattcttgaaaagatattatgctgcgatggaagtatttttcgcggattttaattttgttcattggattataattagaattcgcgtcctaatgggctcaccatgaatactattctgcccaatcaatgagaaattgggaaatgttgtagctttgtggaattttgaaattatcttatcaaaagaagattttgtttttctgtaattctgaaatgacttgaatgcgggaaagcttcttctagctttttcttgatgtatggccatgatctcttgctgtattccgtttagtgatctactgaaactagaatagaggcagttatgacttttaaatatggggtgtttgaagtgtatgtcatacacatatgcatacctttatagccacatccattctttcttctcagttattcatgtttgtttcaaacataaaattttaatggcttaatccttttttttttttttttggttttaatgtgcttgaaaatattgccaatcagaaaactcatttcgtaaggtaggaaaatagatgtggctatcaggtctctgcttgcaacattcaataatggcaaagtaatgcagttgtggtggacttatatttctcccattatattatattaaagtgtttgtggcttcattgaaattctacttttattttctgttacacttgtaactgggggacaatgttgctcttgcagacatctgatgtaatagtcaaaagtggcaaaggtatggctctttttttttttcattcattttttttaatcatattcatttattggcaagcaatattggcccatgaggtctgcttgccacttgccaagttgtcttttaggaaaactgtaatgtctcttatcatagttacatggtgacaaaaattgcagcatatcagaaatcatcaagt

SEQ ID NO: 100135 - DNA, 977 bp, Vitis vinifera
  Intron number 1 from transcript GSVIVT01033313001 (locus G SVIVG01033313001) derived from phytozome v7.0 (chr-ID chr8 ; pos 21597179 to 21598155)
attctagggtttctctcactcttcttcctctctgagtaagtgttctgcgcttctccttcggaaaattgaggtgtttctgtgaattcacgttttttttttttgtggtttaattttggaattttttttttttttgatgctgtgatttgtgtttctggtgttgatttcgagttttctagattagtgattaggacttgtgatttgttgagatttcatttgcttttggtttggatggcgagaaagcagagggagaggagtattttgagttggttagtggactggagcgttttgttttcacgggaaaagtttagagattcggaatttgagtttgtttctctattttccggcattttctcggcaaccaaacactggattggtttgatttttgttcatgtcttttttcttcttttttttttgagtgaatctttctacggtctgcgtgatgatgacatcattgtttttggatttatgtgctgaatttcatttttggtcacaattatacgaggtattggagggcatgaatattgtaggtgtatctttttagtagttgcgctgctttgatttctgtgtttcttttttctttttctttttctttttacttggaattacttttgtgtatcagtgatattgctaatatctagaattcttcaattctactggaagagcaacaatatgcatcaagatattgctaatattattccattaatcttaaaaatttgttgccatatccatcataatgggaaacaattcaaggatggcattgtggatttctgggaaggattagcatccctcttcatatgattgaatagacatgtctgtcagttgctttgcttagcatgggtggggataatttcgttttatctatatagaatgcttgtattttttttgagcgattctttgttcaccatatgaattgactaggaatagctttgttgatatatgtaggcagtggctaggggattatagatttcagagtaagg

SEQ ID NO: 100136 - DNA, 614 bp, Vitis vinifera
  Intron number 1 from transcript GSVIVT01035965001 (locus G SVIVG01035965001) derived from phytozome v7.0 (chr-ID chr4 ; pos 6570022 to 6570635)
gcgttactcactctgagttccccaccattcaaaatgttgggtttcaggttctactttttttttttttttccttatttctcaaatcatttccgttccgaatggattcttgtgttgctgtcttgttttcattctctgttttgtgggttttatcgcattttaaatctctattttaacttttgatggttgatgattgtcttctatttgaatttatggttctggagggtagaaaaattattgcagtggatatggtgcctgtattgggttgtggtattacaggtttctagaaattgggtctccatatgggtgattagaacgctctcttcggatttgttttgtgggtttgagttctttgtttgtgttttgggtggtcagtaagtgattcagtttagatcttaagtggggatttctaaagttgagggagtgagtggaaggtttagaattttatgttggtttaatgtatttgattgaatttttgaatgatttcttaatttaatccatgtatagtttcatgcaattttctttaatttcttgaatatgttgagaagtcgtttctgctttcaattttgtgacttctgttctacaaccattattgttgtctgtagggacaatttggg

SEQ ID NO: 100137 - DNA, 484 bp, Vitis vinifera
  Intron number 2 from transcript GSVIVT01036659001 (locus G SVIVG01036659001) derived from phytozome v7.0 (chr-ID chr1 3; pos 19941132 to 19941615 reverse strand)
caggtgaaatccaaaatttccaaaattcaagctacatatttgcatgtcagtatgttcttgacctcaacaattcatgattatctgtttttcaaagttaatgcctcattttttaaatttagtgcttcattttcagaatttcttctctcaggtaagaagaaaagaacgatgaaggtggtcaatgcttattaggactttcttttctgctattgtaaaaatgatcaataagattgaagattggcaagcatgaatatgttactttgagttatcaacatgtttttttattttttttattttgaaatgtttgatgttttcatcatgtttttaatccattttcatttcttcttttctcagaaaaaataaataaataaataaaagaatcctcatttctgctgccaaatagacccttatacaagtttagcattctgcatcactcatccaagatttcactcttctttttgtgtttgatatcagctggaaaataaaa

SEQ ID NO: 100138 - DNA, 700 bp, Vitis vinifera
  Intron number 1 from transcript GSVIVT01035661001 (locus G SVIVG01035661001) derived from phytozome v7.0 (chr-ID chr4 ; pos 3098391 to 3099090)
cttatcgtcactcctcttcctcgaccgtagatttctttctctccttgccccccccaccctagttcttgttgtttagcttttaccattcctctgtctgggtttcttcccggagaatctttttcaatttttattttttatttttagaatttctgagttcttccccttactcaaaggtgggttgctttctttctttttatttatttatttatttacttcctttttttcctggtcaagtggttctgtaccaaaaataacattttgttcatgaatgacttggtggttcaccacttccattttatttcccaagaaagcttccactaagataatgaaaagctatggctgctctccccccccctctttttttttggggcaaagaaaggagaaaataacagataccctttattaatggggttgatttctacagctagaaatttactgtactgaaatagatttagagcaccataatgaacctcacatggatcttcaattcatggatgcaagaccatttacagacaaaaaaataatggaaaagattctatctgtatgtgagaaagaaattcaaaactagaaaggtatgacgggcaaatattgaatcagtttcagtgacatttaagcaagaacattgacatttaacttgaatttcattgaaattctgagacattcacaccatatagcttattttggacaggttcatctacat

SEQ ID NO: 100139 - DNA, 850 bp, Vitis vinifera
  Intron number 2 from transcript GSVIVT01033697001 (locus G SVIVG01033697001) derived from phytozome v7.0 (chr-ID chr8 ; pos 18509508 to 18510357 reverse strand)
aaaatatcatcctcgcatactcattcgttgctcatgtaacttcaattctctggccttatccttctcttttctcatctttttattctattaccaaccatgtctggcttatgaaaaaagaaaaattcaaaattttggttcgagatttctagtctactatcttatcttgaggaatttctcatcatctctatttatttaaaaatgttatttttttttatttattttgtttagctcctccgatttccatctcattggaaccttctacaaattttaggaatttaaagcacaaaccctaagaatattccaaaaagatagttgagtgaaaaaattgaagattttcctacattttctcatattttcttagagttcctcttcaatttgtactcgagtggtttttagaattgaacaggagtgttttcggacagtgcttcaaatgaagggcatttaactagattcttttgaaaataggtcttcctgtaattattagggttcgcatcctctgcaaattactcttggaaatgtggattgtacatggatgttagacacgtgtgtccgactcccatggccttaatggttcaagtcagtgcattccatgtcaagaggtggacttatctcttttatctttatagatccacacatccactcggttccggaaatatctaagcggcgaaaatgcttgaaaatgacttctaatatgtttaatcgttttttacaaactctgtttttttgtttcctcattctctttcataaacaaatatctgacttatttttttttaatttgtttttcttgtgcctggatggtcggaatccccacttagctatcattttttgtattggagacttggactgtggt

SEQ ID NO: 100140 - DNA, 672 bp, Vitis vinifera
  Intron number 1 from transcript GSVIVT01031808001 (locus G SVIVG01031808001) derived from phytozome v7.0 (chr-ID chr3 ; pos 4600333 to 4601004 reverse strand)
gttcaggaaggttggtagttatgacaagattcggtaaagttctgtttggttagagagaaaatgcaggagaagaaaagaaaagacacgtaatgagtattttgtcttaattttatatatatatttttttacatttagctcactggaaacagagtaccttgttctgctacttggctgagttgagttgtgttggagttttccatttgttggaagtaaaatagataaataagaacttaaacttttattagtactttcctgagttttctccgcaaccaaacgagaggaataagaaaggggacttttttttttttttttttaagctatgctaaactgaaaatttatctttgaagattcaaaatggtgggaaataatgttaccggtttttcattgagttgttgagtgaaactaagattccaaatggaaggaagctgggtgttattgagatggagttttccatttctttggaagtaaaatagctgaaagcatcagacttaaaattttattttcattgtcctgagttttattagcaatcaaatcaagaggaacaagaagggtgattgttttcaagccatacctaactgaaagttggtaacttttaagatttgaattggtgggaaatgttatttacatgcatgtttctttttacataattgcagagtgaaacgaagagttcaa

SEQ ID NO: 100141 - DNA, 917 bp, Vitis vinifera
  Intron number 1 from transcript GSVIVT01035079001 (locus G SVIVG01035079001) derived from phytozome v7.0 (chr-ID chr5 ; pos 1337496 to 1338412 reverse strand)
tctttgcttctcgccgctgccggtcgccaaaacaggtaaaacccctctctcgttctctctttttctttgcttctcgccgccgccggtcgccaaaacaggtaagcgtgcatcatctcctcaaaacaagtttatcctctgtttggttgctgaaaaacggaggaaaattagtatgatgatgcacgacggtcccttattggaactgctatataagattttctaagagaaccggaaattcagcctgatccggatcggtaatttctcaggatttagttctgttgatttttcgtttgctttttatggagaacaactgaaaatacctggtttttggttttagtttctttttattttcctctagtttgtccgtagacaaaccgggaagctgagaaaatgcaggaaagtaaaagagataaaatcttgaattttcgttactcaggctgagaaagctaaaactgctgtttagccaagtttaactgaattgtttggcttgattcagtaacagatagcatgatattgcatttttttcctccttctcttccattttctccgctaccaaacgaaggttattagagcttgagtgctgaatcagtttagttaatgaaatgatttactggattggcaacatattggcgagctttaaaatttttaatgctgtgactttcttatacattttttttatctcttcttcatcatatgtttcataggattgccacctttttttggcacttcctactgtgattttgagctatattattttcgtcatggtaagttgttttgtttctttatcaataggcagttacagtcaatctcccttaataacgtcttggaacacctctcgtatatctacaatttcatttctaatttgtaaattatgaattgtaaggactttgacatttaatttattcttttgatacaggacc

SEQ ID NO: 100142 - DNA, 914 bp, Vitis vinifera
  Intron number 1 from transcript GSVIVT01031632001 (locus G SVIVG01031632001) derived from phytozome v7.0 (chr-ID chr5 ; pos 19261107 to 19262020 reverse strand)
ctcctccccctttcgacgccattcgccaagctcgggtgagttttgagattttggcctaatcggcttattgtataagtttttaatttaattggttgaagtgagagatgaagcatggtgtcaatgttttagcctaagattaatttgatctacaccgttgtttcattcaccaactgcttagcttttatgttcattggtagtttaacattttttttttctttttttgtttggatagtaagaaaattgaggaaaggagaaggaaaataatgagtgctagtgtttcaagttggggattttttttagttaagttttcattgcagcaaaacggactggtattttcgggacaagttttgattaatttgatataatttgcctggggaagtggtttctgtgtaattcaatgtgacatttcctgattcctgtttggcaattcttggttcttgtttggtagaccgtgtgtgggcgattatttccgaggtcgaaatatcaagaaagtatcaataatatctgaactttattggaaaaatgatgaaaatcactgtcaggatggtaaacttttaaacaaaagtcaagaattgttgtaacatccaataatacaattgaaatcaaaatatttgttaatctgcattgctttaattttgattcatttggcccttagctacttgtactagatcaatattccttctaacatattggtacagaagatattgaataaatgtgtagtctaaatagttctagtggtacctatcaaaaaaaaaaagttctagtggtgcgctactgacagagtttaacatctagatgatatcattgattttgtgtagtggcagatcaatgcttttaatacatgatatgatctaatacttagtttctgcaaagaagtagaggtctgctgactggaaagcagcaagggctcatct

SEQ ID NO: 100143 - DNA, 652 bp, Vitis vinifera
  Intron number 1 from transcript GSVIVT01033724001 (locus G SVIVG01033724001) derived from phytozome v7.0 (chr-ID chr8 ; pos 18333356 to 18334007 reverse strand)
ttacggttacgtcaacttcatctctcctcaagacggtaattatccgtattgttctgttgtattttcgcattttgttcctttattacctctgtttggtttcctagaaagtgttgaaaagataaataaatggaaattctgggaatggattggttttgcattgtttgggaccatgagtaaacgagaacgtttgatcggatgaagaaatctcgcatccggaaaggttgtgcacaacaatcgttacgtccgttgtcctgtttgatcctttctatgttcccttttaagaaaagggagaaaaaagaatagagaatcttgaatcttatgttttttgtttactcaacttagtttatgcctcagtttcttacttgtggcccaaattgaaattctggtttcaaccttttcgtgcttctctcaaacaatgtactaactttagccttttcccacatttgatggtgaaactgttctgatttatcaagaaagagaacagacagaagagatgagtccttcatgagtggctcttgatttatcaaggaaaaaacgaagagactatttattttaatgtgggttggattatactggatgcactattaggataattttgatagtaaatttaattattctgattttgcaatcttatgattttgaatagcttctc

SEQ ID NO: 100144 - DNA, 748 bp, Vitis vinifera
  Intron number 1 from transcript GSVIVT01036973001 (locus G SVIVG01036973001) derived from phytozome v7.0 (chr-ID chr3 ; pos 9387842 to 9388589 reverse strand)
ttgctgggtctgctcttgcttacgctcttggcaaggtaactctctctcaaacctaacttattgccattttgtgatcggtttataggtttttgcagattggttttgttgggaaatcatgtatcactctgtttgattgcttgaaaaacgcaagaaacggaagcttttgcagattagttttgtcccccatgtcatatgccactctgtttgactgctgagaaaatacaggaaatgaaatgaaaacagactttaaatctaggaccatgtattaagaatgaaacaagagcctcccctcaaccaagcctgtgtaacttttagacttagttgagattagttttcaattacttatggggaagcaaaattatatggacaagtcttcaaattctctcctactgcattctctaactgggtctctcctgatgaatttggagattgttgttttaggttttttttttttcaattatatgtcaagggcatatgatgcacatcaaattcacttttcatatgctgatggtctaacaagagaagattcagacatggcccctcaggatcaattatgtgtaaaaaatagtacataactttcatttctagtacacaaagttcttagctttcctagaatcccagagcaactggggttccccaaaaccaattttgccgaaaatcgtctgttgggcagctgaggaatatgcttctttgtattgtcacttttgagtttaatctgcaaacttgtttgtactataatggttgcagg

SEQ ID NO: 100145 - DNA, 615 bp, Vitis vinifera
  Intron number 3 from transcript GSVIVT01035226001 (locus G SVIVG01035226001) derived from phytozome v7.0 (chr-ID chr4 ; pos 10826443 to 10827057 reverse strand)
tttataacttgagtcaagttttaatcttatcctgtgtcatcacaattatatatatatatatatatattaaaaattgtaatatttatttattcataaaatatatttagtttaatataattatcaaatctattggttcttctttatttaaggttatagaatgtttcaagaattaaattgttcgtccattaaaacggtatatgagttgggttcaaaatatcatgagacaacttagtttgaattagtagatcttaataaagggaataataatgtcatatgcaaaaaagaaaaagactcatagaattggcaaaggcaaaagctccttaaaaccaaaaagtcggatagaaaagggatgaaagatcttcattcttagtcccatctcatttaatattcttattaggatggggaaaaaaactaatttatataaataacataaaatcggggtggagtgactcattctaaacccaaacccaccatgttatcatccttacaataaattaattgattataaaacccaaaccaaacataaaatcgttttcacctttaagatgttcaataatttcataaaaccccacattaaagatgttcaacttgtttggttcccgagaaatctcagga

SEQ ID NO: 100146 - DNA, 587 bp, Vitis vinifera
  Intron number 3 from transcript GSVIVT01032996001 (locus G SVIVG01032996001) derived from phytozome v7.0 (chr-ID chr1 4; pos 24956468 to 24957054 reverse strand)
agcttggagtagacagttctgttatttcaggtgagtttctattttttattctgaatcgaattttgtttgctaatctaaagaatttggacaatgatttgttgtatctaaatctcatatatcgttgttctcttaatcaccaagcctacatgtaccaaacttttatgggtagctgtagctgggttctggttgagctctacatttcaaccaagctaaacttgaacaagtcctgcagcgggtttatttaggtccctccactagatagtatgctttccttttattaggaatagggggaatcaaaatttaatacagattcctttaattttgttcatgtgaacaatttccattttacttctaaatcctatattcctaaaggttttctgtcttcctagtgtttgtctcattctcttttcactgagctgatggtttaaagtatatgtgctatctttaattcctgatctgcctcaccatgcctgttcagctaatttttgtttagtccttactcctgtctcttttggctctcatgcttttgtgggtattaaaaacattttgcagctcacttagaagaattggaacaacttctcaaggga

SEQ ID NO: 100147 - DNA, 804 bp, Vitis vinifera
  Intron number 1 from transcript GSVIVT01032404001 (locus G SVIVG01032404001) derived from phytozome v7.0 (chr-ID chr1 4; pos 27062557 to 27063360 reverse strand)
tttttgttgcagttgggtctttaacactcgctgcggtgcgttgcctgtgctttaaacctttggtttctatgaaaattttaaaggcaattgacctgaaatctatacaaagagtcattgatatgacctggcgtgattgttttagtatttcttaattccatgcctcgattgatattcgcctgtgttcctaacagtcaaggttgaagatggtggtttatcatcaatttgtttggactgggtttgaattttggaaaagaacaagcgaaaggaaaggaaaggaaaggaaaatgctgattaatatgtaacatggagttcgtttttgggctagtttcagcatgttccttcaatttctgctgttcttcgggaggttcaaatgaatcttttaaggctttgtttggtttcggaaaatttgagggaaaatgttagggaaaggaaataggaggaaaaatagatgaaaagaaaaagatgaatagaaaaaaaaaaaaaagatttaaagccaaattatttatgacttcaaactcaattcacttatttgaactatcttatataaataataaataattcaagaatgcataaaattttaattaattttaattatatttggtttttttttttcaaaatatagccaaacatgaaaaatcgtttttcttaataatttcttttgttcttttcttatattttattggaaccaaacacgagataagttcaatttgtgtgcactcttttttggtgtttttgttccataagtaattttataaccatcatttttctaagatgtgctctcccattcagctttcagaaatctcg

SEQ ID NO: 100148 - DNA, 921 bp, Vitis vinifera
  Intron number 5 from transcript GSVIVT01038501001 (locus G SVIVG01038501001) derived from phytozome v7.0 (chr-ID chr3 ; pos 10535664 to 10536584)
ttccttgcattttggtggtcctctagaggcaagcatgtttttacttaaaacaggggttttgacttgcgatccaagtatttatccacgtgcattgcatgtacgatattgtaattatattaggactttaaggttattttctctttttatgaggtgtacgattgattatttagctgatatttaagattcagaagtgaactcttgatgtggtgataactaggtttgttgccagtcattaaagacgcttggttaggttaccctacacagttttgatttatgtatgtactaaaaatgctgaattcctctgcagagccaatttgggtcgtcctcccaatgctctgcctgatggcgaaaaagcctctatatcatcacatttctgctggagctcacgcaagcaatgattcatatgaagcattgcaaatataaataattgaaaactccgaccagggtgatttaatggatttaatatcttagttcactcatgaaagtctaatttaattttagtaagacagtgcatagggatgcatagtgtaatttaagatgtgtgagtttgtggaagaattagatgttaaaataaacacccttaatgtgattcttacatttgtatccacttaaggctcaaaaattggaactgttctatcatttctctaacacatacaactaacgtattctaattacatttgtacacatatataatacatacaaaattgacttatcttaggctaaaagagaaaaacgaaatacaactaacctattgtgattacatctgatttttaggaatacagaataattctagatagctatgcaatctattaaaggaaaaattagttaaaccactattctatcaaatattactattgcagataaactgatttggtttgtttactgaattaaattttcaggtcaaggttaagaactgggttg

SEQ ID NO: 100149 - DNA, 430 bp, Vitis vinifera
  Intron number 1 from transcript GSVIVT01035001001 (locus G SVIVG01035001001) derived from phytozome v7.0 (chr-ID chr5 ; pos 809055 to 809484)
tcacctctgctatcctactctccgaactctctcaggtacgcttctgattggtttccgagaaaacctaaccggagcaatgtataatattttgagtgttgtgtttttgttgtttatatttccgagaattgaaggaaacaatatatgattgcgctagagctagtcgtgtggatgctttgctttctctacttatatataatggaaatcttggatttgattttttttttttttaatgtgtcctttccagccaaatgtagtatcgtgcttttacatgtttatgctatgatgttccttaattgactgttgttttatgtaaattctgtgttagatcgacgaacacatgctcctcataactctagccttttcttcattttcctcgttggtaaagagtggttaattcctttggctgttgatttctctctgcaggcttgga

SEQ ID NO: 100150 - DNA, 939 bp, Vitis vinifera
  Intron number 2 from transcript GSVIVT01038090001 (locus G SVIVG01038090001) derived from phytozome v7.0 (chr-ID chr5 ; pos 23397819 to 23398757)
gggagtgtgtattcggtgatagagctctcttccaggtcggtgtttgtttattgattttctgtttccctgttctggagaattcatttcttgatttgatttcgaatggattgtaattggttgctggtttaggcgctgtttggtcgcatcgaattggacaattgttgaatgttaatttaatttcgagtttgagcttaattggttgtgatttaggcaatgtttggttggatcaaattggacaagttcttggattttgagttcaggtgtcatgcgtgaaaattcaaaaattcaaaaatatgttgatagatattggaattatgttggttgacgatatgattttgtggaaccaagcatggtcttaatcttatttatttgtcaaatcctgtattgcattttagtataaattggagtactagggagtgtcattgtcatctgtgggtagtacaggttttctagtgagttatagatcaattaggactctttgtgtgttgaaaatgagggttttaggtgtgaggagtgagatattgttggaaaagagaaaattgtgtcttagtgttggttgaaggtaaggttttgggagtgagaagtgaaatattgtagcaatagagaaaattgtgtccaagtatagatcaattaagacattttgggttggtggaaagggttttgggtgtgaaaagtgaaagtctgttgtaagtgagaaaattatgtctaaataaagctcaattaggattttcaaggttgagataaggtttttaggtgtgagataaggttgggaattattttgggtgagagattgtaaatttagttgcagttcagtttttttgagtcttttgaaaatggaaaattcttcgagttattgggatggtgctcaatcagagagtttgacactattggataatgatgccaggaattcaattttggagcaaccagtaaacaatattc

SEQ ID NO: 100151 - DNA, 563 bp, Vitis vinifera
  Intron number 4 from transcript GSVIVT01038090001 (locus G SVIVG01038090001) derived from phytozome v7.0 (chr-ID chr5 ; pos 23399657 to 23400219)
gtttgtcaggccctcgaggttagttacttcatccttttatatattcatgtttgattattcttttcatgttgaaatcatatcatgcacctagaagacgacatgctacttttctttacctcttttaaacaccttttcaatgcctacatatcaacttatttccccaagaatttgtctgcaataaaaaaatctattctttttgcctgctcaattacatattctatcacattccttagaattagagtttattttctttcatgtgtttctagttccaaacaccattcatgttatttatgaaccatttaaattgattgaaaatgtaatattataccaaaaatttgtgtgaaactaaatcaagaacaacctcaaaagctgttgaatgttttgatattcaagccaactttttagcttagatacctccagtgttgtgcactagtcaaaccacactaacctatataaagtaaggctcaattgaagtaggcattaaatgtgattatgagtttatttatatgtttttttccttgtttacaggctgtgaacttaaagagcaccacaccacctcgact

SEQ ID NO: 100152 - DNA, 845 bp, Vitis vinifera
  Intron number 4 from transcript GSVIVT01034360001 (locus G SVIVG01034360001) derived from phytozome v7.0 (chr-ID chr1 0; pos 17433896 to 17434740)
ttacctcccagttctgctgggactagctcaaaacggtatgtgaaagggcctgtaagtttgaattcttctacctaagccactttaagtttgttttctgttgggcaacaagaaatttgagtgtcatcctatttcttatatgaaaacacaagtcaactaaatgagatggtcaaatttgggtggttgaaaacgacgaaaaatcttttacgtaagtgtgatttatctgagttcaagctctactatgagctaaacaggtcctatcactctatttactttaagttattctacaagtctctaaacagaggtatagctctctctttctttgatgtacacttgacatgcctgtggtctccttagcagctacgggcaagatgcatatttaataaaggccactattcctaacagaaggattgcccatggtcatagtttatttaggctgactatgaatttggttctttcaaaagattgggtagtgagactgggaattaaacaaaatggaacaaagaagaagatatagtctgcaaaattatcataatgaattttcgtaggaaaaaagctcagttttttttacaggatcagagctacattacactcgcacgatctttttattggtattagaagtcctttatttgcattgttatgcctgttttacactatggttaggccaccaatgctattcctaaaccccatccttgctgagagccaagtaggtatcccccactttgaggggagatttccaagacttcgattttttttgggtgtttacgcctgtttaagatgaactctgattgtttcctcaaccacattattcagcacaccagctacaacataaattgcaatttgattgg

SEQ ID NO: 100153 - DNA, 584 bp, Vitis vinifera
  Intron number 1 from transcript GSVIVT01032486001 (locus G SVIVG01032486001) derived from phytozome v7.0 (chr-ID chr1 4; pos 27801871 to 27802454)
tccacggcaacatttaccttgatccagtacgagcttcttttgctgtctctgctctcgattttgatttcattctgtgattgtttgtttctcttttcttcggttactttttttattttctggaattggagtttgatagcatgagctaatttgtggaaatcttggagtttaggaatttcaaagcatgatctctgaaaagtttcggtagaaaagaaaaggaatggaaaaagaacagccatatgtgtaatttttctctgccttgattagaaaaacattttacaatgttttttccccggcttcgagcgtaggctgttgtatcagtctgaacagctcaactgattacggtgccttttttttttctttttctttttttttttttcttttttttgtattttttggattgttttatatataccagttgttcgcgagtagagaaaataatttagcaggagtttttgtttgaatttgacatctaagcttattctgataattcgcgaactgaaatttgggatctaaacctattgaattagttacacaattgaatttgatttctattttctctgtgataacagctgtttttgaagttt

SEQ ID NO: 100154 - DNA, 392 bp, Vitis vinifera
  Intron number 1 from transcript GSVIVT01037864001 (locus G SVIVG01037864001) derived from phytozome v7.0 (chr-ID chr3 ; pos 6995245 to 6995636)
ctctctcacgtccaccctctctacgaattctgaaggtataatcttacttttcattctttccctagggtttttaatctttttgccctcactttccctgaaaactcaggaaaagaaaggtttttttttttcttcttcttcttattcttcttctatttgaatctttaatgttttcggttgctttgggctttcaagctacaagaaaaagaagctcagctcagctcagctaccgcagatggttgcatgaggcctgctgagttgggttgggggtttggggtggaaatttctgagagattttgagggtcttagtgttttttttttttttttttttttctcctttattttcttagcaaccaaacggaggataatttagcggttgattgggttttcaggaa

SEQ ID NO: 100155 - DNA, 634 bp, Vitis vinifera
  Intron number 2 from transcript GSVIVT01033413001 (locus G SVIVG01033413001) derived from phytozome v7.0 (chr-ID chr8 ; pos 20888940 to 20889573)
tccactggttttctctctctaccctctaccctctactctctatctctatatataattgttgttgggcttagttttgaaggaaactttctataaatcctggcaaagggaatgaattgaatttcgattctctgttttttttttcctcatttgggatcaatagaaactgaaaaatctgcactgaaactcaagggaactgaaattttgttactgtttaaagcctttaggctgaatttttggagaaacttcaagccgttaaagcaacatgttcatctttagcctaatgaatgatggcaaatttgaaacttgacatagctgccatctggtgttttccaccataactcaagacttaacagctgatttttcatttttatttttgcccattttcagtggaaatggaatttgaatagtaacatgttatttggaatttcaatgttctagattgaatcattatgttatcaaacagccctctggttgagttttgataatgttagactcaaattttctgttatttacttttgtttcattcattttctctacaaccaaacagaatagtagcattttgctcctgtttgatcttctaagtgggttttgtatcttattttaggaccccattttaatccactgaagaaagatc

SEQ ID NO: 100156 - DNA, 453 bp, Vitis vinifera
  Intron number 2 from transcript GSVIVT01032518001 (locus G SVIVG01032518001) derived from phytozome v7.0 (chr-ID chr1 4; pos 28039676 to 28040128)
gactgaaatctctgacctctctctcagctgtaggggtaataattcgacagaaacaagaccctcatgcaaagctcttttgattttctctcctttattctcttcatctttctttctcattgagttttcaacccaccatttcacatgctgctgttgctggatttttgtatttcaacctgctttcgtttctccccaatttccctttttcttcttccaactatttcgctcttcaatttcccatctctcatgccacttgcacttccttaaaccttttttgggcactgtagcgctcaatctcatctgggtgtttctcatttcctctgtttatgttctctagctctagggttttgatttgtctttctgggttggttttggattctatctggtttctttctcatttttctttgttgggtgctttcagatctcaatttttggagtcggggtttttgtttttgg

SEQ ID NO: 100157 - DNA, 984 bp, Vitis vinifera
  Intron number 2 from transcript GSVIVT01037925001 (locus G SVIVG01037925001) derived from phytozome v7.0 (chr-ID chr1 0; pos 10983158 to 10984141 reverse strand)
ctggaagaattcagcatcttgttgccctaggtaccctctctcgattctttgcaatagtttttcacattgggaaatatttgtagaattgaagaactttatgcatgtgctttgtaatattgtagtgaaacacttagtgacatctataggtgaaagtccattattcgtttcaaattactctccaaattacctgttctccatactgagtgattgcctggtagtgtttacaaaattagggtaacttctgccagaatagattctttcaaactaattttttagacgggaaaatgatttattttattatttattctccaaattgcctcttgattcagtagcatatccttaataatttatgaaattaaggattgaagaactttatgcatgtgctttgtaatattgtagtgaaacacttagtgacatctataggtgaaagtccattattcgtttcaaattactctccaaattacctgttctccatactgagtgattgcctggtagtgtttacaaaattagggtaacttctgccagaatagattctttcaaactaattttttagacgggaaaatgatttattttattatttattctccaaattgcctcttgattcagtagcatatccttaataatttatgaaattaaggtccttaataatttatgaaattaagggtatctaagcattatcattccactttggtttttggaagcgggatggataatgttaaatttgctcagcttcaattctcttttcacctgctatttttgtcccatcctcttaaatctgtataatttattaatatactcactttctattacaaaagcacccttgtacttcaacctcatcttccaccattttctttagttcgtcttccacacttcaaccttaaaacttatttctattttcctcatttgtatctccctttttgttgagtccacgaccctgttttgagagcattagaatacccctaagggattatctctcctaccatt

SEQ ID NO: 100158 - DNA, 957 bp, Vitis vinifera
  Intron number 1 from transcript GSVIVT01035899001 (locus G SVIVG01035899001) derived from phytozome v7.0 (chr-ID chr4 ; pos 5478442 to 5479398)
aggcgttgttcaaggaacaggtttggaattcttctgtttttacacatgagcctgatcagaagcttgcaaaatgggttcttggatttactaagaatttcttgttctggatcctattttttcacttgatactgccatttggatgttgctgttggtagatagtaataaattggatctaattattgcatgtcaaagatgaaggtttgggatcgggaaatgagttttctatttcttgaaggagtataaagagtggttgtatgatgatggatttttaccgtgatagtacacagtataatgtgttagcaatggcccactggtgctgggctgatgtctgttgaatccaaacccgttattttcctgttttgatcatgtttttctatttctttattactgcattaaccaatgttactagattgctaaaagatggacctcttcattgcttttggttttactgttaattttggtgcattagtctgatcttaatagaaaattgagaagcaagctcttcaacagaactatttggttgttgaacaattatatcacctacttcacccaatctctgccctcaaaattttcttttgggaggtacctccacttccttatagattaaatttgatagtcctcaaatggatactccaccaagtgtgctgttttgtatttaaaaacttgttccagaaaggtttaggaacccctagataataatctatgcctagatggaaaataaaccaaaagatgatattatgaactcttgacattgacaaagattcaggaatttcagataaaaaggcactcagggttttcagggaattggttattgagaaagttcttaaaatgtctggatggttgggagatttattttcatcatgaaagtttttgatggcatcacaagttgatttctaattttatcaatttccacttgttgcaggttcaggcactgcacaagctgtacagtatccaaaa

SEQ ID NO: 100159 - DNA, 589 bp, Vitis vinifera
  Intron number 2 from transcript GSVIVT01033549001 (locus G SVIVG01033549001) derived from phytozome v7.0 (chr-ID chr8 ; pos 19839639 to 19840227)
cactcgttgcactctgcccaattcatcagtttctggtgggtatcagctttaagttctcaattttagatcaataatttggtgatagcatgttgttcataaagacatggcacacgtagctttatgatgatgggttcattgttatcatgctggatcaacagttttggattattgaagagttgtagtgattggagatgccctttgagatgatatagtggacatgagtactagtagtttaaaactgcacgatttttacacgttggaacaaactagattcaaaatgatgtctgcttgatccctttcctgaatgtagtttaaatggcatcatttagaggatcaaaataagagaaaagaaaaaaacaaagagcaaaatgattgtattttgatagctagctttgattgttctaaggtgcaaatatgtcatttatttggtgcatggctttggtcaataaatggtaacaagtaaagaaggagaatggtcttatttctgaattcaatatatggctccatttcatattacatttcttaactaccaagggtaatgatttccatttcaggggaagaagagtgcagtttcagaggtacacgccgt

SEQ ID NO: 100160 - DNA, 427 bp, Vitis vinifera
  Intron number 3 from transcript GSVIVT01032563001 (locus G SVIVG01032563001) derived from phytozome v7.0 (chr-ID chr1 4; pos 28395428 to 28395854)
tatcagaagaagagtgtgatcatctcattacactggtccgagaagattttatattttctatttctttttgtttatgttttttctttttaaaattttattattggagcttgatgattggtttggttggtgggaaatatcgaagaggaaagaaagcagaattattttcattatttgcggcgctagaaaacaaaaatgcttgctcttggttgaaattgatacaattggagggcttacgtgagatggggttgtccgtctctgaatctgaaacaacataaagtctgtttccttcttttcctcggttttcttagcaaccaagcaacgggctaggggataactgttctgattgagaacctattttattttgtattttgactttttgtttgattaaatttttgggaaataggctaaggataaattggagaagtca

SEQ ID NO: 100161 - DNA, 755 bp, Vitis vinifera
  Intron number 1 from transcript GSVIVT01034021001 (locus G SVIVG01034021001) derived from phytozome v7.0 (chr-ID chr8 ; pos 15786454 to 15787208)
aagtcgccgccgtactcaccactgccgtattcccggtgagatttcttcgctgctcattctgtcgctgcacttaattctccgtcttgtcttatgttcactatcaaaatttcggattcccgatcaaactcttgcgatttacagattatgctgctgaaaatagttgtgattctattctagggtttatatataggtttttctttttttcttttggtcttcgataccatgattgcaaaacattgattagggatttaacgaattttatttgggcgaccttgaattcattcattttttcttaaattgtgtcgtgaaaatttagaacttgttttggtttttgagagtcgcattcgaaaagttcgatgtgtagttgtttgtgtgttcgataatatgcaatctttatgatggtgatctgatcctgagaggggtaaactcttttgtggcatggtagatgatgttgcattcatcaattgttactacaatacgatagggttttttgctaagaaaaacattcaaggcatgtgggccgtcgagtcttcgttatccagtggatactggttatagtttgatgattgtgattgattttccatttcaaacatagggaatgattatcttccacttatgcatttacaaactccctgtgtaaaatatatattttttttctgattttgtacagaaggatacggaaattaatttttaatatttgtttgccttgatgatctgaagggaaggttatttgctgggcagaagattgaaggagg

SEQ ID NO: 100162 - DNA, 648 bp, Vitis vinifera
  Intron number 1 from transcript GSVIVT01037722001 (locus G SVIVG01037722001) derived from phytozome v7.0 (chr-ID chr1 9; pos 7248939 to 7249586)
ttgaggtcactgaaactgaagaacccaattcaagagtgagtctccaaagataattatcactgtgttcccattaattttctgccccatatttctttgagtagtatgctttactataaatttttgttttagggattcaacatggtcggtttttttttttttttttttgctcaatttttcattatgatgaactattcagtctgtcattatctttttctctgaactttagctaacccttattttttaagttttcttctgcaacaattcaaaatttgtgttttcgatgttattgaatttttataaaccaatccaactgctttttttttttttttttggtataggttttttaaatcttgtgcccaaatcaagatgtatatttcctctttatttttcattagctcttgagtatacttgttaatttggaaggacacctatgcatatgtttgtcaattatcattgaaaatggttgaatcaccaactcccccaacaaccctcttggtatatctatggctgaaaaaatgcaaataaaagtttgaacttaagatgctctggtattgcaattggatatgatgggtgttttcaagatccataaatttacaaggatttctctgtgcaggttaggttgagtgtagaagttccggcagttgtttg

SEQ ID NO: 100163 - DNA, 931 bp, Vitis vinifera
  Intron number 1 from transcript GSVIVT01030877001 (locus G SVIVG01030877001) derived from phytozome v7.0 (chr-ID chr1 4; pos 18214715 to 18215645)
tgcctcagttcacccttattggcattgatacactggtaatttcaaaacgtatcatttcactactcagaaaatttgggaaaataaaaattttcatcgtaccagtggaccagtcgttgtgttaattcagtttcattttaaatgaaaccagaggggaaattttgtgtgacgctcgatttggtttatttatttattttttaatttattttaaccttagttttctaggcaaccaaactgcggctagtgtgttttcttactctcaattttttaatatttgaattaagtcttgcattgatacttaagggaaattcatctctttgtttgtcttctgagaaaatgttttggtggtgtggctgtttagttctttcgtagatgcctaacttaccttcgtttggtatctttcctaatgcggtgtagctttgaaggtgttaaaatttggaaatgacatatcttaaagtgatcagtccagatacatttactattgacttatatcaagccacataccagcggttcaacatttttctgtttttgagtaccaaatttcaattaataaagtcactcttcagcatcatgtggtgctgggcttaatttctagttaggttggttctgtttcaaaactgattccaacggcttctttcttcctttcttttttcttcttactattatgtttgatgtgcgcaggtgaagttctgtttaatacctaatttatattctgtattcataaaaaaaagtatttgggtcttaatggttactcataagattgatgttaaatctcttgctgcactttggacagttgcatgactaaatttgcattttgcagaaattttgcagaaatccagcttttcttttatttatacttgtaatcatgtcaaggcttacgattttatgtttttaacttgttaatagtagctgctggattaaatctattttgcag

SEQ ID NO: 100164 - DNA, 835 bp, Vitis vinifera
  Intron number 1 from transcript GSVIVT01038625001 (locus G SVIVG01038625001) derived from phytozome v7.0 (chr-ID chr1 6; pos 21379879 to 21380713 reverse strand)
aaaagaaagaaaaataaatcttatttaacataaatgttcatgataaatataaatggtgtattgtctaatttgctttatcataatttattatgttaaaaagaaactaagtgggtcttgggtgaaccaacttaataacttaaagtgatttgataacctaataacttaatttaaatcattaagaaaattacgaatgtttgataaaataatttaatgatatgacttaaagtaaaaaataactttaagtaataagtaaaaataattaacttaatattaaatctacatttttatctcatttaccctaattatctccataatcttctttgttattccacaactttcattattactcaatctcatttgccctgcttataacataccagtataaatatatcaatttattgatttaaagtaagttttaaattaattttatcaaacaatcttaatatttaatataagaattaagtagtaagttttaagttaatagcttaaatataatttaacttaaaatcaacttaagttatgaagtaataaatattaaattttatgagacacccctaactaatttactttacaattattttatttttattttttatcaaaacatttaaaaagtataaatatattataaatcattttctttattataaaaatgtaaatatactcaacaattatttttaatgctatctagcaataagaactaagtcaaaagaggcttcaaatcaagcttgaacttgacttaccaatgaaagaggctatgacatgtttttatttttattttataatcgaaaaagtattttatttaacaactaatgttatgttgcttgactgtagaata

SEQ ID NO: 100165 - DNA, 999 bp, Vitis vinifera
  Intron number 1 from transcript GSVIVT01035089001 (locus G SVIVG01035089001) derived from phytozome v7.0 (chr-ID chr5 ; pos 1387620 to 1388618 reverse strand)
ctagtaagtacgtttttcttttctgggtttctggggttcttttgattttccctctttttcttggccgagcccggaaatctcaattttctaggcttggttttttgagtttgattgttgtgggtattttcttgttttgaagtggccatcgggtttttgctgtaaaggggttttcttttgatgtgggtattggaatgattttgtgcgttttggaggttttttctgttaggggaattcgattgtcgtatttatacatcccttatctctcaaagtgattctcattatttaatctgttgtgataaaatcatgaaatcatacttcaaattgtcacatttaggatgggcatttgaagactgcttgtttcagctacttaattttttatttttagtttgactgaatcatctcttctttcccctagaattccaagatcaattcccaaacagcatctcacatgttcgattgttttttcatagtgtgatactgcctgttgacttcagtattcaactagggatttcccttctttatctactttagctcctcatatgattcttgttctcttacagtttagcaacttgcaggtcctctatttggcattgaggaatttcagtagcagcaaatttttgctaatcctgaatctactattttctgtttcgcttctgagttttctatcattatcggggtatctgatgatttttcaaaattttgcttctagaaatccacattagtactctcgtatatttctctctctctctctctctctctctctctttttttttttctggttcttcgactccattgtcgggtgttggttttttcccaagtagtcctatctcttttctgtgaaattgttcattttctgattttgtgttgatttaagaatcttttgtatatgttttttagtttttttatgaatgtttaaggcattgagaagcgataattatgttgcggtttcccttctattttcctcttagttgccattgcttgtgattctggtattgagca

SEQ ID NO: 100166 - DNA, 674 bp, Vitis vinifera
  Intron number 3 from transcript GSVIVT01036154001 (locus G SVIVG01036154001) derived from phytozome v7.0 (chr-ID chr6 ; pos 20025726 to 20026399)
ctccaggaagatttttgcggcaccgctcttcttaggtacataataaactatttattttttctgggtaccaaatgttattcgctggatatacattgtcggtcctttatgaaacagtttaagcttttaggttaaacagtgtatgatgataattgattgccacccattttatcctatatgatgtttcaattcaaggcacagtatagcgggttagagttcttatttgaatttttgtttgtttgcccccctctttttttcccctttttttggcgtgggagggtttggtttataaagttgccggtagattgagggcaagctgtttgataaaacgcctgtaaccattggatggttttgtcatgaatgataaacaggtgactttgttaatcttagtttgcaatatttgtgcattatgctcctcatggcttttagattatgacttttggttgaacagacttcgcttttttcggggcatggttaatggtgtaggggctatggttctgactgttggcttaatttggaattagggtgaacaatttatgcttacgggctttcttcttaaaatagtgtaaaaagtgccacctttttaaactggcaatctgtagactgctgcttgattgcagtgttagatacagcctagaagagtgaacttatatgttctgtgtgtttgacagtacaga

SEQ ID NO: 100167 - DNA, 728 bp, Vitis vinifera
  Intron number 1 from transcript GSVIVT01032772001 (locus G SVIVG01032772001) derived from phytozome v7.0 (chr-ID chr1 3; pos 875693 to 876420 reverse strand)
ggtgattttataaaatttttaaagtgtttcacaattttaaaaaaaaaatttaagtgaaaagcactttttaaaatcattccaaaaaatttatcctcaacacaacttaaattactcaactaatcatatgtattaatattattaatttgattaatttaatttgtgggctcaattacaaataaatagaacaaaatctcacttaaattgttatttaacttattttattattcaaattcactaataataattaataagaccgcgtttgttgaaagacgataagaataaaggctcatcatatccaactattaatttaatggttacgccacccgcccaccaaaaaaaaccaaaagccaaaaacaaaataaaagaattaaataaataaaaataaggaaattacgtggcagctcaggactgacccagtacaatgacttcgcccacttcataattcaagcttttctcaattattactctccgattgcgctacgagtgggtgagaattcaccgatttttttcgagaaggcgtcgccggcacagccgaaaacagctcaccgaaacgcgtttttccggcatatggggatcttctggcacttaacctgctttttgggtcactgtgtctggtaacttctcgcgttgcgtgaagaagaataaagaaaagaaaaaggtttgggttcacgcgttttcaaagctagaactcagtctggtctaatccagttcgaaaatacacgcactgc

SEQ ID NO: 100168 - DNA, 370 bp, Vitis vinifera
  Intron number 1 from transcript GSVIVT01036116001 (locus G SVIVG01036116001) derived from phytozome v7.0 (chr-ID chr6 ; pos 20528361 to 20528730 reverse strand)
tcgtcattcatagatctcgaattgcctggtaattttcgtttgtcaatgtgtaggagtttgtttgattgctgagagtattgaggcaaagcaaagaaaataaaagaaaaattgaatcttgtgctatatgttcttatggtttatgaaatggaattaaaggatatgaagcttgattgagtggaggattttgttttctcggttaatcagaagtttagaattcagaaatttgatttcttatcttttcctacctttctcggcaagcaaatggattttttttttttttttttgggtttcagtgtttcattggtctcttatgccatctgagattggttttatcttctttcttgtagtggaaggatcggagggagaagct

SEQ ID NO: 100169 - DNA, 280 bp, Vitis vinifera
  Intron number 1 from transcript GSVIVT01031360001 (locus G SVIVG01031360001) derived from phytozome v7.0 (chr-ID chr1 4; pos 36614 to 36893 reverse strand)
aacaacgaggaattacacatctcttccccattcaggtgtgtatacatgcattttctgctttgtttcattgcagttaaatgttgtttgaattattaatctcagtgtttcgtattcaaactggactcatatttgccttcaataggacgatagtttatttttggggttttctttctcgttctctgaattgttttttgttttctgagataaaacttgcttttcttcttgcttttcctttaaaattctagagagctgtgttagtgcctgctctagaaggtcgaga

SEQ ID NO: 100170 - DNA, 657 bp, Vitis vinifera
  Intron number 1 from transcript GSVIVT01033902001 (locus G SVIVG01033902001) derived from phytozome v7.0 (chr-ID chr8 ; pos 16862323 to 16862979)
caggtattttgttcacattaacacccccccttcttttctcttttctttattttacttttcattttaaaagaattaaattaaaaaaaatgttttcctatcactattatcactaatataattgttgttattaaacaaaaagattcttgcactcgtgttcaaagagcgtgctagtcacattccaattactggggagcaacgcgattatttaagctttaattgaacagtaatctaaatttcagagtctgggtgagtattggaatctgttgctcccactgcccacatacatttttccaactttcagataaactttttgtttgtgtcctgtgatttatattttattattattatcctcgggtgaccctacaatatttttcaaactcttttttctgttaattagagcacgcgagacttgacttttgaatgatcaatttcctgagccttttttaaagttcaaaattataatgttttgggtggtctataccaaccaaattctccattctacccaaaaagaaagggtggactgagaaaatgacatgatgaatggtggtatgcttctgagttcatatgtttggagaagagaaaagagtagaaaagtcagatgcacgtgttgtattattgacagggtcggttgcaaagaatcaaacgacgccggtgggg

SEQ ID NO: 100171 - DNA, 696 bp, Vitis vinifera
  Intron number 1 from transcript GSVIVT01037896001 (locus G SVIVG01037896001) derived from phytozome v7.0 (chr-ID chr3 ; pos 6559002 to 6559697 reverse strand)
aagcgttccattctcaactctccaaacctccaacagtttgatttctctatctccttctctttatatgtgtataggctttgatctttcgcattttggaagtatttttcttcttttttcgaaagcagattgccttccaaggattaataaattattgcatctgtgaaatgtagttgtctgggttgtgaatttagggtactgtcctcgtgagctatgtgcaagtattttttttttttttgagagagaaatagaggaggttcggctttcaaaaagcaagaaaattgcttcaaagcgtcatggatggtgtgtatttgctgattatttttttttcccttttgatttacccttgtattattttcaacttagtgcctggtatcatcaacgtcgacaaacatatacaccattctcatggaatcaacaattaatcttcacgattgtggtttcaagtgaaaatcttgaagcaactctatcaatagttggttaataacaaaagcgttagtagttgacatatggcggctagtgatatgttgggttaattggcatgggcttagatcatgctgtaaagttctttcatatttttgttttttgggtaactgggagatgtaacaatattgaaactttttaaatgcgataaatgttatattgattgttgatagtttttcaggtgggaggaaaaacttcaaacatcacacttgccgg

SEQ ID NO: 100172 - DNA, 676 bp, Vitis vinifera
  Intron number 1 from transcript GSVIVT01037496001 (locus G SVIVG01037496001) derived from phytozome v7.0 (chr-ID chr6 ; pos 12685125 to 12685800)
ctttgtcaggttcttcttcttttatctctttttacttcttttatctctttgttatatttatttattctaagaagtgtttttaatatttttaatacttgaaagataaataaaaaaaatagaaatgaaaaaaatttaaatgttagaaagaatgtaacacttcctaaaatcattgtcaaacatactctaagagtgcgtttgacattatttctactcaaagtgtttttaatgaaaatgttttctttaaaaatatttttaagagaattacttatcaaatgtttcatcagaaaacaccataaaatgatttttcaatatatcaagtgattttttatatttttaaaaaatatttcataaattttttcaaatacttaatttttttttttttttcaaaaacacttctttaagttaaaagcatttcctaccaaacattggattagtgattctcttcaaaacattcttagacaaaacatttctactaaaaacacttgcactaccaaactctatatttgataggtgattcttctaaaaacacttccccataaaaacccttccactaaaaatgttttggggaaaaacacttccaaacattattcatccataattggttttttgggttttgttgctcttactaaatccattcattttgctttctcaggagttggaatactttcaattccat

SEQ ID NO: 100173 - DNA, 538 bp, Vitis vinifera
  Intron number 3 from transcript GSVIVT01033188001 (locus G SVIVG01033188001) derived from phytozome v7.0 (chr-ID chr4 ; pos 9363710 to 9364247 reverse strand)
tccagctccggccgttgccattgctctaaaagaaggtatgaggtgctcttcgcctgcggtgcatattagcaaattttagcatcttttcagttgttgaaccagatgtttgttttgtgaacctaacctattgttatcgatggggagaaaaaataataaataaataaagggacaaaaacgtggaaaatcgtgacacgaagccaccactcggtgaaaaatctgtcgagttttcttttgactcggacggaaatcgagttacctactgggcgtcttacctagtcaaagcaccgagtcaaaaactgagtttgaagttctaaaatttagtcggtaactcggtctgaggctgacgtgcgcctgcatggtggacttttgttcccctgtcattttcgtccggtggacgaatctccgaacgcacccggccgacaatcccatattcttgtacgattgacattgaacatccatggctcatgatggtcataataataaaaaatttattttcatttcaggagatctcgggtgaagaaaactattagagtgccag

SEQ ID NO: 100174 - DNA, 993 bp, Vitis vinifera
  Intron number 1 from transcript GSVIVT01032094001 (locus G SVIVG01032094001) derived from phytozome v7.0 (chr-ID chr1 3; pos 22760141 to 22761133)
ctttctttgaggggaagaaggttttggtttaagttgtgacgtgcctcttttatatatatatatatatatatatatatataaatttatgattttaacatttttcaagattttttaaataattgaattttgatctctaactaagaatgtgtttcgagagtgatttcaaaaaatattttaattattgtaatatttgaaaatttttatcaaataaattgtttttaagtaaaagaaagacgagaaactctaaggtcgcttgattattttttttcatttttagattatattggaaaattcttatttattaaatgcttatatatgattttgtataaatttatgattttatcttgatatttgaaaattttgaagaaaaatatttagaaaagaaaatgtgaagaaaaagctgaagtaaagaaaaattaaaagaaaatgaaaaatagatttaaagttaataaaaatttttttttttttaaaaaaaaaaaaaaatatatatatatatatatatatatatttaaaattgaaatatttttttaggtatttaaaaaaaattataaaacataatttaaaatatataaaatattttagaaaattttataacaaattaagaattaaaaaaaaaattgattccttattttgaaaattgtttttttgggtaaatatttaaaaaaaccttgatgtgctttgtttttttttttgtatcgtagcaagctaatcaggtgatatgttcgaggatgacgtgaactaaaacgtggcccgtcctttgttgcatgagacacgtgacgtgtcacacaaataacacatcacctgtctcatcattatcctcatctcaacaagccctacatcatatgccatgtgtacgatcaacctactgacacatagacttttgtcgtccacgtggcttttaacttgttacaatgcatatgtcttgagtcttttaaaagcaccttgcacccacaaacagctccttgccttttttggaacatagaccgatagacg

SEQ ID NO: 100175 - DNA, 739 bp, Vitis vinifera
  Intron number 2 from transcript GSVIVT01035645001 (locus G SVIVG01035645001) derived from phytozome v7.0 (chr-ID chr4 ; pos 2950979 to 2951717 reverse strand)
tcaattctcagaagaatctactaacttttggggatgtatgtttaccattttgtgctattaacttattgctgttgtttaacagggacattcataatggtccctgataataaaagccatcaagtttaacagttgattttgttatgccatttttttgcacaatttagcaactggagttcatgattgcttttgactttcatgaaagcaacggcttagaacttctctattcccagaactgaaattaatgcagaagttgtagtaagaagctacctgcagctgtgcttttttgtctgataccttctggttggcagtaggccatcaaaaaatatgataaaaaaccatctattatgtgaaatttggttaatatggttgagtcagaataagtcgcttaagtgtttagacattcattttagttttttaggcatcatgcatgtaatttgacataatctaattaatttcctgctccccccttctatgcatactagacaataatttcttctgtacataatgtatattttctttattccttacatgatcctttggttttcttagcttctggtccctcttttcttagtagttgttccttggtgcattttgattagcttatgaatgatgtatcatcagattgattatgctactgttgtgtcgaatgtatgcctctcttccttttattttatattttaatgttttaaatgcagttttttggatagctaatcagtatatttttaatgcgtaggtaggc

SEQ ID NO: 100176 - DNA, 473 bp, Vitis vinifera
  Intron number 1 from transcript GSVIVT01035645001 (locus G SVIVG01035645001) derived from phytozome v7.0 (chr-ID chr4 ; pos 2951917 to 2952389 reverse strand)
ccttccaatcgagaacttcgcactccacacagcgggtaaattgaactgaattcttatgagttttctattttggttgaatttttttgttttttttgtttctggcattttctaattgatgtggagtttttttattctgaattttctgttcggtcttggtttgtttctatggataattgttccctgaaaaggtttggagttgactgagctagaagagctgcattttacttgattgcgcacagtttttttatttaatcggatccggaacggtgaaaagaatgatgaaatttgtacttttatatctgttctatacatatatttatagtagtgaaacaaaggtttattgctttatagagacataaatcaagtattcctctacgagctcatgatttagatacatgcacgatgacatctgaaggcaaatgtttatagtttgattttctgcttttggattttctgggacaggtaccattttg

SEQ ID NO: 100177 - DNA, 898 bp, Vitis vinifera
  Intron number 2 from transcript GSVIVT01035536001 (locus G SVIVG01035536001) derived from phytozome v7.0 (chr-ID chr4 ; pos 2111179 to 2112076 reverse strand)
gtgatttagggccttcctttatcaaagccggacaggtttgtcaaattttagccctaaactcttactttgtcgttttttgaatccatcgcgtttctatcatggtgagtttttgttatggtttgaatttgtgaattgcttggctgaatgtggacattctatttcaaagcaatgatttatggtggactttttgacaaattaagatttccgatcttcttaatatttggggattttttgctggattttcaccttttatgatttatggattgttttttcatagcttgctccaaaattaatgactcattttaacttaaatttcctaaagaatctagagtcccttgaacggccttccattatcaaagtaattagttcactgttctctgcaacatttttcaaactttcaatttctcaccaaaaattatacttctcgtgcaatccttttttgtgctttaactgaagatgtgttgacaaaggaagattgctttctcagtttggaacaccagaagttatgtgttgggttttaaatttcattatagagttaaggccccagtcaattcactggtggtaaaatgtatgtaccctaatagaaaggaatgaagtgtcttatctatttttttttttttttgataagtaatgaagtgtctatctattaaacatcttttaaccgagttgccattctgcctgagttttatcccaagtgaattcaggttgtctttctgaaatcaaatttagaagagtggttgggagtttctcgactagctaacaaatttaaagacaatcacgttgtctagctaagcatttggtcttttcttttttaatcagaaacacttggttgtattgattgtacacttactttatgttaacaggttcttgctaacagaccggatattattagggaaga

SEQ ID NO: 100178 - DNA, 449 bp, Vitis vinifera
  Intron number 1 from transcript GSVIVT01033498001 (locus G SVIVG01033498001) derived from phytozome v7.0 (chr-ID chr8 ; pos 20234742 to 20235190)
aatccctggttatattcgaaactattgctctgcttcatgattttcattttcttcgtagtgctactttctttggttgctgagaaacagttggaaaaggagagaaacctgggaattttaacatgttctagttgatttgatttgaattttttttttttttttaacaattttttttccggtttgcccttactttctaaattttccctttttcatgagtgttctgtttggcttaatggaaatttgggcgaaaaagaaaggaaaacccggaccctgcaaggccctaaatgaacgcctccgctttaaaataattcacgttttcttttcgtttcctgcgatttctcagcaaacaagcagtccccgtttgacgaagattctgcgatttctgacggctttaacagatttttgtgccattatgtttattgatttgtttatttttcgttgtcccctgtagg

SEQ ID NO: 100179 - DNA, 874 bp, Vitis vinifera
  Intron number 1 from transcript GSVIVT01038100001 (locus G SVIVG01038100001) derived from phytozome v7.0 (chr-ID chr5 ; pos 23496236 to 23497109)
ctgctttttagaacactttttgggattggatatttgttataaaaaataattatatatttgaaaaataattgaaaataaaatttatttttaaaaatatgtaataacatataaaataaattaaaagtattcaagcttttaaataaatttttgtttataaaattttaaagaataatttttaaaataacatttcccaatctgtgtagaattgttttaaaaaacacctcttattaaataaacattctcaaatagagcctggtgtttgatgtgttttttaaaatttttggagaatcgcatgagccaagctaaattattttttttaatcatgttctaagaaaaggaaaattgttttattaaaaataagaataaataatgggagtaataatgagagttagaaaattttagttaaaattgtttttttttgtaattattttcatatttatcctattatttttaaaacaatctttaaaaaataattaaaacatattttcaaaaaacaccatgttttctagttattaactaaaacatgtgcctcctattttttgttttcaaaaacatgttttctacttttgccataaaacattttcttaaaggtttttcataatttagcaattttttatttttaattttcaaataatattttgttagaatttttaaaatggtagacatcccatctttcttctattttttttttcattcacatctattttaaaaatcttaaaaagggaataaaaataatttttttttcataaatatttttatgctataaaaatgaaaaatcaaactatatttttattttaaaattattttcaattattgtcatctcattttcgcaacctcaggccctcaaacactgaagggccttaaaccccaccag

SEQ ID NO: 100180 - DNA, 540 bp, Vitis vinifera
  Intron number 1 from transcript GSVIVT01037119001 (locus G SVIVG01037119001) derived from phytozome v7.0 (chr-ID chr1 8; pos 28939937 to 28940476 reverse strand)
tggtttagagaaactgacacaagaggtgagtttcaagcttgccaaaatgttattgctttctctcatctaaaaacatctttctatatcaagcttttccaatgatttaggagtatttaaccctatcttggttcttggaaagttcaaaaaaaaaaaaaaaataggggaagaaaaaagaaaagaaaaatgaagtacaaaaaaaaaagaaggatttgtaggtaataaattattttatatgctttttcaaataaatttcacctactttgcccatccatataaagaataaataattaaaaatatctaaacttctaactaatttgaattatatttgttttttcttttttcatatttttcatgaaaaactaaatatgagaaaatcattttctttaaagaaatatttttctttagcattgttttccctttcagaactttccaaaaatcaaacatagccttgaatatttatgcaagcttccatcaaacatcatttggataggtatatcggtgaatcacttgatgatggcaggtacgtcaaactatcctttt

SEQ ID NO: 100181 - DNA, 787 bp, Vitis vinifera
  Intron number 2 from transcript GSVIVT01032868001 (locus G SVIVG01032868001) derived from phytozome v7.0 (chr-ID chr1 3; pos 110717 to 111503 reverse strand)
gacttattagcagctgacaaggcaattttagtggggtatgtacgtttcttatcttaaattgttgttttgttgattggatttttctcatctgagagcagactattaatgccatcagcctttttagataggaatgcggatttcagtacctcttatagcagagagccggagcagtaaaaatcttttggcagttcccacttaggagatcttattagtagaagatagcctcataaaactttcaaatttaagcccaacatttgacttgcaatttttcctcattccaatttctgaagcattctctggatggatgattagtaaaatttggttaggccctttgaattttgggtgcagcttgcatttgcaaattgtttgtttgatcatccttgaactctaaataatgggtaaatcagattgtgtcaccaaaacacatggtcttgcttaagtctttagatttatcagagcttccattcagtgttttggaaaaagggagaaaaatggaatggttgtgatgctcattggttgaaggaaaggaaaatagcaacataagtgccctactcctgtcattgtgcaatatggttggcattccttgtaaaggaccctttttacttattttattcccattaaaattaaactgtacttggtgccttttgatgatcttaaaatcaagttagtggggagttttcctcctcttctcctatgtctctttctgaaagcagaaatctgtcttaactgttgggaaaaaaatgagatgccaggcattcagctggttctattgtagcagttaattcat

SEQ ID NO: 100182 - DNA, 619 bp, Vitis vinifera
  Intron number 1 from transcript GSVIVT01033433001 (locus G SVIVG01033433001) derived from phytozome v7.0 (chr-ID chr8 ; pos 20723694 to 20724312 reverse strand)
gtatcacaagtttgattacaaacttgtgataccatatattttcaattgcgtttgccgggagtcgaacccgggtctattgcttggaaggcaattatcctaaccgttggactacaaacgcttgatgctttgggataaattatatttctatctaaactgaagaattagagttgctctgctcccaaaatagatactctctgccacaccctttacttcccgcaaccttctaaaaaggaaaagaaagaaaaggaaattatactaatttatccaaaacccactaatcaaacaacgcaacaaaagggaactccgccgtcttagccgttattggtcaagagcgtgtgtgagtaggggcggcaaaaagagagccttttctcacaaagacatcccccttcaaaccaaaaaaaatgattttttttttttaacctaactctcatctcaaaaccacccccaccctctataaaaccaacccaaacccaatccccatatctttaccttatactcacacaccttggttttgtttgtttactggccttttttcttcctctctctctttctttcttttttgtttaggaagtgtttagttaaagctccaacacacccccttcgccatttccacctgcac

SEQ ID NO: 100183 - DNA, 792 bp, Vitis vinifera
  Intron number 1 from transcript GSVIVT01035967001 (locus G SVIVG01035967001) derived from phytozome v7.0 (chr-ID chr4 ; pos 6606629 to 6607420 reverse strand)
ccaccttcctcctgtctctggcgttctctctactggtaagttttcttttatttcgatatttgttgtttgggtactgggaaaatgtgtggaagttggaaaagcgaaagaaaggatttcattcttttttctttccttctgttcggtttgctcagcaattaaaggagatggggtttgtgtctgtgtggtttttattttttattccttttatttttttggtttacatcagtttggttgctgagaaagtgtaggaaatgagatgaatactttaggtattgggtttttcattgtttattagtacaattattaggctctataggagggagtgtttcataaaattgaaacataatagcatgcaatgtaaatgtttagaattttcttttcttctattttccttaggtttcttagaagttaatgggaaggtttgacttctttgtatgaactaaataaggcatatctgtgaattgcttttcctaaatttcctcttttctttatgtttggagactgggaatatagggaagtgaaatgaaagtaagctttgaatcttaatattgattgttgatcggggaacaagagcacaaaattgcttcattggagtttgatacaaccatttggcttaagttgagctaattttttgaaatcaaaacagtgtataacatgaagtgtaaatgttttattttcttttatttccttaattttcttggctaccaaatagtgtttctgtttcttatctttcaattaaactgactagaatttttgtgactttctttgtcaaattcaaactatgattagctg

SEQ ID NO: 100184 - DNA, 818 bp, Vitis vinifera
  Intron number 1 from transcript GSVIVT01033976001 (locus G SVIVG01033976001) derived from phytozome v7.0 (chr-ID chr8 ; pos 16158614 to 16159431)
tccatcccatttcttcgtcgtctccagaaccccaggtatagttgcttttctcatctttattgttttttttttcttcttcttcttcttttactttattgtggtttgtcggaaatcaaaagcggcggtggattcttgatatgttcttttttttttttttccttttaccctacatttgtgggattttcatggcatctttttgagcaatctttcttgattatatgaacggcatcctggcagcacacttttacttcctcctcccatccactcagaatcaatgtttccttggatcaaacattatgaattcaactttagcccattaaattctgggaatcatgcatttctcactttatttcttcccatatatttacacaattaagagcatgaacttctgtaaaaactcattattttgttttccttgaactgcaaatttttttttctttgttttctaggcaaaataaaagtaaatgttgtttgaaataggaatcttacaatctttgtttgtaaaagatcaaaagttaatcatctttatggacatatgaatagagaccttctcgttctgggtttattcctgctcttgacaatattcttttagatatgttagcaaaaggggatatatctaagggattactgagtcacgaaagatttaacacaaggcaagaaaacatatatgcagtatttcaggatttcagagttgggaaatagtccaaggcatgtttgaagatcaatatctgtatatagttatatcgcatttggttttgattttgtttaacaacctcaatgtaggccgaattggaaactgcagaaactaagattcaaaa

SEQ ID NO: 100185 - DNA, 633 bp, Vitis vinifera
  Intron number 2 from transcript GSVIVT01035385001 (locus G SVIVG01035385001) derived from phytozome v7.0 (chr-ID chr4 ; pos 922904 to 923536 reverse strand)
acttctccagcttcattcgccagctcaacacatatgtaagtgctctgaatttgggcttctttcttcttaattttctgtgatcttacctgggttgcttcggttttgctctgggaattggtttttgtattctgggttcgttgcagtttgtatgaatctgatcatgctggttatcaatgtagggttctatcaaatttctgttgcatattttttgtgggtttttttaattctactgttctgagtggttttcaccaaacttgggttgcagctttgttgaaactttcaattgccttcagctttatggattcatggaatttgaatctgggagtttgtatttttagggtttacatgattattttcttgtgggttttgataaatattgtcattctgatcctgtgttgctgttttgtaaggtcgaatctgaattctgtccatccaggattctgtctgataatcttctgaatattttctaaactattgtaatttcatgatgtttgcactagtcttgtgttgattctagtttatattgagttaatttgattttttttttataagtttcaatctttactgctttgattctgatgggctttgatgcttgcaatggatgcagggttttagaaaagtcgatccagatcg

SEQ ID NO: 100186 - DNA, 501 bp, Vitis vinifera
  Intron number 1 from transcript GSVIVT01030895001 (locus G SVIVG01030895001) derived from phytozome v7.0 (chr-ID chr1 4; pos 18508448 to 18508948 reverse strand)
cccccattcctctaccaagttctgcactttgcgatgtaagtcatcgtatttctctattttcgtctctgttttccgattatcatttgtctctgtttggaagcctagaaaattgtcgggaaagagggaaagaaaaatgaagctattaattttctgtttttatgttgtttggattctaaaaaaagatgcgattatgcaccataacatctgagatttgggattggtttggttctcggagaggggtggatgaatccatattttgagtcattttcgagcatttttctttgctctgtttgattgtccagaaaattgagaaataaaaagatttttgagttgttacatgtattgatgatccttgcattgtaagttctgtttttttttggaacctaaaacagtggaaaatagaaaggtttcaatttttgttctttttttgttttgtttttttttttcccctctggtttctcagctgtatggaatgataattatatatttgaacttgttcag

SEQ ID NO: 100187 - DNA, 936 bp, Vitis vinifera
  Intron number 1 from transcript GSVIVT01031409001 (locus G SVIVG01031409001) derived from phytozome v7.0 (chr-ID chr6 ; pos 18992280 to 18993215)
ttgcaggctcgttgatagcagctagtccaattcaagtaaggacttgatttcctataaccacatgaatgtccttgctaaatgccctgtcttactgttttaaattacatctgttgaactcttactagtccaattcacttagaaaagctaccaaagtgaggaagtcagcctcacttccatctataagactaaaaaaataaaaagtaccgtctcagaaatgattttgaaggaccattattggttttttcatttatcccatgcatagaggaatatggtgtttggttgagctgctgactgtaactgtacattataaacatcagtgcagtacagcaaatattatattttcagcatgagaatcaggtaatttttcaggtatggtttgaatttaagctaagggcaagacttaaaagcataaaaagtttgatccaagtgtgatagcatattctagtatgacatcgagcaatctctgttcatattattcctgaaacaagcttgtgtgacctcttcttggagtcatggagagatgtatgtgcttttggagaaatacttttctcttaaagttacatgccaaattgctgtagtttcaacttcatcctttttgttaagacgtctcaatataattgtagttgccattacataaacatccttcagatgcactgcacctgttacttggtctctgctgaatttttgatgctgttactcattggttaagttacatccaagtttatgtggcacttggagtggcaacttgaattggccattgttactggcataatttggcatatagtttgctctagcaatctatctggtcagggattgcaaagacacttgttcaacaggttccaattgctcttgtactgatatctattgtaggactcatgttgtgctcttttttatttaccagcttgtgtgtgggggcttagagaagaaacagacaca

SEQ ID NO: 100188 - DNA, 399 bp, Vitis vinifera
  Intron number 1 from transcript GSVIVT01037738001 (locus G SVIVG01037738001) derived from phytozome v7.0 (chr-ID chr1 9; pos 7389952 to 7390350 reverse strand)
attggaagcggattacaggtggaatttgctttcaactgaaattttgaatcatatcctgtccatatttggtgattgggtctgttattccgtgcccgttataatgaaaaaaatttgtcgattgtttgcgtttcattttcttgttagattgtgagtgaaaccccctttctagaaattgatgtttttactggaagccactttgttatttccaactctttgggagattgtctgatgtgtttatggtcccaacgaaggatttaagttttttttttcgttctttgattggagttaggctctggtgttttttctgtatgattgttcgtgaaattattcccttcttagcttctacagattactaatgttaatgttgcttgccgtttgatattcagggtgttgatttct

SEQ ID NO: 100189 - DNA, 426 bp, Vitis vinifera
  Intron number 1 from transcript GSVIVT01032529001 (locus G SVIVG01032529001) derived from phytozome v7.0 (chr-ID chr1 4; pos 28113179 to 28113604)
caaggctcccgccaagcgtctcgtgcttttggttggtacggtctctagagcaccatctattcgctgatttgatccagctaatttcacgagttattggcattggatgtaaagtgggtccgtttagttttgtattgctggttgtttatttgatagtagggactaattggttgcttcgagcattctaaaagatctttatttatttatttattttttgggtattttttgcattgaatcattgtggtttattaaaactgaacacctggttctgtgatttccactgcaaccactttagcatttcttcgttggctgaaatccgataggttctttgttagaaaattgaactactttttctgtatattattgttgatggaatgttttcaaccctgagtttcttaaaattttgaaattggaatgtaaatgcagcgg

SEQ ID NO: 100190 - DNA, 1033 bp, Vitis vinifera
  Intron number 1 from transcript GSVIVT01038616001 (locus G SVIVG01038616001) derived from phytozome v7.0 (chr-ID chr1 6; pos 21451282 to 21452314)
gttttgtctggaggttctctgatccattcattgaggtacctgaccagtttgttttgatttttggtttttttaaagatctgttcgggagctgagaaagtgctggaaaggaaaggaaaattgaattttgagtctggtgtgtttgatccaactatttttggctttgttgtggtggttatgcgtacttacttctggaaattaaacgaggaaaagcatatgatggaaatgtaactttcttctgttttctgcggttttctcacttgccaaacactctgttgatggtaaggtagaaatgagaaataaaaatcaaatgttaacttctattattaaaaaataaataaaaatcggggtaggattttttttttctttttttttttttttggggggggtggttttttgaagaaaggcgacggaagtagatgagcttacctgacaagtttgttttgatttttggttttttgaaagataagttcgggagctgagaaagtgctggaaaggaaaggaaaattgaattttgagtctggtgtgtttgatccaactatttttggctttgttgtggtggttatgcgtacttacttttggaaattgaacgaggaaaagcatatggtggaaacgtaactttctgcggttttctcacttgccaaacactctgttgatgctaggtagaaatgagaaataaaaatcaaatgttaacttctattattaaaaaataaataaaaatcggggtagcttttttttttttttttttttgggtttttgaagtaaggcgtctgaagtagatgagctgatatttgtttttttacttgaattctgagtaggtctgaatttgtttgaaatctaaacggaaattgatgcaaaagtattattcaaatttcagatatgattcaaatttgaaaatttttctatagttttgtgcagctttctcagtaatcaaacggaggctcaattttgatcaagtgttatatgacatgggaaatgatcatttgatgtttgaatctcaggaaattagttgaagcaccatacatcgattcaatag

SEQ ID NO: 100191 - DNA, 670 bp, Vitis vinifera
  Intron number 1 from transcript GSVIVT01033882001 (locus G SVIVG01033882001) derived from phytozome v7.0 (chr-ID chr8 ; pos 17045076 to 17045745)
ccgatattcccagattcgaatccttgcttttccaggtatataattccacggtttctaccctacattctctcactcatttactgatataaaatgccattttcttttaaaattaatctcaactatttataatcatacatattttgtatactatttgaattaatactagtaccaccatcaacatagctggaatagctcagttggctagagcgtgtggctgttaaccacaaggtcagaggttcaagccctctttctagcgttaatttttagtctactggacctacactaggacccagtgtttggaactacattaagaccgagcgtcatcctcggcaccaacacttaaccttcctatgttcaactaggctcactgcccttattagattaagacttcttagtatttttttgtcgaatctgtgtcttcaacaatcagaattggacaaaaaacaaaaccaacaaatgacatcatgataaatacattgaacacagtttcttttgataacatctaaaaggaaaacaagaaacaagataaacttgatcgaagcagcagcttccctccagcacattccattgaagtttagttttattttaatatttttcctttgtgttgatcctttttctcattggtattgtaacagtgggcaaacagtctttgccaaggagctaatctgcc

SEQ ID NO: 100192 - DNA, 872 bp, Vitis vinifera
  Intron number 2 from transcript GSVIVT01033882001 (locus G SVIVG01033882001) derived from phytozome v7.0 (chr-ID chr8 ; pos 17045730 to 17046601)
aaggagctaatctgccgcttcctgtgcctctcaaggtcggtcactttgtaccaactctttaattataaacaaatgatttcgatgctactgatacaagaagcaccattttcaaagattctactgtcaagacacttaaaatgaacgagacttgcctagatgaatcagcccaaaggtcaaaagccaacaattgatgcatcatagctagaatctgagagcatctctgaagaagttttcttttccttcatctattaaaggaccataatacaatcattatagaatttatacatatgtataatcttaggtgggagcaattacttttgttcctcatctacatatgtatatagtaatgaccttattctgagaagcagtataaatcctacaattcacggctagcctgggtgaccattgggaaacgacacaagtttctggataaactggctagtgataggttagaaaagaaaagagaaattcatggctgctagtcattttcactttcagtatcattaactcatcatgattgtcctttactcatggcattgaattcatttttttgatatgccatggatgcagtagaatccatgcttaacatactattggtttcaaggactgatgtgtcatagctctgtaatataaaaaattctgagggaatcatcctaatttctagctgctaattgtcactggatctgtcttgatcggagggattcatacaaggcacagttttcttgttactaacgttatttggtgtagacaggaccagtgttattgtggacgacaatgctagctgattacactctcctgattggtcttaatggaaggttctgaattttgattgaacaggtggacagaatacaaggtggagctagattgggctt

SEQ ID NO: 100193 - DNA, 613 bp, Vitis vinifera
  Intron number 1 from transcript GSVIVT01032724001 (locus G SVIVG01032724001) derived from phytozome v7.0 (chr-ID chr1 3; pos 1250473 to 1251085)
cctcggttgtctgattatttatcagattattatcggtaagcgtcatattttttacgaattatttagctaataaactccattgtattacgcgaaacaccaaaactagattagattcacgaactgacggccgatattgagctatttccgatggcgcctgagcaaaaatatgagatttatgaaccgttggggagttgctagctgttgatttgatttaaagtcctccaagtttcaattctatattggtaaatatgcattgatttgacctgcttttgagtcaactcgagtccgtaatctcatgagcctcattagtataatagatgttccagaatcacgttgattcattttggaggttcttgaaacgacaaaagtatatagaagcgggatttgtagttagtatgagaatattttaacattcatttggatttcgatttgtcaataaatgcacttgatttcaaaaaaattacatccatggaagaatagaatggagagcttgatgaaaaattaatttttattttttattttttattttttatatttgttaatgttctttaaaatgatagctttgtagtgtctctcaggggacgtactttcaggaaatcagcctgaaggaaca

SEQ ID NO: 100194 - DNA, 765 bp, Vitis vinifera
  Intron number 2 from transcript GSVIVT01036121001 (locus G SVIVG01036121001) derived from phytozome v7.0 (chr-ID chr6 ; pos 20420978 to 20421742 reverse strand)
gcgagtgagtactcttgtcgctttcttccagctttaattttatttttcttgaataattgtagagaacacatctagcttttggtatctccatgaaaatgaaatttgatggtcttgtaatgtagaaatttgattctcaaaaatgaaggaaaataaccttgtttactttctgctcaaattagcttatcttagaaatcaattgggccttcatcctcatttacctggtatactgcattgctttggcatgccagcggatcataattgcaggacaacattttcaatggcttttatcacttctttcctcaatctagtttccctatatttgtaaatggactaggatttttggtaggtatgggttctaatgcttatatagagcagatgatcttgggtctaactccatcgttgtataaaataaaataaaatgacactgaaaaggtcggttgtctacatttatagagaagatgttgtggtgtttcttgaaaacaatgggcacctgaagaatattttgttatctcttctgcaagttataaggatcttacaccactttttttttttttttttgtcttgttgaaggggggaacccttgatttaggtgacctaattggagattgacttgtactgcaaccgttcaagtcaaatatcttccaaacatcatgttcttccaatgttaaaaaattcagtctggataattttcttgatacttgtggaattaacgttgtgcacttacttgcaggccatatttgaaagatttgatagagatagaagtgg

SEQ ID NO: 100195 - DNA, 716 bp, Vitis vinifera
  Intron number 1 from transcript GSVIVT01038246001 (locus G SVIVG01038246001) derived from phytozome v7.0 (chr-ID chr5 ; pos 24592833 to 24593548 reverse strand)
aaaaaggatccatttgaagggtgaacgaacaactcaagtgtcaaactactcttttattttggttaaataatgaaaaatattaaagaaaatcaaggaaaattaagagtgcgtttgatagttgttttataaaatattttcaatttttttaatattttaaaatttttattttttaagtattagaaatacgataaatacttctttgaattattgttaaacgcactctaaaacaggttagaaattaatgtattttcaattaaaaactatattaattttgttatttttttataaatcaatttaaacagtaaaattcataaatttttagaatttgaaaccttatactctcgtaataacccgattgataccaacaatgtgtctcatatgcctatttcttggaattatttttttctaaatatgctcaagtaataatatttattaattaaaaatattattactattttgattttcaatctcctattattttatgatgtaaagaagaaacatataaataaagaagaaaaaatttaaaaatactttgtataccataaattaggaatataatcgaatttttatggttgaatcaacatttacatatatatattctataaaaaataagattatatttatttaccaataaaatataaaaaaaattaagaaaaagtatcctttaaagcccgatttatccctttttgggtttgttgataggcccaagagagcgt

SEQ ID NO: 100196 - DNA, 828 bp, Vitis vinifera
  Intron number 2 from transcript GSVIVT01035382001 (locus G SVIVG01035382001) derived from phytozome v7.0 (chr-ID chr4 ; pos 912582 to 913409)
caatccggatccagactgcttttcgtggcttcttggtaaatgggtttctttgttgtttgttcatttgttcgtttatttttattttttattttttgtctctgtatggtttgctgagaaaatgatggaaaataatagagaaacaccaaaatttggaactctggtgttttacttcatggaatctgaggcgaaaaaactcagtttcaactcgatctaccacgcatacctcattgtcgcattataatgttgagattttgacttttggaaaccagataaatggaacacaaaaggttcaacatgttattttcctttattttcctcctttttctcagctaaaaaatggagggaattctctgttaatgggttaatagatctatgcagatggatagttagaaacttaactgcaactgctaaatcagtaagggttctaagccccatcaaccttcaaaattttcaccagaaatagttagagtacatttttgaaaactagtaacccatagatcttaatgtatgagttttagatcttcactaaaaattgctctctaggtatatactttgaaaatcctagagtcacatatacaagtttcagctctttgtttgaagtttatgcagtcatgagataacactttatctacaagcaacaatttaacactaactgagaaatcagaaattccttgaagtttgaagtttaagctcctgttgattgcttattgtgttcttcgtctgattaccatttgatttgaaactggttgttattgctttaacttgatttgagaatttttgaatttaaatacaggcaagaagggctttgagggccttgaagggagtggt

SEQ ID NO: 100197 - DNA, 422 bp, Vitis vinifera
  Intron number 1 from transcript GSVIVT01033744001 (locus G SVIVG01033744001) derived from phytozome v7.0 (chr-ID chr8 ; pos 18187656 to 18188077)
cttcctctacaactataactacgacccatatccaggtaaagctccttatactcaccgttctttgattttgacgtctttcatgccctacttttaaagaagaataatttctgattaaaatccttgtgaacttttcctacgcctttattttaatcaggctctgttgctacatccttcgcctataaatgacttcttgttcccaacaattttatcttataaataattcaacagagcagctgctttcttgaaagagtcaagttgtactttgaggtggagaaggtgctatctattcagctaaatctacagtgtttaactattaagcaccactgtggaatccttgcataatcactgtagtttatcataatcagctaggcatactttctagaaacagcttgtgaacacacaccatttgcttagtttcaggg

SEQ ID NO: 100198 - DNA, 570 bp, Vitis vinifera
  Intron number 1 from transcript GSVIVT01032632001 (locus G SVIVG01032632001) derived from phytozome v7.0 (chr-ID chr1 3; pos 2036352 to 2036921 reverse strand)
cctcaggtttgctccaattctatctctctggtcgagtactccctcagatgtctgttatttgtttatgtatttacttattatttttacatgtttggtcagcgagaaaacggaggaaagaataggaaatccagaggatgagattgtaaaaaaggagagaaattaatgctccatttggttggaaggaaagaaatcgagtatttgtgttgtaggtttcattaggaaacctgcaccttaatcgcgtctctcagtggaacaatctctctcttaagaggtcgtaactacttaaaagatgagattcaaaaattttattctcctctctttctcagcaaccaaacagaggcggaaatcctgaagtttggaatttccagtatctggaaaacaggaagaaaaaaccgagcataatccaacagtttgtttggttttctcaatgcacagatgtattttaattggttcaaattgtagcagctgattgtatttcctttaaattttcactaatgttgtgatgaagttcagttggttttgttgttgctttatggcgtcaggactcacattgtgtagacaaggactgtg

SEQ ID NO: 100199 - DNA, 791 bp, Vitis vinifera
  Intron number 1 from transcript GSVIVT01036556001 (locus G SVIVG01036556001) derived from phytozome v7.0 (chr-ID chr1 4; pos 23414676 to 23415466)
acagttgtgggggcttccctccacgtgtcctcccccaatcaaaaacccttggtctgtccaaggtaaacaaatgatcagtttaaatccatccatcagaaccaaaataaattgtctagcgcaagaggaaagagatttccttttttctagatgctagacggaatggatagaccaagttaattgagatttttaaacggattaacgaacacaaccggagacttcaagcattgaatagatgaacaatcacatctagtgcctgagcaacggcctagatgacatatacgcttgaaagtcaatgtctactaattgctacgtgcaatatgtggcattgacaaacgtaaatgcatagtcaactacatggtccgaaactcttactcaacaaccagcaaatgacactagtcggtggattttgtttggtataattgcccaacccgtgcagagatgatggcgttgatcctcttgctaaggtttgatttccgccttgataacaatcatcatcacaaaaaaggcatgaatgcaccatcaacgctatggtgaaggtgtcatccgctctataaaaccctagaaaaagtatgaaaaaggtacacacgtatagagtcatttgaaagaattagactcatccttattcttttctaactcaagctttaaagggggcatgctcgaaccacctatccagacatccttttatataaggaagaagccatttagccccagagaaactagacgaactcaacctagttggcactgcaccaacaaaagtgatcataataccttatacatttaatcttcccaca

SEQ ID NO: 100200 - DNA, 591 bp, Vitis vinifera
  Intron number 2 from transcript GSVIVT01035444001 (locus G SVIVG01035444001) derived from phytozome v7.0 (chr-ID chr4 ; pos 1307865 to 1308455)
ctgttgaaaagggtgctcagcttgttctcctgcccgtgagtttttaacaatgccttgtgtcattatgtataggggattcatgattcacacactaatacatgcgagcaatctagtgaattttttgtagtagaataaagaattgataatgattttgattccatggactttatcgaagattggagattatactctcaacctcctctatttcaattattttttcctctgtttgcttggcattttgggagcacattttcttgctttctgagcgaaatgtgattaagcaagagaaagccttcgaaatgtttgtggaaaacatggctagtttcctaacatgctgtttggttgcttggaaaaccaaaagagataagaaaatcaaatatttaacgttattctgatcctaagaaaaaaacctagccaagtgggagtggcacccatattgtctggaaagtggagatttactctcaaggaataggtggttattgtgaatttgtgataaaagctacctcccactctttgtgttgacctaggttgtaatatgatgatatctatggcttgaatttgtaatatttccttttacatatttcaggaaat

SEQ ID NO: 100201 - DNA, 325 bp, Vitis vinifera
  Intron number 3 from transcript GSVIVT01033338001 (locus G SVIVG01033338001) derived from phytozome v7.0 (chr-ID chr8 ; pos 21368524 to 21368848)
gcctttcttgttctcaacaagactgagaaaaagaagtaagatgattaataccctaccatgtttgtctcggttttgttcttttctctacctcggtggatctcagaattatgtgaatttttaatgagatttgactacccatcttctttttctatcctttcctgtacagtccattccttagatgatgatttttcaaggaacaatggaggaaaatcaaaattctgtgttcaatcacagaaattatcttcaataaaaacacaatcgttttctcaaagctgtaaattcagattccactttgtttgattgtgtgtttttctgtttaatagat

SEQ ID NO: 100202 - DNA, 675 bp, Vitis vinifera
  Intron number 3 from transcript GSVIVT01037516001 (locus G SVIVG01037516001) derived from phytozome v7.0 (chr-ID chr6 ; pos 12399840 to 12400514)
aaggtttgttttgaaaaatgttagagaacttgttcttcctttttttttttttggtaattatgtaagcattttggctgctgtgtgattattttatataatttgggttctactgggagatattttctgcttttggcagtaaattgaatgaccgaattgtgacttttctgggtcaaaatttggtctgtctactgatagatttgttttttagttgactgtattctttattcaaatgtttgttctcacttacatgttgcatatctaatgagcacatatactcgtgaatatgaccaggaggttctatcctaaagaatacctatttgtaaggcctgttacagatggttgttggatgtcagaaacatttcatgctttaggaatttagctgaaactattttcacagctatgatggtccttggaaaggagaatagaaaattgctctagccacccatgaagtaggatggtgcattcgctttaaaacagtagtagatgattgatgtgcttttatcatatgttgcttctgccagtatgcactttcttcttcttcttctatcgttgtagcatcccattgagagaactagaaggtagatttgtgactggtttttatttggttggatttttactgcacttcttgatttcattgtaggggcaagattgttttatttgcaaaaaaggaggcca

SEQ ID NO: 100203 - DNA, 703 bp, Vitis vinifera
  Intron number 1 from transcript GSVIVT01033552001 (locus G SVIVG01033552001) derived from phytozome v7.0 (chr-ID chr8 ; pos 19813916 to 19814618)
aacaagaagggcactcctcaaggctctgtcaaagtgtaagtctttttttttctttgctatcctattcgaatgtgggaagtgtatatctgttggatcattaattttgtttgtggagccttgaatttagggtgacactgttttgttttattttgaactacgtgtgtgttgtgctatcaatttgcatctcctttcttaccacttccttatttcgtttatgtaaaaccgatgtttattcaaattcatgaattgagtatgtaccagatgctgaatcgtatcttaattgttcaatgtatgtggtgactgcttttattttattctacttaagagttgatatttattaaaatccgtgttagattctaactttttttcttcttaacgctcaatgcctagaggttttctttctcctctctttctctctttttttgtcaattttccttttttcaaattcatgaactgggaatgtggcttagtccatgctgtttctttttttattaatcgtgatttcattcaaattaaattgggcatttgttagaccgggcgatcttgtcataggcaaatgccaaattccaaatagaagctaagagcttgatatgtatctaatatttgcctcctttcttttttatatcaatgctttatcttgaattactggtattatttctgtcttgcaggcctgaatcactgggtattgttgttgggattgtct

SEQ ID NO: 100204 - DNA, 739 bp, Vitis vinifera
  Intron number 2 from transcript GSVIVT01032716001 (locus G SVIVG01032716001) derived from phytozome v7.0 (chr-ID chr1 3; pos 1298342 to 1299080)
tcctggtaaatcatgacctctccactaagcatctactttaatctctgtattaaacaaagtgtcatctgcaactaggccataaattgaaggtgaatattttataggattcgattttcccacactgcctttagcttccaatatatgtaaacccacttgttaattaggaccacatttacatcacctactctcgaaggccaataaatttgattgtttctgattgtgggaccaatggccagtttgatatttgttttctcttcttttttgttcttctctttaataggacgtgcaacttggcctcaccagaagcttagggattgtattaggcccacatatttgttatcacatctactttaaatttaataccgagaaaaatatgttttgatgctcttaagtgtatggacaacgaacttcaactgattgaagacgacacgaatttttgtagccgttgataaaaacaagaagcaagataaattgaaatattaagagaaaaagagatttcatatcatgttaaaggttgatgaatgatttcttccaattttctacaaagaagaatatattcttaagcatttttttctgctttgttttacttgtaaggtttaacttgcatgtacttctatgatgaacaatgatgcccagtagaagaatttctttcctactagctttactttttgagtttttttcaagttctaatttctgggcatttcccaagaaactcacttaaatgtcatctcaacagggg

SEQ ID NO: 100205 - DNA, 468 bp, Vitis vinifera
  Intron number 3 from transcript GSVIVT01038714001 (locus G SVIVG01038714001) derived from phytozome v7.0 (chr-ID chr1 6; pos 20677398 to 20677865 reverse strand)
acttcttcaaggaggtctgttaaccttgttttccgatcctttttggcacactttacacggctgcatctaattaacttgtttttcgtccactttttgtttgtggcttgtgtatacagttaaagtatctgtttataagccttttacctttttatttatttgaatttttatcttttggatatgtttctgttttcgcacatgaagaaaagagttttttatttcaaaaaggaaaattgcatgttaaacaagtgcatgcaaattcagtttgtgcagtgttgatcctatttctatggattttttattttttatttttaattttttaaattagtttgaaaacattttaacttagaaatctatggctttctgatcagctcataaatatggttcaggttttgttggagttggctcagtccatttctagaaccttggtactgatttattgttgggttgcctttgattaggttgcacagg

SEQ ID NO: 100206 - DNA, 363 bp, Vitis vinifera
  Intron number 2 from transcript GSVIVT01038714001 (locus G SVIVG01038714001) derived from phytozome v7.0 (chr-ID chr1 6; pos 20677965 to 20678327 reverse strand)
tcgcagaattatcgggtgaaagcagccgaaaaacggtagggatcgagtccggaatgtttgtttttctggaaagagatatttatttccctgtgaaaatgaaggaaagggggagaaattgaattttgaatatggtttaaattaactgaagcatgagaaaacaaaggaaaggaagaaattttcatttcaaaactaggggaagataagatccaaagttttatttttttcctttccatttcatttctttctcacttttctcagcacccaaaatcagattcaaattgagtacagtaattttgttacataatattttgggtataaaaaaaagatgtatgacacatgtgatatttgggctgtaggtgacgg

SEQ ID NO: 100207 - DNA, 655 bp, Vitis vinifera
  Intron number 1 from transcript GSVIVT01034407001 (locus G SVIVG01034407001) derived from phytozome v7.0 (chr-ID chr1 0; pos 16757343 to 16757997 reverse strand)
catagtgagttttccttttatgaccactttaatcaactcttgatttcataggttgatctttctttaggggcttttccttttccttgcacccaaagtgtctatgaatttcattctcctgtgaacccaagttctcaagagtttcttgtccagaagaggtctggttgttcccacaatttccgtgaattccatcctgagttgtatgatccccaatggctgggcaattcctgagaagtactgactgaattccagggaatagaagaacaaagaggctgtttgatttggtggttagatgcaatcttcctttatgaaaccattaaaatatcttttgttttagcttgtaatttggatgacgtaaagccttctcatttccctttttcttatagtattagcatcagaaagctacaatgccagctcaaaaggcttcatcttcacatactctgagtcatcttccctttttctcatttccctttttattatgtcccaccatatttaaccagatacacctttcttttgatctcttggaaaattgaacaaaagaagaataggtcctcgcatagccttacaaaaaagaccgaacataccccgtcatctcagactattttttattagaatttattttttcctgaagctcaggtctgtgcctttattcttgttt

SEQ ID NO: 100208 - DNA, 817 bp, Vitis vinifera
  Intron number 3 from transcript GSVIVT01036611001 (locus G SVIVG01036611001) derived from phytozome v7.0 (chr-ID chr1 3; pos 19219498 to 19220314 reverse strand)
ctctccaggtagtgcaagaggccataaaacctcaggtacttgccccagatccttctctttaaaatgatttttttccccctttcatgtttctggcgatccgcacatatggatggtttgcttctttgttcaacttgaatgtaaaatttgaaattctttatgcccgtacttttgaactttactagacattcctggtaaccttggtttaaagtccagtcctgtgaatgactgaaattttttttcagaaaagttggagcttaaaccttgggtttatagcattgacatgctaaataacttcattcattagagggtgtcatggtagcttgctgacaaggtttcggggaggtttgatgggattgagtccttcctcaatatgggtttagggggatcataattctgaaaagagccccattctggaccccatagtggcctttggaagaaaccccaattacattgttcctctttggcttggtagtcaaagttctccacttctatgtcagagattgatcgtcagatggatttttctttgatagtcaaataagaatatatatatatatatatatatatatatatactggaagaaaaactatggcagttacatttggtagtattaatttcttggcattttagtatgtgcaaatcttccatttttgggtgtatgatgatatgcattccgactaaaacaatgactacaccaaaccagtacaacatgcttagtttctttattttgcatgttccttttatggagtcatcttgtttagtttgatctgaccaggtgaattgattttgtcttgacagaagcaaacaaaactagctcaag

SEQ ID NO: 100209 - DNA, 225 bp, Vitis vinifera
  Intron number 2 from transcript GSVIVT01036611001 (locus G SVIVG01036611001) derived from phytozome v7.0 (chr-ID chr1 3; pos 19220329 to 19220553 reverse strand)
taagtcctttcaatataaactgttttattttggtggttctctttggtggcattttgtagcttttgtgtcttgctgatttacttttgatatgccattgtgataatgtcgtggtttattttcttttattaatttatttccctttggtttttctgtttatgtaatcgtgttagcatttgtgtattcttctcaggaaatattcaagcaggccttactgaaacctgggcc

SEQ ID NO: 100210 - DNA, 438 bp, Vitis vinifera
  Intron number 1 from transcript GSVIVT01036611001 (locus G SVIVG01036611001) derived from phytozome v7.0 (chr-ID chr1 3; pos 19220587 to 19221024 reverse strand)
acccgcgccggagaaaaggtattgtcatcatttctcttctctttctttactcaaattttcctgccccggttggctgctcagaaaccctaggaaaacgaaagacaagataagaacaagaaagattaagtcttgtagcttctcgtcttcatttcaacttccattgaatgctgtgcaattcctctagtgatttgatttttaactagtaaacagaagagcaaaaaatgtaattttatttattttttcccttttcttttccgcggtttctcagtaacagagggttaaggggttttttttttttccttcgacattgttgttgagtttgatttcttgttatattttgattgaaaatgataccagataggtcgaattttttctcatgacatttttagctttgaaaattcagggctctggaattttggtcgtctgatagttggtgat

SEQ ID NO: 100211 - DNA, 867 bp, Vitis vinifera
  Intron number 2 from transcript GSVIVT01033680001 (locus G SVIVG01033680001) derived from phytozome v7.0 (chr-ID chr8 ; pos 18738335 to 18739201 reverse strand)
ttatctggtcaagctccttctcatcggcgatagcggtaagtctctgaatcaaaattaaggcccggtgtgtaaaactgacgtgtaattctcaattgataagttagggttttgttcttttagttatttgtttcatggtgtgtgtttgtgtgctttttctccccataattcagtttcattcgtatttgattttattctgtttcgtatttgattccactgtcttaattaagtgggactagataagtttgggaacactttctagattttcttagcttatgatgataagggtcagaattaattatcgggagaaagaggaatttgaatctcttatgcccaaatcatgaaaacataattttcaaaactttaattctttcttccttgattccttctgcaacaaagtggggcatatattgcaatccccaaaagttctaaataaatacagatggggccactacctagtgtggttgtgatgcagctcttctagcgttatgtagaacctagtctaaataacacttttgcgtgaagagcccccatgtaaacccaaacccaaaaattagctgaagctgcagtcacaacactgaagttttaggtttttagctggacattttgtgtaatgcatgcaatacccagtgtggatgcaacaagctttgatgggttaattgaatttatttaggcacgttctttacctttaggattgaatttaattgccttcggttcatatctcatctgcaccaaagctaattatttgattttggtgtgtgcctatgatactgatatatatttctggtctcctttcctctgtaatttacaatgctacttcaatttttatttgcaggggttggcaagagttgcctgttattgcgtttctca

SEQ ID NO: 100212 - DNA, 219 bp, Vitis vinifera
  Intron number 1 from transcript GSVIVT01033680001 (locus G SVIVG01033680001) derived from phytozome v7.0 (chr-ID chr8 ; pos 18739277 to 18739495 reverse strand)
actcatcagattcaggcggttccgttgcttccaaggtagcggattcctccccctaatacacgtgtgtatttaactctggtcaaataataataaactctagttatacagcgtaacaagagagaggattgtttcttctttgattctgacggctcggcttctgccttttctcttttatcaatctcagcgccggcgcgaatcatacatacaaatcacaataaa

SEQ ID NO: 100213 - DNA, 319 bp, Vitis vinifera
  Intron number 2 from transcript GSVIVT01031538001 (locus G SVIVG01031538001) derived from phytozome v7.0 (chr-ID chr6 ; pos 17369928 to 17370246 reverse strand)
agactcagaggtataataatggggaagacccataagcgattcaatttgtttgcttgctgagataaccgtagaaaacaaaggaagttcagttgtttcttcttaagtttgttgtgtgtgaagaacgcattgcctgctagtggttttgttttatataaagtttaaatcattgtttgttttatctttttctcatgttttccaagcatccaaaccgatgattaggtgattatgagtttgttttgatatgggtttttggtttggattggttcgtgatggttttgatggcattgtggcgcattgtagatccgctgcggcagcattg

SEQ ID NO: 100214 - DNA, 785 bp, Vitis vinifera
  Intron number 1 from transcript GSVIVT01037302001 (locus G SVIVG01037302001) derived from phytozome v7.0 (chr-ID chr6 ; pos 16135023 to 16135807)
ccaagaatctggtttgtgaattccttagcttcatcttctttctattatatgtttggagtaagcttagtggagtaatctctttgagttcatgggccttatctcctaatagacaaatctagagattctagttgacaaattcattttctctctcctcaaaatgaaatggtctctcacctgaccctacacctattaaacatgtaaatcagaagaaaaactttaatttctataggaacatctagaaatggattacttaaataaactacaaattagttttatttgggcttttttcatggtttatttgatctgatagggtcattccatcaatttggggtctagaaagatgacaaatatacatatcagtatcttggatacttttgaaattacgcttctcaaaatagcactcttcttgccaacttctttgtataatattgagatatctgaatattttaatttagtttttttatgacaagtggttgaatctggatccattttgttgattgctattgttgttattgcaatcttgtttccaactgctgcactgcctatcacagtggagggacactgatgtcttttttttgaaagtgtaccgttgatttattttggcaaaatgacatcagcactgtcccccatgatttggcatgtagtgacttggtgcaattgctatgatttattgtggagaagatattggtgttgtttgttgtggttttctttcttatgtctctttcaatctgattggtctggtgctgcccttttttctggacagggattggcattccaattaatag

SEQ ID NO: 100215 - DNA, 704 bp, Vitis vinifera
  Intron number 2 from transcript GSVIVT01037302001 (locus G SVIVG01037302001) derived from phytozome v7.0 (chr-ID chr6 ; pos 16135841 to 16136544)
ccctggggaagggttcattgtctgacatccgcaatgtaatccttttttctttgatgtataatgttaatgtagaaaagttttcttgagcttgaaaagttcattgaagcaaagatataaatgtggtagacagaagtgtcaggaaatctgctattttcctcacaatgtttcttcaattgtcttaaatttaatggaggacatgaccctagaaggaactgaatggcagataaaaaattcatttggcttgtcctactactgtcattttaagtctttgttattgttattcttcagtggcctcatctaatagttgctatttattttaaattttaattgaactgttgcaccattttttgcttgtgttgtctcatgcaatagtttcaattcatttctaaattcaatttcagtgttgcattacttttctttcttgaaacatatccttaagtgtaggcactaacaattgtacatttgctatattttgccctagaaaggttaatctgttagcactaatatggaatgtgggaaaatgctactactaacttttgcaaagcatgtgggaactatgcatttttatagtgggttccactacagacttaattttaatttttggcattatactatttaatgcgtattatgttgtaattgtaagtggagacaattttgattattttgcagggaataataacagctccaatattgtttgctataga

SEQ ID NO: 100216 - DNA, 761 bp, Vitis vinifera
  Intron number 1 from transcript GSVIVT01032796001 (locus G SVIVG01032796001) derived from phytozome v7.0 (chr-ID chr1 3; pos 713709 to 714469 reverse strand)
attttgtttttgctcgttggtctttttaacgccattgatgggtaacttcgaagaactcgagaaataacagaatgctattgacttatcgcccatgcaccactacagcatttttgcatttagtttgcgcttcgtgaaaagacgtgcttgccaagcttttctaagatagaacttctgaaaaaccgaaaaatgttttaaaatgtaggctattcaacaaacacatacgagattatggggatttcaaattggagttcttgatgttttattgataaaaatactctaaaaaaagttcgaaaaattgaaaatatttgaaagtcatttaagaaataatatcaaattttttttttgttgtattgaaaatttgtggaatgtattttttaaattattattatttttttaaaagagaaagttatttttattttaaaataatttcatcctatttcaagaacttgataattactaaagagaaaaaaaaaatcaggagtcggcatagccaatgttaaattaaaatatataaaaatattaaatctctctttttagtttttctatgaagtttatcaggtaaaatgcaacgtgtggcactctccttgagtccacagtacgagtgtgggtcggattcgccctctctagccacgccaccctccacgcgtcatccactctccgctgcattttctttataaaagcccttctccgggacgccctcactccatcgttgtagcaaggcgtgagttttgaacttttgggatagcttatcgttcagtgtt

SEQ ID NO: 100217 - DNA, 820 bp, Vitis vinifera
  Intron number 2 from transcript GSVIVT01034026001 (locus G SVIVG01034026001) derived from phytozome v7.0 (chr-ID chr8 ; pos 15750114 to 15750933 reverse strand)
cgccttgatcagttccccggagcctgatcctgacggtaatctaattttctattcccaattcgctatttgtagttttattttgttgaatttaagttaatggatcgtctaattttggggtttagttaaggctgatcaggcgtattgttccgtcatttatcttttaattgctcagtttaaagaagtgaagtttctgattttctggttaacagtgatgatcatctcgtcaacacccaccaaggaagttcgtcatttatgaactatatgcatcctgatatatatatatatatttttaaatatcaaaattgactttttttaataatttttttggggggaggggtgttgatgtgggggttggaagggcggggattgaaatatttggatgaatttcaccaaaaagtttcaagctgaccttcacattgttttggcttaatcagtaaaaaaaaaaaaggaagaatagaaaagggactaggtgctgaattttggaaccaggatatgcataaaagcacaacatatcttagtacatcattcaattttgaatgaacttctagctatttggaccaaggaagccatgaacaactatatgctcaaccattggtttggataggaaagtataggctagccgtgtcttactttcattgataatcgattcacttgaggtgattcatgcatcaatgttatgatgacatgctattctcaatttcaatataagcatattttgtgtgaaataaattggaacaatttatgctgaatagtagttttgcttgattattgtactcatttaaaaccataataagtcacttgttgcagagcaagctatcgt

SEQ ID NO: 100218 - DNA, 331 bp, Vitis vinifera
  Intron number 4 from transcript GSVIVT01037163001 (locus G SVIVG01037163001) derived from phytozome v7.0 (chr-ID chr1 8; pos 28424274 to 28424604 reverse strand)
tgttttcactcgatcgggttaaaattcaaaacaatgtgagttggaatgctgctttattactttagaatatttgcacattggtttcctgtagcctggtatacaattctgtttaaacagtttggctgcacctctctctctctctctctatccttaaaattgagggttttatctgaagttgataattagtatcaaattgcttgcctttgatgagaacctcaaggcctttgtatgaagattggcaccacaaatttctttgaattgggtttttgatcttgtcattattgatcacttgacttcggttttcattttcttttatgtagaattgtgttct

SEQ ID NO: 100219 - DNA, 461 bp, Vitis vinifera
  Intron number 1 from transcript GSVIVT01034886001 (locus G SVIVG01034886001) derived from phytozome v7.0 (chr-ID chr1 8; pos 15924195 to 15924655 reverse strand)
ggggtacctcttgcggtaagtggtttctcatttacgcgcctcttgaatgccatactcttttgttttattaataataactacaggattagcatttcatttactttcttttcttgtctacttcaaatcttttcagattttgctatcatgtgtgtgttgaccctcgtttttatttatttattttaaccggactactgcttcttaagaaagactgaaaactttctattgaaagtgttttagaatttgattttttttaatacgttaaatgatatctctttcttaaataacctagaaattaagaggtgtgcatatttcctgtttttttaatttcttcaccattaaattccattaattataaaaatgcaaggacttggttgaaccgtaatctatatgatcttacttaactcttgtttattaatttttttgtagatcacctacagcattccatttgctctggcttccat

SEQ ID NO: 100220 - DNA, 855 bp, Vitis vinifera
  Intron number 1 from transcript GSVIVT01033160001 (locus G SVIVG01033160001) derived from phytozome v7.0 (chr-ID chr4 ; pos 8654053 to 8654907)
ggtgcagctgcagcaggtactctcgtttcataaaacttagaatacatttagaaaacaattgcattatagagacatatagaagcaaaagtttaaacttgccctcttattttcaaacaattagatatttttattgcccttttagatgagcaattgattattaacagaacttttatcatttttaatcacaacttgccacagaaatacgagattagaaaaattgataaatggtgtaaatgttaagcgtttaactaatagatcgaattggatgaaagaaaattatattccttcttctgccatatcaccatttccaacctcatatcaaagttcaagttcttcctaattaacatggtaaaattgtagtgaagacattaaataagaaaagtttttgaggaaaaagagtcatgaagttgaaccaagattagcatgcccatcaaagatggcaaaaagtctcgttaaattgtagcacgtgttttcaactaagcaacatttcttgcctcggaagatgtttctttgttaaccacacgatgcttcaaagatgaaaaaagtcttcataaatttgatttcctccttgttttaaaagtcactctaatattgtggtcatgttccaaaaccgatgcctatgatctatgttattgagaaataatgtgatgcagaagtatataaaaaagattgataatttgatataataagaagattgatagtttgtttacaaattccagtatccatcggaccaaggggatgtattttccatttttgtaccttgtttgattgttgataatatagtagaaattgaatgaaacttcagaattattatattttaattattgtgaaattcagctctagatttattacaaa

SEQ ID NO: 100221 - DNA, 891 bp, Vitis vinifera
  Intron number 1 from transcript GSVIVT01031908001 (locus G SVIVG01031908001) derived from phytozome v7.0 (chr-ID chr3 ; pos 5306191 to 5307081)
aatcgcgagtatactagtgagttttgttaaaattgactccttaattttgctctgtagtttctgtttttttgttttattttatttttgtgattggttttagttttgcctttgtttggttgaggagaaaagccgaggaaaagaattccaagctctctgctgcctagttcattagaaaatgaaaaacggaattaattagttgcaataagttttaaccagtataatttttttctccattttttaattttgttttcctccagttttcaaacaatctaacgcctctatctctgagtgcgaacttgcagatggatggctttgattttctaaattacgtgtataataagttttgtgcaacatctagtttggtgactcagaatttaagcctgcttttggttcagcatctgaaactgtttccagcttttaaaagaactgcagaaaagggaaaacagcattgaagatgcatctgaaccgatgtttttgcagcttcatacagctgtaggcgatttcaaagtattctggaagtcggtcctttaggaactgtctatggaccaagaaatagggaattatgcaaaaaaatttcatgagataggaaacagtttttgggacctcttttgagctgcaaatcaaactgcagttgccggaattatttcttcggttgactttgtttcctcacaaatcgagtagaagctgaatatgatggttgaacttgcataagcaccgggatttctaaatgatcatctttagtatagtcaattgctgtgttttaatttaatgagatttggttgatgatttaaattaagttcttatatttgggtgtttggttagggtactgatttgtgcattcatgtttctgatggaaattttcaggtgacatcataaagacattgaaggaaa

SEQ ID NO: 100222 - DNA, 552 bp, Vitis vinifera
  Intron number 1 from transcript GSVIVT01035546001 (locus G SVIVG01035546001) derived from phytozome v7.0 (chr-ID chr4 ; pos 2187408 to 2187959)
ttcgtcagagacagagacacacgcctgaatcagtggtacagttaactcaactcaacctcacttcatataaatttatttatttatttacaatcttgttttctcggattccaaacaatgaatatgtaagattttgatttcagttccaacattttctctgtttccgaacggagcatcattattaatattacaataattttaaattttagtgatgaatcaaacaaccaataggtgaacttgttcttaggtttttttcccaaaactcaaccgtcgcacaaaattttgattgtgacttaatgatttcctatcgattgtgtaaattccgaaacggtttctttcagatttcggctcagttgcaatgaacagcactggttgaatttacttttctcagaaactcggagggaaagttgtatcagattttattttccttcttatttttcgtgacaaacaaacagcagaaattgagatttcttcttcatctttaaggtttgatggcaaattgttttttgtgtttgcgcagagaccggttcccatacggatattaacagtagggaa

SEQ ID NO: 100223 - DNA, 907 bp, Vitis vinifera
  Intron number 1 from transcript GSVIVT01033643001 (locus G SVIVG01033643001) derived from phytozome v7.0 (chr-ID chr8 ; pos 19006519 to 19007425 reverse strand)
aacgaatctctatcgcggtgccgctcatcatccaggtacttattcttcctcctgtttgccttgccttgtcttgatcaacttatctttgttttttttctttttttgtccgtgaggattgttttcaattgaaatggtcattttttgtttgttttactggggtttctcagcaaccgaacaggggcttaggcataggaaaaaatttacgattttctggatagaagttttgaagattttggattttttcttgccttaagaacgaatacgagcgtgactgtctagtatctctttagagcccgtttggttcttcctaactgggttcgatttattgcgttgcttttcctttttttttttttccaatttatttcggtttggggttctgtgaaattcaagtccaaattccttggtgtataaagcaaccaaataatggaattgagctatgacctccaattcaaattccatacaacctaaaccagccttcctggttccgaatacggagaatctagtcagctacatttagcgtttcagaaaagtgggtccttgtcattcaaaatgaattgaaaaccctagtttctgttataatggcataatagaattggaaccctttcttttattttttttgataagtgaaaccttttcttttattatatctacagttttcctaaattatggaaatggctgacttacgcacctaactcctgaaaaaaggtctaactatttggatacgatctaaaccatccagcaaggaggaccattaattgctttttttataccagcattagttttcttatccactgttataatttctttccatgattttattgaattgcagattgcaatttctctattttaatactgatttcatgtatgcttaatagagaaatattggtactgtcagattcttgcctta

SEQ ID NO: 100224 - DNA, 682 bp, Vitis vinifera
  Intron number 1 from transcript GSVIVT01037852001 (locus G SVIVG01037852001) derived from phytozome v7.0 (chr-ID chr3 ; pos 7113612 to 7114293 reverse strand)
ctgttttctgttgcaggttttcaaacttcaacggtaaaaagaaaatatatataattatatatagggtttggaacttgaaactttaaacagcacacaagagggtcttggtggtgtgaatctttgatctttttaagctttaaaaaagaaaacaaagaaacagagaactcagagagggaaagataaagaaatagggagggggtgagggtggagtcagatttgtgcttgtgggtgtctctggtttgagtattatttagtgatgagagtctgttggctatgtctccttggctgactgggtgcacccggggtccatgggcgctgctgtcaaccaaggaaacaatcacttctctggctctcttgttatttaagagaacccctgcttaaaaaattgcactaccccatttgctctctctctctttcacacagactctttacctccattctggtcaagattcggtcatagttgtggcatatatcctctctttgatccctttttcttcccttgaaactgtgaaagttgggcacattcggaaatctggtccccacacctggggcattcctttacgtctctctgaaatcatttctccattcaggcaaacttggatcatcaggaatgtgccatggcgaccatgagatatctgattttgcagtgattatttgagtcttggggacacctggtttgaag

SEQ ID NO: 100225 - DNA, 766 bp, Vitis vinifera
  Intron number 1 from transcript GSVIVT01037131001 (locus G SVIVG01037131001) derived from phytozome v7.0 (chr-ID chr1 8; pos 28790202 to 28790967 reverse strand)
ggaaaaccattgttgatctacttggtaagtttctctatctttcattttctcataagaatatcatttgaggtaattgtttattgattttatccggtgatcatgtgtgttcttaatgggacaaagtttgttacacttttaccaaattatggatggatccaaaatttgtacatcaaaagtgttgacaatggatcttagttttagacaataaaaattactcatagttttttttaatttcttcataagaataaaaaaatattatttttttctaaataatggaaaataattttccaatttcaaaaacacttttgatgatatagtttatccataatttgcttattttaataaaaaaatgaaaaaaaaaaaaaaaaaaaaaaaaaagtgactttcgaaaaaaatttaaaatatttttattttttttatagaccgacatcaagaatacgatcattcttagaacatattttatatattgttgtaatttgaaacaagccaaataaagtcatttttaaaaattaggttctcaaacaaaattttattttttaaaataagaaaatatcattgttaagaactttatcaaaaacccttttttaagaattaatttttgaaaatgttgataaatctttaggtatcatttttttgggtatggtatgagaaagcagttgaccaacttctgcaaatttggcaaagttaaagagaatgaactcttgagtatgtgagtagaattttgtcatttgatatcgaattcttttccttttgatttgcagctgag

SEQ ID NO: 100226 - DNA, 728 bp, Vitis vinifera
  Intron number 3 from transcript GSVIVT01032446001 (locus G SVIVG01032446001) derived from phytozome v7.0 (chr-ID chr1 4; pos 27496673 to 27497400 reverse strand)
gtcaacccaaacaggtagattttgtgaaatcattgtaattggaatcattggattgattatggttgggttgtggaatagagagaatatatatatatatgtatgtatgaaatattcattttgaaacaaaatattctgataataattggaaaaaactccattggagtgagattgaccacaaacctcgagatctttattttgaaataatgagttaaaaggaataaaatcaaactggtttttctggaaagtaaaatatcaaacgaacaaattttggtacaatgtcataagatgagatagagattttctttctatgttataaataaatataaaataatggacatctaccaataagttttacagagttgaggttgcttggtttcaattttagataagaagtggctgaatgggatgaacatgtaacatagaagctgaacgatagatttaggagaaataatgaaaatcagtattctatttgttatttggacttttatggcactcttcattacttctctatcgcatgacttctctttcctagctaagtcaagttgtgcagaaaccaatacaagttggtagcatcggtgcatcttatgactcaatattagacaaactaaagttttttttttgataagattttttttttttttttttttttttaatttttttattattagacaaactaaagttgtttagctttaaattctttctgatttgtatttcagaccataagttac

SEQ ID NO: 100227 - DNA, 991 bp, Vitis vinifera
  Intron number 1 from transcript GSVIVT01032814001 (locus G SVIVG01032814001) derived from phytozome v7.0 (chr-ID chr1 3; pos 545561 to 546551 reverse strand)
cttggggtcttctgcgactgacgcgtattcctcaggtgcgtgattgtcaattcgtttgatcgcgttttttagttttgtttgataggtgatttttgctttttttttttccttgaaactatgactttttgtttggttgctgaggaagtggaggaaaagagtaggaaattctggtgttttggttcaatggagaagtaatctacttgaattaagcttgtggtaattttgaatcttttgatttgatttgatttggtttcagttgaactgagttgtgccgagttgagttgaggttttggtttaaacattaatttattctctttcaccaaccaaacaggggatatgctttttgtaaaggaagatgctaatcttctagattttccgtgtacttcatttccttgggaaccaaacagaggattatgcctctagctttaagtttgtatgtgatagaattctcggaacccaaacagagattgattctttgcagcttaaatggataataggattttgcacaacaagagcaatgaagtaaggtattttcgagctatatttcaggaatttatttattcattcatttaaccgtgttctagttgattctaggataatatgttatgatcaccgatgattaattctaatataatgtccgctacaagtcctctttcttgtcctatatttgcactgtaggagtactttatttattgagtctatagtggtttaaaagggtgtgcttccatcgtcattgataggctgtgaatgaggttccaaattctgtacaatgaactagcagtcaatttatctggtattgtcatgtttgatcaatgtgcatattaaggcatgctcgagttaattactcagagaaagttagatatcatatttcacgaatcacgcatctcatcggcagagcaattggtttttactgtttctgcttggtgagatatggtggccagcaatggctctaagcttggcctttacatttatgcagaatttacaaatccat

SEQ ID NO: 100228 - DNA, 985 bp, Vitis vinifera
  Intron number 1 from transcript GSVIVT01032932001 (locus G SVIVG01032932001) derived from phytozome v7.0 (chr-ID chr1 4; pos 24257732 to 24258716)
attcaacactaggtctttttctgtgcactattaagattttaatttgccatgttattttgttaacaattgcctcaatatgtagctgttggacatcaaactgaaatgtttcctaattacaaagctacctcaatatatttgttgtcctaggttgcataaatttaaactgtgtaaataaataggtttggtcatcttcctactcatattaggttaaatttatgcaagctaatgtcataggcagttaatgtcaggtggtgcctcaagaaatcttctattttgctggatgatactttttgatttatcaaaatgccaaaatggcatagatgagtcttattggctttttttctccatgcattgagaaaaagataaaggcctcatccttttgtccatgttcatgtttttacgatttttgtcatggttgttccaatttatgtcatttgtagtttaaagtttacatgattggcatctatcaagtctggatagattttctgactacatgacttctacaggtttcttttctagtggcactccctagattacattttttaagataaaaaaacagtagcttttttctcttcttcttcttgcttttctttatctgtaagtattttagggatcccctatttgaatcatttcctttatttgaaacttctgaatttgaacgagcatttcagtgatcccctttgtaagtcctttcctttacttcaaatttctgaatttgaacaaggctaactggatgctcctttctgttcctttgtgatggaatacccttgcctaatttccaagatgttcagtttgcctgctcccattgtgtagtttccttctatcaacaattttcaagagcatgttagtctttaaagtgttttctaccaacagttctcaagaacatgttgggatttaatatggttgtttcgaactgaaattgattattgacttaaattttttgctttccttatggaattgttccagcttgattctaggccatcga

SEQ ID NO: 100229 - DNA, 980 bp, Vitis vinifera
  Intron number 2 from transcript GSVIVT01032973001 (locus G SVIVG01032973001) derived from phytozome v7.0 (chr-ID chr1 4; pos 24736808 to 24737787)
tttctaggaacagtctcaccgacgggattccaaaggagctagcgaattgccgggagctgtcagttatagtattgacaaatttagatgatttcagttctgctgaggacaacttagccgacagttctagtggagaattcaatgcttttatgggaggtgttccttatgagctattgctgcttcccaagcttcagattttttgggcacctagagcaaatcttggtggacggttgcctagtaattggagtgattcatgttcactgcgagcactcaatttggggcagaattacattagtgctgcggtaccggaaagtatgggaaaatgcaagaaccttacctttttggatttgagttcaaatgttttggagggatacctcccttttcagtggctctttccatgtatggtgtactttaatatcagtcgaaacatgttaactggtgtacttccaaggtttggaaaggagagttgtcacagcatcatggtctcttatggacaagctcctattttcttagatgtggaagatattcagaatgcttactctaacattcctgtttggggttatcagatgagcaccatttttgggtcgctggtggatgagaatttagtattcattcatgactttagttggaatagattcattggtccaataccttctttctcaataggaggagacttcctagcaacaaaccataaaccctcgtacaaattgttcctgaacaataatgcgctcaatgggtctcttcctggtgagctggtttcaaactgtaatgatctgcagaccttttcagttaacttgagcaccaaccagatatcaggtggaatttatccggggttgcttcttgattgtttacaactgaaggagtttgaagcagcacacaatcagataagtggatcaatcggtcctgcttttggcaatctgaagatgcttcaacggcttgacttacgaggaaacaggctgtctggatctctccctggtcagttg

SEQ ID NO: 100230 - DNA, 570 bp, Vitis vinifera
  Intron number 1 from transcript GSVIVT01033021001 (locus G SVIVG01033021001) derived from phytozome v7.0 (chr-ID chr1 4; pos 25119142 to 25119711 reverse strand)
ccttccccgatccataccaaaaaaatatcattacagtaggcaaaagtcctaccttttgttttttgtttttttttttaaagtaaaaattagaacctcatcgaatatgttgctcatatcatttaagaaaagaaggtgtttgtttttttaactcatgttgaaagtaatttgtttttatattttagatgtttgtctttaactttttatttaatttaatttattacttatttttaaatattttttactaaataaaaaaactcaaaatatttagttttttctaaataaataaaaataacatttttgaattcattaaaaaatctcaacccctaacccttgttatgataataaatctgtccttatcatttttctcttctaccatttcaccttccttgatcaccatcttcttctctttaatcaacttcgataaattctaaaataatttttattattttaaaatttttagaaatatgttcaattattttttggtcaaataagaactaatttaaaaattaattttttctaaattttcatggttcagaattggtgaagctggttgaaacaactgttaggtca

SEQ ID NO: 100231 - DNA, 531 bp, Vitis vinifera
  Intron number 4 from transcript GSVIVT01031967001 (locus G SVIVG01031967001) derived from phytozome v7.0 (chr-ID chr3 ; pos 5791541 to 5792071)
aggaggtgagtaatatttctaatggattcattatcagtatcatattagttcagtcatggacaattgatgtttttttttttttctagagacctgatattcaatagcaaatttcaatttcatgtcccttgaggaaattaaattgcattgatttcaattgtagcattctttggctattttgagtacaattgggaatgctacttgtgttctataaaatattcaaacatggttgagggaaaatgcaagtatgttctgtagctattggtatactcgagaaccatcgctctccattttatggtttatactttagcttcccacattgacatcatatggtagcatatatagtaggttcatttgatgcatgagataggtgatggctcttaatcattcaccttcttttcaaatctgattacgttcttttggtattaaatttaattatgtggattcttattttactttttcgtttatttcactattgaaaactttgttgtgattgcaggcacttagccaagctgacattgacgctctcaaacg

SEQ ID NO: 100232 - DNA, 1018 bp, Vitis vinifera
  Intron number 1 from transcript GSVIVT01035985001 (locus G SVIVG01035985001) derived from phytozome v7.0 (chr-ID chr4 ; pos 6814101 to 6815118)
tcactgatttcagtgccaaccctcccttctacttggttcgttttctattcttctatgcctgagatttcctatgatttcatctgttttatgtttttattgtcataaatttatcgctggtaatatgttagtttgctttgtttttattactggattcaattggtgttattctttgaggtttctggctttaataagtttctgggtttggtcggtagcacgaaaccctacttgggttgattttatttttattttttccctaaattttgattgggaaggttgagtttgataagggcaggtttattgttttctcggattgaaactggggggttttgtttggttttttttcaccttacataacggacggtttttagatgtttctgagttttgatgcatcttttttgatattctgattttaaattttgattaaggtttctggagaattttggtattggttatgaatgtaggtgctttctcctttcttttcttatttatttatttatttaggggggtgggcgcgggagattcttgacatattttgtgattttggtacatttcttttgttgatttagaatttgtttttgaacaaggatacatgttttttttttttttttttttgaagatttgcgatatatatgggcttgtgtatatgtatgtatttgaattgagatgcaagcttttgagtttcatgatatgggttttgagttaggatgagtattttctaagagggaggatataagttttgaggttataaatgggtcatgagcagatatgtaacatatttaattgaagtagctgactgttttctgagattgaggatacaagtctagatgccctcctcttttctgttgagattttgatatagctttttgttgagacttgtaattatgaagatttatgatgtgggatttcagctagattgaaaaaagttatatttcttttgaattaaattccatacttatagtggattatgacatggattttgaatttagatgtatcttgtgatttgagtttgtagcatttg

SEQ ID NO: 100233 - DNA, 977 bp, Vitis vinifera
  Intron number 2 from transcript GSVIVT01033093001 (locus G SVIVG01033093001) derived from phytozome v7.0 (chr-ID chr1 4; pos 25664181 to 25665157 reverse strand)
gagggagctgtgggagtcattcctacggacactgtgtatgtttttccccttttaattatttttcaatttttaagtgtcagtctaaaaggagagctttacctttggaatggttgggagactataatatttcatatatcattctttttgtcacaattctgtgctggtccttgatgtagaccatgttatgcgcatcacctgctatggtacttgtcaattggatgtgatcatgagtttgcatgccagttatgaacatcttgggaggatacatttgaggagatttttccctttttgttttctttttccctgtaagcaatcttagatattcctcttctaggaaatgatttataagactaatcttatttttgattgattagaaattggagggaaaggaaataatgcaaaaaaaattgaaccatatgttctcttttttctctccgttccaaaaatgaagaacacaacaaagcttaaatcatgttttttttatagatattggacacaggacaaaaggtatcaaatgggtcacaatccatctgcacagcaagtatacttgaatcatgtctatagcaatattacaactaataattgaaaaaagctcagctaagttgaggttttggttctgtatggcagcttattattctcttgcttccaagaggcaaagggagcttgaattgtgatttttaagtctacaagaagtgaatgggttgggtttcacccttgttcaatgagtggggtcgtatagaaaaaatatgacttgatggttttatttcattctcttcctatgttttctcaacaacagaacagaatgcgcaaaagggattttcattcgtcactcctcacaacttatttttgttgtgaattgaacatgaggagttgttctcatgatgattatttatgcatttaacttaatatgttttattacgatccaatgtgatacattttctgttctactgaatccaaatgcttcctttgtaacagtt

SEQ ID NO: 100234 - DNA, 934 bp, Vitis vinifera
  Intron number 1 from transcript GSVIVT01035320001 (locus G SVIVG01035320001) derived from phytozome v7.0 (chr-ID chr4 ; pos 420346 to 421279 reverse strand)
gcagcgtttgggctcagagtgccaccttccctcaggtctctcgcctttctccttcttaaacccttgacaattgctgttttttgttgatgggttttcttgattttgtctgatctggctaggatccatctggggttttgtttttttcgatgaaatcgatagtgggtttcgtgtaatcggagtttttgtagtcgattgttgatgggttttattgtggttttgttgattgtgtctgatctgattggggttttaactgggttttgttattggaagatgtctttgttgggtttcacgcaatcagacgaactctccttgtttcaacagaaagttttccagtgaaaaggtttttctttagaacaactttgtttcaggtgggaataaaatgattttccgaggaataatcgtttgaacttaagcgtctctacctctcaggtttagacgttaattccttatttggcagtgatttggagctaaattgttgatgggttttattaattatgcctgatctgattaggattttgtgggcttttggtggcaccatgagatcaatgatggaattgatataatgtatataagcttccttgtattatatacagtagagatttttcctcttttcctctattgtttggatgtatttgtatgtattgatctaaactaagatgaagggatgaagggttactcatttgatatttatttatatttgagttgatagtgtacattgaatatgattgttttaaataggtttattgtttagtcaattagcatttggctcgaatgtagacccaccctgcgtttatggtttattcttttttcatgaactggattgttatgacaataggtattctttttcaatctattttatttgtttgctgaacttgcattgtttgcttctattttgatggtgctttagttcaagcccgaagaaattactgccata

SEQ ID NO: 100235 - DNA, 774 bp, Vitis vinifera
  Intron number 1 from transcript GSVIVT01031492001 (locus G SVIVG01031492001) derived from phytozome v7.0 (chr-ID chr6 ; pos 17978245 to 17979018)
acaggtacgccctcttcttcgtcttcttctttccacttatttttgtgtttaagaatgtatctgatcaccgtatgttggtttgtgtagtgattttggtttgtttctggacccaccggttcatttcggtaattgggttttcttctcatctttgactcctaagaatctagtaaaggtttttgattccataattcaaacacaccatagcatgcatgtgtatggttctgggtgaatcccaacttagaccatggccctattgcgggcttctgcatttgattgagctgtggatttgggttcaaacagggtagttttgtggttgggaaggtcaaaatcattggctcataatgataggaaggaaaagaaaagaatcggaaatgcttgaatttgctccgtatggattccttttggaaaactattttcaggattttctttagctttttgagtccaaaacatggccatggtttgtttaatctattacacctaaactactcacgatcatcttcacttttaattcatttgaaactgcccccagtatgaatgtaagttagactggaagggtgtttgattttgggctatggtggtttgtttagatcaattgaagagcagcaatgttttctatttaccaaaactgtgatattccaactgatattaaatatagttatctgcatttgtatatcaatggcaaatttaggataaggtctttcttgggattcagcttttgtttatgagcggaaaaactaacactagtcttctgtggatgcactgccatgttcagtg

SEQ ID NO: 100236 - DNA, 460 bp, Vitis vinifera
  Intron number 3 from transcript GSVIVT01030681001 (locus G SVIVG01030681001) derived from phytozome v7.0 (chr-ID chr1 4; pos 13463537 to 13463996 reverse strand)
cccaccctaaccgtcagtctactcaattcattcttcaagtcctgattccgatttctgatcattcaaacaagtcatttagagtgaatcatattgtttcacaacgcttacccatacataaagatttccttgtgctaatcttctcaatttattcatcctcactcaatatgatatcagatttcttacatacaaaaaaaaatattaaattacattacatcattggctacgtgttaatatcacatcatgggacgaggcactctgcattcaatcccaagaaaaaaaaagagggtttttgaaggttcttcttttagcatttatttgagtcctttccatatcaaacatttgagtctggaaaagaatcccattttatttcttatttgcaaagatggaagcatatttttcttaatttcatttgaataattcctttttccaaactgtttctaatcaaatgcagattcatctc

SEQ ID NO: 100237 - DNA, 150 bp, Vitis vinifera
  Intron number 4 from transcript GSVIVT01032432001 (locus G SVIVG01032432001) derived from phytozome v7.0 (chr-ID chr1 4; pos 27342119 to 27342268 reverse strand)
aggtaaactcttaaatgactgtttgttacatgtctctgctttctcttgaaaaatatttgattttggaagaagactcagtgacacactagccttcatttatgctcactaaatgactgtttgttaatgttggttgtgtgaaatagatacaaa

SEQ ID NO: 100238 - DNA, 592 bp, Vitis vinifera
  Intron number 1 from transcript GSVIVT01036184001 (locus G SVIVG01036184001) derived from phytozome v7.0 (chr-ID chr6 ; pos 19713911 to 19714502)
gagaattttctaagtataaacaaaaatgaagattaagattttaacagatatgaaatcaatacctttatttttttcttttttaaataattaaatataagataattaaaagtaaggttttttatttaaaacttatatttcatataataaatcactaaatcactaatagtttaatggttagattttaatgaacttatattatacttttacttcctagtaaaaatataaataattaataggaactaaacaaatattatttttttatgatttagttgattcaaccataagtataaaaagcgaaaatattgaatcaacaagaataatatcaaataagattttttttaaaaaaaaaatttaatttatagatggaccacattttccaggatttattttcttaaaaaaaaattaagggatttttctttccttttttttttttttggcaaatttttcattttggtttttattttcctaaaaagtttttacaaggaaatattttatttttggaaaattgagagcaaattttacattttggttttgattttcctaaaatatctttagagagttttatttttttatttttggaaaatcgagggtg

SEQ ID NO: 100239 - DNA, 499 bp, Vitis vinifera
  Intron number 1 from transcript GSVIVT01035938001 (locus G SVIVG01035938001) derived from phytozome v7.0 (chr-ID chr4 ; pos 6153554 to 6154052)
gaaattggagcttgagtacacgtgcttcacttcatgtgggtattggtattacccacatggcgttgacgttctgtaaaggacgccattgatgagtcctttccgcgtttccattcaaaaccctaatttttcttctttttcatattaatttcctcattgttatctctacagatacagcgataaaatcatattttattattttaatcagggtttattatctgtattgcgtttaattggtatttcttcttctctgtattacgtttgatccgaatttttaatttttttttctcaaattagggtttctgggtttgaattttttgttgtgttccctcagaagaacatcgatttttttttatttttttatttcttaattcctgggatttgtgaagtgggttgtgtgtgtaagccttgatttttggttattttttttcgttgttattgttgttgtttgattatcgatggggaagcccactgggaagaagaagactccggggccgtcgaa

SEQ ID NO: 100240 - DNA, 655 bp, Vitis vinifera
  Intron number 1 from transcript GSVIVT01031570001 (locus G SVIVG01031570001) derived from phytozome v7.0 (chr-ID chr5 ; pos 18310389 to 18311043 reverse strand)
tgccaaagatcacgccaagattacccaacagtcaggtttgtattagtttttattcataggttttgatttttattcttttttttttttctttttagatggggttttggtttttgatttttaactctcgcttactggattttgtttttgtgttccttttcctcttttggggttggttgctagtggaagatccttaatcggttgtgttagttcggttggtgatttgtctctgtttggttggtgaggaaatgtaggggaggaaaagaaatgagttgtgaatcttttgaagtgcgtttaacctaacgcgcgaaaattgagattttgctgattttttttttgtttgttttcttctggggttgcttgctaatgaaagatctttagtgggttttgttgttaagtttggttgttgatttgtttcgtttggttagtgagagagtgtaagaaaagaaggaaaacctagttgtaacctaagtagctgagttgggtctttcatttcttggagaatacgatgatgaaaggcataagatcccgacctttactgcattttccacggttttctgaccaaccaaacggggttgggtatttttatttggaaaatttctctttttgtggaagaattttgatgggggttttgctgaatttgcaggccaagagagcc

SEQ ID NO: 100241 - DNA, 335 bp, Vitis vinifera
  Intron number 2 from transcript GSVIVT01033194001 (locus G SVIVG01033194001) derived from phytozome v7.0 (chr-ID chr4 ; pos 9400140 to 9400474 reverse strand)
gtgaagagcagcccaaatccaaggtacatatgatgatcaatctttttttgttcatggttttagaataattaataaagagaattaattaaacaatgtagaattaattttgtttttaggggacatatacaaacatacataccttaattggaaagaagaagagtccaaaaatagtgggctaagttctttttacttcaaaaatagttagggttgcatcttgggtgttcaaaataattccaaaatccaaaaaaaaccattccatatttttctcaacagttatgatttttggtatatattaagatgggtaattgatgtacatataacaggaactactatag

SEQ ID NO: 100242 - DNA, 440 bp, Vitis vinifera
  Intron number 5 from transcript GSVIVT01036119001 (locus G SVIVG01036119001) derived from phytozome v7.0 (chr-ID chr6 ; pos 20447285 to 20447724 reverse strand)
aagcaattgaggagctgaataatactgaatttaaggtaacacaatcttcttgtgcattgtgtttttctgagccaatgatattctgagacttggttgacttagtggtactttctgttctgagtttattacccctaaaatattaccccggatttaactgaaaaccttgctaggaaaaaaaaaaaagaaaaagaaaaatggaagaagaagaagtagtgaagaggttttaaggaatcttgggggaattttctttgattccattgttttatgcagaacagatctagaattgctctttttgggaaattattattatttttaaaaaaatgctgttttgaagcatgttggttatggacttatggtgaatgctaggcattgttaaaattgctgagtgttttcttctctctctctctttctcatgcaaacacacaggggagaaaaataaa

SEQ ID NO: 100243 - DNA, 717 bp, Vitis vinifera
  Intron number 2 from transcript GSVIVT01036119001 (locus G SVIVG01036119001) derived from phytozome v7.0 (chr-ID chr6 ; pos 20448343 to 20449059 reverse strand)
gtgtgtcaatttattgcaggaagcggcactaattggtacgtttagtttggaactggtattatttttgtgagattgggcaatttttggcttcactctccttcctgttatatctgaattgctgaaatttccaattgggcacttcaatgttgtttgttttttcaccttggtttatcttggagcatcgtgattgtcccgtaattctactgtctatgatttaatgtctttgttcatatatgattcttctctttattcttacattttttgggggggctacaccctcctggaatgaagatgcttgaaagcttaaacttgtcaatattctttttggttgctgtcttattctgatatcaagacattcattttttgatttctttctttcttctttgttttttggttggtcttggcaccagattcataaccctcttgattatcattcggaaatctcttttgcctgtctcttttagtactgctactattgttatcattatcccttttaataagttgtctttcacaatgcaaccttgtctttcacattgcaacctctcggactcatatttcataacacgggttcaattgaaattcatactctgcaactccttttggcctttcattttgtttccacctttcgatatatgtatacttcttcccatgaattcttctggcttctataccttcttcacagttgccttgcaagcttacttaattagatacataaga

SEQ ID NO: 100244 - DNA, 880 bp, Vitis vinifera
  Intron number 1 from transcript GSVIVT01038612001 (locus G SVIVG01038612001) derived from phytozome v7.0 (chr-ID chr1 6; pos 21490760 to 21491639)
attttaagttaatttttaaatatagattttttggggtaaattttaattatttgataaatataatatattttaatttaaaatattaaaatataatatatttttattgaaataaaatttctatccacgttaatattatatcaccaaaaaattactttaaaaagttattatctttatgttaaggtcatgtttgattttcaaaaaaaattgagagaaaatagaaacgaaaattaaaaataaaaatagattaaaagttaataaattatttttatgtaattttttaaattcatttaacttatttttatttattatataaaaattaaataagttttaaatgtataaatatttaattaattttaattatattttttttttaaaaattacttatttttcataatgaaactaaatataaaaaaattaataattttttcttaatacttttcaataatcaaatatagcctaaatacaataatatatattattttgttatctacatatatttttcaaaatttttgcccaatattttggttgtttttcaaaaaaaaattaaaatcaagacaccagtattttgcgggtttatgatatttttaatcggattgggttgaaaatacttctcagaccattttaccctttctaattattcataacgaccaaaacgcccgtgacagacttctcatcaaatattcttattgtaaatttataattattagtttccaaccagcaccattttagtggcactagaatcaaccaaccgtgtggcgcacaacagagcatcttcccacttactttctgccttcctgattttcccgactaccaaacaccattcctctcaaaaatttccgacaaaagaaaataggaaagaaagtacgaatttcagagaacc

SEQ ID NO: 100245 - DNA, 555 bp, Vitis vinifera
  Intron number 2 from transcript GSVIVT01031405001 (locus G SVIVG01031405001) derived from phytozome v7.0 (chr-ID chr6 ; pos 19032132 to 19032686)
attcaacagaccctgctatcaaggtagatatataacccacccatttatccaggaaataaaaagaattcaaagcaaaaatctttttttttttctttccccctgatcggtgtcttctcattgcttttgcgagaaatcaaaatcctgttcaagaaaggaccttacagtgttaacattctcatattgagtattagtgtcaatcctttaatgaaaacgtggactgctttctcgggcatttgacttcacgtttggcatctttcaatctcttaatgacctgcgattgtgttgcttccatctttctgtttttctgacacgctaattacttaacacaaattcccaaaaaaacaccaccattttccctctcgaaaggttgaatttatatctgtctagtgctaaattggtaattggatacttccctgatcaataattgtgtcatttactcaacactctttcacacattaccaaactccaccgcaaaaccattgaattccccatctgcgtctttgaaaatcacgtattcatcacatgggttttgtctcagaacctggtggagacgga

SEQ ID NO: 100246 - DNA, 769 bp, Vitis vinifera
  Intron number 1 from transcript GSVIVT01032921001 (locus G SVIVG01032921001) derived from phytozome v7.0 (chr-ID chr1 4; pos 24150455 to 24151223)
tctctcggccatcgtaaacaatctcctcaaatctggtataatttatattcatatttgttttttctgtttggttgctgagaaaacgtgggaaaacaataggaaaggaaattttggtcttagttcctcaatttattttggttcagtttagttgagctgagatactattcaactgttgtggaaaagaaagcaataacaattctggaggctaaaactttaggcatcatttggctggaattttggaatttcgaaaattttcgaacttcgttattcagttattgcttttgaaagcaaaatttgcacccttttttttgcttagaagagcaaggaaaatgatttcaatttgcttgctgcgcagtgcttcagtttctttttattctttttctcacaaagaaaatgaagagagagttttttttgccattatgtatcggcagagggaactgaagaacagaaattcgaagtcttacactatctggtttggttcctagaaaattttatagtcggtttattcaaacaattaaagaaatgttgtcatgtttcgatattttcatttctacatttttccttctttggcttcatggtaattaaacaaaagccaagctttggtgtttctgtcctgaaaaggttgcattgtacgaatgtgtattgctctgagaagcttatatattcggggtttgatgcttattaattttttgttgtttgttactgagatgagtttgattgatgatcatgaccaggaaaccctgattggaaacccgaaccttttgatttc

SEQ ID NO: 100247 - DNA, 488 bp, Vitis vinifera
  Intron number 1 from transcript GSVIVT01037411001 (locus G SVIVG01037411001) derived from phytozome v7.0 (chr-ID chr6 ; pos 14213374 to 14213861)
atgtgttaataccaataggatatgaatattacaacataatttaatttatttttgtttatttttttcatgtgatatattatccaatgaatagttacgtgttattccattgaataaatgtatattattctattgaatatttggattaaatgccaataattacaataaatgtgagactcacccacgtaacaaaaaagtgaagtgttttaaatgctttgaattttacaagtttttagttggcattttttatgtttaagcctatccctaacagttataaaaaaaacatcttaaacatctggcttcttatttgtatcaagaagggtttttgagcattaggaaggctagaaaaagtcccacacgtacggttcttcattcattacattgagtttttcatgagtcatgcttacggtaccaaccaaaaagcaagtttccacctaattagagtgagaagtgaagactggcgggcaaggcgtggcggcctctgcatcagc

SEQ ID NO: 100248 - DNA, 968 bp, Vitis vinifera
  Intron number 3 from transcript GSVIVT01031054001 (locus G SVIVG01031054001) derived from phytozome v7.0 (chr-ID chr1 4; pos 21499950 to 21500917 reverse strand)
ttgggttgggtgattctggctaccagaaatataatgtaataattttttctatatactatttggaaactatggtacttcatctctagtaaccctgttgacatgtagaagttatatattatagttctttagttctttagtttcattttgatggatattaaatagaggattaaaggcataaattgatatcagagtttcaaggtcatgcaagatatgaggaaatttgtttgtttgctatgggtcaaaaaaaaaaaaaaaaaattatcgaagaaatttaaacatttctgagaatttctcagacaaacatgagcattttatctaagatatatatattttttgtttgtgtgcttgttttcttttcttccactttctccctctgtttataaatttccctagttaacttgctttctgctgaagggcaggaacctttcattgtattctcttttttcatagctagatatttctgtttcttgtccaaaaagaacaaaatatatatatatatatatatatataattttttttttatttggcatattatttttcaaatatgacacttcaagacctcattatgcagtgattgatcttcataccattttgatagaacatagaagtatatttttagttttaacttttgagcctgttaggtttatgtacatattgcagctataaatagttcataaattatcccagaattatatgtccttttcaattttctttattaattcagaaaaatgatgccttgttcagctgttttgttaaattgattgcttcatttttctgtcaaaagttctggttgtttcacacaaattgtggaatgatattgctcttttgagacaatgatacagagttagcgaatgtggaatgttttaatgataatgaaatggactttgctttgttttaaataaaaaagaactgactttctgtcaaggattgcagtttgttgcaaagaagcttgacaaaagacttttaga

SEQ ID NO: 100249 - DNA, 490 bp, Vitis vinifera
  Intron number 2 from transcript GSVIVT01033029001 (locus G SVIVG01033029001) derived from phytozome v7.0 (chr-ID chr1 4; pos 25191345 to 25191834 reverse strand)
aagttgttgacgttgatctctctcttgcagtcaaggtgagatcccattccatctctactcaaattaaggttacgtttggttcctagaaaatttgagggaaaatgtaagggaaagaaaatagagaggaaaagtagaagaaaatagatttaaagtcttaattatttttatttgctatttcaaacctatttcacttattttaactcatcaatataaagattaaatcatttaaaaatgtataagtctctaactcttttaattctttgatatttccgtaggacaatcaaatatgagaaaataattttctttcacatttttttttctttccttagtacttttcgggaacaaacataacctaagttcacatttgtgttttaaggttttgcttatgctttagaaaatgcccatggattgagaaataacttgagcttgatgagcttctatattttgaagtgctcgttttaactgttctgttttaattcagaagaaggca

SEQ ID NO: 100250 - DNA, 896 bp, Vitis vinifera
  Intron number 1 from transcript GSVIVT01033493001 (locus G SVIVG01033493001) derived from phytozome v7.0 (chr-ID chr8 ; pos 20258340 to 20259235)
tattggatcgtagaaggcgcacacattggaactttgtgagcatctctctctgtatgtattcagggtttataatttttgtcgattttgatttgaatagtattgatcagtatttgtaaattgaccaagggtgtttttatgagatactttccgcttggatgctgagaaaatggaggaaaaaaaagggaataaaatcgcgggtcatttgagtcgtgtattacaaatagaaggaaacgttgaaatcgtgatttcattttcgctcattttcttgcatatttctggcaaccaagcagagggttatcgtaaaggtttagcttttagaagctcaacgaatcacacccgtcacctcttttctccatgtcttcctgtctaattttgttccctaaaatagagaaaaaacaatgaatgctatcctgtaaatattttgtatgattaaataatgatctggaggtcatgagaaaaagtgaaatatgatacgaacttaggctgtgtttggttgcaatggaggtggggtggggcattaggattggaactggaggccccatccccatttccattgtttgatcacttctaatagtgatgatttcttttacttaacttgaactccatgggcattaggattggaactggaaccaatttttttaattataattatcgagtaaatgaaaggttttctttttctttttccccttatcccatagaatttgaattccgaatcaagtccaatgtgcattataaagactacataatgtggaattcatcaaaggtgctttattgacattggttcatccatttctgttgtaacttatgtatcaaagtcctttatgaaatttaattaaattttggtttcctctttttatgcagggtggaggtgcttctagaaattcatctcaggttaa

SEQ ID NO: 100251 - DNA, 859 bp, Vitis vinifera
  Intron number 1 from transcript GSVIVT01032402001 (locus G SVIVG01032402001) derived from phytozome v7.0 (chr-ID chr1 4; pos 26976309 to 26977167 reverse strand)
cctcaccctcatacgggtgacggagccagccctgggttagtcttctttttcttcatttatcttgtttgtttgtttctcgggaaaatagacttagcttttttttttttttcttttccgagaggcaaacagaaatttcggtttatttctcagttctgagattccgttttaagttaatggcttttatgagattatcctgggcatttcttggagcccattttctgatctctgcaatttattgctctacatatgtaaataactgaaaatgaaaatgaagttgtcggtctgtttgaaattacaatctgtgcgtgcttaaagtttaaacctattctctctaaatttaagatggttgtgttagcctgataaacgttgttggccctttaaattggtagtttaacagtttggacttgctttcaatttattcttatggttcgccggctctgtttgttgtccgtgtaatcaattcctttagttctccatttggttgccgagacaactctggaagagagaaagatgagtgttatgtttaatgttctattgggttttaaatgatgtgaagtgctccaatataccaatccaagtagttgctttaggatgcaggtttcctcaaccccaccccacccccccccccccctctcccttttctctgaaaccaaatggagaattaatggtcagcttttagtttttctggctctgctttttatttttcatctaaatgaaactttgtccttttctctttaattttgcattttagtttcaccctcttcagaaatgtgtgttatgaatgttactagctagcttttgattctattgaaatgtaatggcaggaagatttttattggaggcttggcaagagagacga

SEQ ID NO: 100252 - DNA, 223 bp, Vitis vinifera
  Intron number 2 from transcript GSVIVT01035854001 (locus G SVIVG01035854001) derived from phytozome v7.0 (chr-ID chr4 ; pos 4899141 to 4899363)
ccatttctgaggtttcaaatttcaataacacactacacatccctctgttagttttccggggaacaaaagtccaatcaaaatatgattctttttttctcgggaaccaaacagcaattacagctctctctcttatgtttgctcttgattaatctgaaaccgctttgtttttgtcttcctcttgcttgcagattcttcagatctcttctttctggactcgaccttc

SEQ ID NO: 100253 - DNA, 323 bp, Vitis vinifera
  Intron number 1 from transcript GSVIVT01033555001 (locus G SVIVG01033555001) derived from phytozome v7.0 (chr-ID chr8 ; pos 19779875 to 19780197)
aatttcaaatttaaacataaaatctctcactttatgttacaaaagaatttaaagttataattattaattagatttttgtgacaaaaaaattctcaagacactttgaatgtaacgtggattttttttttcaaatatattatctttgcttattagaaacgcgtatttccaaaagatttttctgtttccttatttggaaagaagacgaagaaaacaaagtattaggaaaccctaaatgatggtcacgtggcacacacctacgacggcaccgttcccgaaatatatctgaaggcacagagccaccaatccagctatatatagggacg

SEQ ID NO: 100254 - DNA, 869 bp, Vitis vinifera
  Intron number 2 from transcript GSVIVT01033555001 (locus G SVIVG01033555001) derived from phytozome v7.0 (chr-ID chr8 ; pos 19780230 to 19781098)
gattcgacacttagaacaagtatgtctactatcttaattctctgtctatctctgtccctttctttccctctctttctctctttctttatgtagacacgacttacttggaacaaaaggctactcctgaaatcggaatgtccttttttttttttctttttcctctgtttgatcggtaaacaaacagagcatgggagtacggcggccttttcctttttctttgttcttgtttgatgtcggttcagggtgtccactcttcgcgtacgttttggtcttgtttcttgtgctgttttttaatgtggagtcgaactttatcgagaaaagggaaatcgttactgttatatataattttcttagggttgcatttggatttgaggttctggggaaacaggtttagatatcatctcgcaggttcgagttatttgggtaaggctttgcaactaggaaaaagaatgctaggaattgtttggggattggatttgaaataatacttcgccatcgttttgattcaaccttttaacaggccttcagtcgatccgtggacttaactaagttaaaaaatttgcaaaacttagggctgaattaaaatctacttctccaaattctcaaatccagttgcatcctttcattatttggatcctttttatggtaaaatatttggtgcctaatttggaatttgaaccagcgggtatgagaatgtgttggctgttgtttaattggaaatggttaatgatacaagaaaactctccgtttaaaaacacgatcagtggtacaatatccatttttgaagtatcctcgagttgtcctctgctactgtttatgtttttcctttatttgacaactattatgtcttgcagggtcagtttaatcaa

SEQ ID NO: 100255 - DNA, 854 bp, Vitis vinifera
  Intron number 1 from transcript GSVIVT01037036001 (locus G SVIVG01037036001) derived from phytozome v7.0 (chr-ID chr3 ; pos 8661093 to 8661946)
tcctcaatctacgcgaccataccggtatcgttcaggtatctgtcatcgcttatctgcgtaatgcttttgctttcccgaaattcaactatttgggcatgaaattgaagtactgtaatcataatcttcgtaatggggcagttcaacacatgtaattttatattagaatacattaaaatggtctttttcctctaagtttggcctaaaaactatatgaaattgagtcggcccgtattggtaagagttgaatgggaattttggtttaatgttatttgttttaaagccagattattttcatagttgttaagtgatgttaatgttatatagtgggactggtgcgtgaggatttgtttgatattcctggaaattggatgagaatttgtaagaacacccaagaggacattgtttttgtaggttttctatatgaattattccaattcaaaaattattgtcaaaatgtgaattttatcatcatgaattgatttgatagcacttctgtgtgatgttaatgttattgattgattgatttatttgcttttaattttcattatattcctaatagttcccaaaacccaactttgtcaccaattgtgtttggttgcttgaaatgggtattgggaatttgggccttgcttgcttaatatcctaatgaatttggccttgtatttaaattcaaagaaaattcacaaaggattctgcagtaaatgcagaaatttagaaacatccagtaccagaacttcaagtcaaatataattttattcaaccaaatgctgcttttgttgattttatgtccattttttttatttattgttatatgatgttttgcattgttaattcataggttacaacccttcccg

SEQ ID NO: 100256 - DNA, 943 bp, Vitis vinifera
  Intron number 1 from transcript GSVIVT01037049001 (locus G SVIVG01037049001) derived from phytozome v7.0 (chr-ID chr3 ; pos 8375269 to 8376211)
ttaaggtacaatttattttttcttttgcaaaagctaatattattaacaccacctaattaaaagaaggtgcacaaatgtacacaagaagtttagaaataagacataaaggcaattagattgagagattaacaaaagcacctctctataatcatcaagagcccaaccaatcaacacaatctaatatggacagtcatgttaaaagctagagagagcataagatagaatttgttagagtttgttccgattattcttcattgacaaaaactctaaaatgttaaggtacaattttgaacatttcttctattgaaagaacagaatatcttcgacaccactatttttgtttctccatatgagactattgatagcctatgaatcttgtgcattttgaagctggccttaatgcgatattcaagatcatggtgtattgctataagtcgttccctacataaatagtcaaaaaataatctcttgatggaatatatgtttaatttatttatctgttccatgctaacataacatgtctgctatttttaatatcaactaactgatcgcccaaaagctttgtcattaggtggccattttttttccttggtatccaaatggatcaatatgacactatttctaaatggtttgacttttacttagctaattaagttgagttttttctgttgagtcaccttgttttcacttggccatggtttattgagggtatgttttgccatccattctgtgaataagtacaaaaaatagttgattggttgtagcatatcaatgaatttggcctcttctattagagcacacacttgttaatgaatgctaattgcattatcttatttgtgccctctctacatatttttcaggaaataagtatgactcattaatctttaaataataattattgttgtttggaatgcctttcaggcaccgtttataaacaggtatt

SEQ ID NO: 100257 - DNA, 404 bp, Vitis vinifera
  Intron number 1 from transcript GSVIVT01031318001 (locus G SVIVG01031318001) derived from phytozome v7.0 (chr-ID chr1 4; pos 408194 to 408597)
gactcccagagttttttctctctgaagagacggtggtaatcttcttcttgaactctctctctctctctatttctgttggttctgattaattaattaattaataatttttttgagattttttgaggcgtgtggggttggagtgttgtttgccagaaaaaatagggggattttcttgggaaatcattttttttttccatagaaaatacgatggggagttacttaacttggatttacatcaacttcaagtttggatttcccgattttgaaaattgtcaaacctttacagtagaaagaaagttaccgttttttgcttttttcgtgcatctagatgattcaaattaaatgcgcagctaccgttttcacatgcaggcgtgccgacctctcaggctctgggcttgattcag

SEQ ID NO: 100258 - DNA, 690 bp, Vitis vinifera
  Intron number 1 from transcript GSVIVT01035348001 (locus G SVIVG01035348001) derived from phytozome v7.0 (chr-ID chr4 ; pos 676274 to 676963)
catcactttggaggaagctctacttcgattctcaggtgggtttcattttcctttgattcaaggcctgtatgaatttctattttgtatttatttctatggctgtaaattcaagtaaaggttctattactcctctgtttggttgctgggtaataaaaaggatttttttttttaatttttaatttttgttcttttatgtctgttcctaaactgaaaggatgctgtacttggtttatgttatatattgcttttcgtgccatgaatgactttcattttccatcgcaagaaagttttattctccctttttgcaagtgtgtgttttttttggactttcttgtggtctgtttgtttgccgagaaaagatagaaaaataaaagaagcttgatttttgagcgttggattattcgtcttcttccttttacctgtttataaagagagaacgcaagatacccctttgctctagggtctattttcagatgctctgtttggttggcgttgaaatggtggaagagcaaagagattggaatttcaattcctggggaattttaaacggaggaactaatttttagcatgctttgaagtttgcatattgatgtttatgtattgactttaatcccatgttcttaatcatggatttttttatttttttggagtgcagaggaattctgcaaggcatcatattagaagccagaa

SEQ ID NO: 100259 - DNA, 509 bp, Vitis vinifera
  Intron number 2 from transcript GSVIVT01035348001 (locus G SVIVG01035348001) derived from phytozome v7.0 (chr-ID chr4 ; pos 677174 to 677682)
ggggtaaggattcttttgaatattaatatttggcatcagtttatatttaatttgttttcatcttctaaatgtctatgtgactgtcttctcatgactcttgcggacattgtttggaaagatattttttatttcatgcatgtgttctcgggttgcaggggattggggttgttattgctctggttgggagtgggcttgcaaccatatgcataaagcaatagcatgatacaataaaaaaacaatccagtggttttgagttttgccctctgtgtgaaaattgcatgaatttgatatatcatctctattctgaataactttaagacagtacatgctttctgctagatgacttgtggtcactctttaattattggtttatagttgcttcttgcatatgatttatgttggaagtaaatttgcagatgacattagcccttctttgggagaacttgaacactaattccttatgcatggaatgttttgttatgcagatagtggagtcaattttattgacc

SEQ ID NO: 100260 - DNA, 903 bp, Vitis vinifera
  Intron number 1 from transcript GSVIVT01032312001 (locus G SVIVG01032312001) derived from phytozome v7.0 (chr-ID chr1 1; pos 14981576 to 14982478)
gtctcaacctcggtactctctttgaaaagccagtacattgtagctttgattgttgtcaagttcaatgaaatattaagaatctaagtttatttatttatttgtgtgtaaagttacagcttctaagtgatataatcaagaatatcttcaagtgcctaggatgatcttagatgctttacttgtaggttctattatataataacttatgagattacagcttggtttataactcagaaataattttttcacctctcctccaccaacaccacaacaacaaaaattaaggagtaattgttgtctctcgtaagtcataacataagaatgcttttgatctcatctcgacatctcagggtctcaaccttggtactctctttggaaagccaatggtacattgtagctttgattgttgtcaagttcaatgagatattaagaatctaagtttatttatttatttgtgtgtaaagttacagctcctaagtgatagaatcaagaatatcttcaagtgcctaggatgatcttagacgtcttgatctcaaaagcatcttacctttcaccatttaattgttcaaaagtctatacagataattctatcattgtgttctaatctttacttgtaggttttattatataataacttatgagattacagcttggtttatatatcagaaataattttttcacctctcctccaccaacaccaccacaacaaaagttaaggagtaattgttgtctcttgtaagtcataacatatgttgcttcaaagttacagctagataactaaatgagctttagttgtttatttagctatgatcttatcctaaacttcctcataaatatgaagcctgcatctaacatattctttggtcgccagtgccttattaaacaggagacaatatttacatcgaa

SEQ ID NO: 100261 - DNA, 718 bp, Vitis vinifera
  Intron number 2 from transcript GSVIVT01035889001 (locus G SVIVG01035889001) derived from phytozome v7.0 (chr-ID chr4 ; pos 5354678 to 5355395 reverse strand)
tgggacactattatacatcattattggacaagaaggtaaacattcttcattcataacttgctttataaatattttattaatttatgtatttttttcattttgtttggttgtgtacttgtactggtgaatcaaacaggcagaaaactttattgattatttggagttgttagctatgaagttgatcatcaaattgatacaaaaaagaactctacctgtgcctgttttttggttttataatttgattaatgtcggatattaatgggctaaaagtcttattgaggttggagaagctgacaccataagtaggaattatcaatccctagctactttggagttcagtaggtggttttttctctaaagtatttcagcattatatgccctattatgtggtgtatgcttctgttcacattatgtggacgtgtcttctctgtatgtctttaattttctataatttttattttttatttttctattttattgtctgatgctgttaaccaacaactagatggagctttaattaattggctgatggtcccagaaatggcacagtggttggtggatgcattagctttacatgcataagtttatttaatataatatatattgccgatgtttttgagaaatgatgatacaagattatctcttattgatactgggtgataattttatgtgaggcatagaagaacgtcgaccgtgtccagttggatctaaaaattca

SEQ ID NO: 100262 - DNA, 420 bp, Vitis vinifera
  Intron number 1 from transcript GSVIVT01035889001 (locus G SVIVG01035889001) derived from phytozome v7.0 (chr-ID chr4 ; pos 5355428 to 5355847 reverse strand)
atttcgggtaagcacctttcttttctatgatatataactcatgggattttttcattttattaattcctatgttgcaaagaaattacttcttcttactatgttattaatacatctctgacccaaatttaatgtggtcctcattgaaccgctttaggctttgttttttggttctagccagagctggatatgttcaagtggctgacacctcccgtggaaagaaaatcattccactgcaatatacatacatggaatttgaactgatttcatctgcatattctttttcattgcatccagacatatttggcccttattttgtgtggggggtcattggtattccttttcttatgtaatcattttatgatgagagcttcaagattttatgcaaatcacacattttcgctttgtttcaaaggttcaatc

SEQ ID NO: 100263 - DNA, 955 bp, Vitis vinifera
  Intron number 1 from transcript GSVIVT01033508001 (locus G SVIVG01033508001) derived from phytozome v7.0 (chr-ID chr8 ; pos 20182183 to 20183137)
caacgctaacggtggattcaagaaatccaagcaaggtttgtccatttctcaccttcaatactcttttataatggctagggttttgatttggattttgattttgattttataaaaggaatcgctcatagatatatgtatatgtacggtattatgtacatatattgctttgtttgtaccggtttgatatgctgctggccgagattgtgcttgttttagggtagggtttattttttcaagaatcaatgctcatgctattttgtttggattcggttcatttattggtaacgagatttgtgtgtattttaaggttgagcttagggttttggttttctaaaaggcgcttctttatacacactgccttcttcggagtaggttcatttgttggtgacacgaatttttcatgttccagggttgtcactcttttcaaaaaattcttgtacattgtatactgctttgtttggactcggttattttgttggtgacaagaattgtgtatgtttttagggatagggttttgaatttttttgaagacaatatgtgtgtccttatgtatgttgtatgatctgggcacttcccctctgttaaggccattggaaggctaggagctatattttgcactgtgaacaaaacaatttcaaatgggaggaaaaaaaaaacagtctttgcactgccttccttgtttgtcagaaatagttggtacccatatcagtggatggtacagagaggggaagtagttaagaaatatttatataaattatattcttgttatatggttttaagctatgctattacataaaagcgtatattcatttttgaatactgatattaagtaattctagtgactgttgagtttttgaggatttaatttaagatttcacagaaattttagctgagaaaaagtaattaatgttttgcaacagaagtggagtccttatcaactggtataggaagcaaa

SEQ ID NO: 100264 - DNA, 1019 bp, Vitis vinifera
  Intron number 1 from transcript GSVIVT01032175001 (locus G SVIVG01032175001) derived from phytozome v7.0 (chr-ID chr1 3; pos 21820418 to 21821436 reverse strand)
cggctacaccgtcaaagccacagttcgagacccaagtcagttctcttcccaattacaaaacttcatacttacaacactgctcattctcaaaccccacttgctattatccccaattttcttctttctttattgtttcagtggtattttgatgggtctttgtcctttttcctttttcagaagtttaatctatgattgaaagtcaatgttcactactcagttatttgtgttgtcctaattttcttggaattatactctctatatggttgtacaggacaaattgataaagtttatgctgttaaaaatgatttcatatactttcagaatcaattcatctcagattccccatgtgttccttcttaattactactattattgtaaaaaaatttgcatttaaatttaaggcttctttgatcaaatgatattccaagacactaaggaggtctcaaaaacaaaaggaaagaaaaggattttccttcagccacaccaaattgtttttgaactagaaactctaaatatgagcctttgttctttttggaagcctattcttgaaaatgttttcatagaaacgaaccaaactagccatatattctgattactgttttgcttccctaggagaaaatcaacaaatttttttacaattgttctggctttatcacaagcttttgttgttctacagacaagacaagaagccagtttaggccttcattttgtttctttatttttctttggtttcctcctgaataaatggtccaaaagctcgcaattgcagttgagaaaatcactactctacgtgcctcatccatttttactccaatcctcattcttctaagaagagcataattgaatttcttaatattctagtcatgcttccatttgggcgttttttctattatataatatatattcttatcaaaataaagttttttgtaagctttcttcttcgtttttccatttaacatgcaagttctgcttaatatgctacagattatccaaagaagacagaacacttgcttgcactt

SEQ ID NO: 100265 - DNA, 733 bp, Vitis vinifera
  Intron number 2 from transcript GSVIVT01032679001 (locus G SVIVG01032679001) derived from phytozome v7.0 (chr-ID chr1 3; pos 1584387 to 1585119)
acgggctggattggtttcctcggtttgccttgcaggtgtgacacaatgaagaatgatcataagccttacattcatctgccagtttcttgtaatagacctcttacagtcagctacatgaattacaaatctcatctcctcatcaccactcctcttccgccagggccaggagcttcaggaatcatggagaagtcaaattctcctaactacagtggaattcagtcatgatgcctgaggggtctaagatgtttttggaaatacatacatggaccaattctctaatggttgcatctcaaatataaaaacataaaaataaacgtaatctgattttcatccttgaataaaaaaaacctaagtaaccatgaacagctattttcttaaaagagcataaaggataataagtcatcaatgcagtaaattgtatattcccatcaaaaacctatataacctgccatgaccatataccatttacccaggctcaggtgggattgagtactcacatcattggccgttgagactttggcctgataatccatggatttcagggcatcaaaaatattcaaatctcagccagtaatttcgtcaaggttagattaacatatcaaaattcaaagtacagagaccaactactactgcaaaagtgtagagaaaacttgctgctgcaactctcccctcagatcctgtttcagatacctgcgaaaatccctgctgagcaagtccatcttcactcacctga

SEQ ID NO: 100266 - DNA, 864 bp, Vitis vinifera
  Intron number 2 from transcript GSVIVT01035732001 (locus G SVIVG01035732001) derived from phytozome v7.0 (chr-ID chr4 ; pos 3780816 to 3781679 reverse strand)
tgtgcttcttgtggaaaagtcacagaaattcttgggttagtaatattttcacataaatcatgatcagaaaactacttggcatgctatgaaactcgatttcatttacttaaaataggtggttgataagttctgactgtagaaactcttggcttgggctgaactgcaaaaatggtaaatgaaataaatgtaatgtaagggtaattaaaaaataggtgcaacaaagtttttggccagtacagcattctataaatttccttataaaattactcctttcccatgacaggttttttttttgtttgttttgataggtaacattttccttttttgtgtccttgggttccacctgaaccacttgcacttgaattaggcctcaaggtcacttttttttcataacagttatacccaccagcttctattttgagcttaaaatattgttaaatatacttaatttttctttttgtgcaagccataggttcaaaaaatgtagtatgacatgggatggttgctcaaaaaatgaggagccttgcactgctgtgtaaaactttttagagatgtgtaatagtcatgttaaacatcctgaattgccaacaatattaaaataatgttttaactcgagtctggaagttggagttttttggattaatttgcagtcttggataagagcgagattgtatattttaagatcaaaacatgaccagacagttaagattgggggattaattctctaatgtccttgtccttcacttagtggcaaaggttttttatctcttcttgcccttctagtactttccattagtattgtgattatcttgatagcatctcctagactgaattagttgttggggccttgaaaatctcctgcag

SEQ ID NO: 100267 - DNA, 597 bp, Vitis vinifera
  Intron number 1 from transcript GSVIVT01037389001 (locus G SVIVG01037389001) derived from phytozome v7.0 (chr-ID chr6 ; pos 14555109 to 14555705)
cccgattcgccgttgacgagcacaacaagaaacaggttttgttttttatttttttcaatctcggtttttactttctccgtttccgcttgtttcctgagaaattctctccttctgctctttttttcgacgaaggcagaggtttggcttatgaatttccaaggttatttttgaacaaaattcattcgttccagaagtataataaaatgttatttttagggcaaaagaatacgatgatgggattgaggtttcatttgttttttattttgtgaagtaaatcatcgtaaggagctagatccacaatttaattttcgtttctgttcccagggtttctgagccgccaaacgaggttcttttgttggttttttttttcctcttctaatcattccttgaaacacttgtgaaaatgattttttagatgggtttctgttcaaggattccccatctccaatagcagcagccgcctctatatccatttccaattttctctttttttttggttgctttgtttgattatgtaattttaattgattgtattaattcagttttgataaattggaaaagtctatactttttttcagaatacccttttggagttta

SEQ ID NO: 100268 - DNA, 696 bp, Vitis vinifera
  Intron number 1 from transcript GSVIVT01032760001 (locus G SVIVG01032760001) derived from phytozome v7.0 (chr-ID chr1 3; pos 960866 to 961561)
agagcggcgtgagcttgaactgaggaactttggtatgtgttggactgatcttgtcatctatcatttcatagttcctgctaatattaggtcccaatctcagcaaataatctgtcttagcacattggtactaactctcaaagatctcttctataaagcacctgattttataagatgatcaccatcattcattgaatttttgtgggtttctaggtttttttttattcttattgtgaagaaaactagagaaggaaaagggaaatgcaaaaaggaaaataaagttatggaaaaagaataacaagtttgagcctagtaaaatattttcttctttcttttcctcactttttaaacataaaattgggtttccctcttcttccatcatattcgcttttccttgttaatttgcatcaaccaagcaagagaaatggattttccttcttgacttttttcctctcagtcataatttaccagattcaaacagaactccattaggataagacttcttagatgtgaactgtccaatgacaagccactttcacaagcatccttagaataacttctctcttctgtttttctttttttttttgggtgataggtgagcatccttagaataactgttccccatgataataccatactgggagttcttctattgttaactgcaagctcaactcttttgcaggttgccaagggagaaaa

SEQ ID NO: 100269 - DNA, 506 bp, Vitis vinifera
  Intron number 1 from transcript GSVIVT01030602001 (locus G SVIVG01030602001) derived from phytozome v7.0 (chr-ID chr1 2; pos 7067098 to 7067603)
ccatcttagggtgagtgatactctctccaggctgcctgcctctgggtatcgcttttattattgtttttttttttttttcagaaaattattattaatccatgcatgtcggttgtttggtacacagttgattcttggttttacaacttgggttttctatttatttatttagggttgtttgtgtgtttttattttacttcttattgtatggcttgctgaggtaaactacactgatgggcattttgaaaattgaaatctgagggagtttttgatatcccgatgttcaatcttcttgttgtgcttcttctgctgatttcgcatatgggtatcagtatatggtgcccaaggtcttatagcctagattttaggtccatattattggatatttggctgttatctggtgttgaatcttcatcttctgggtatcatcctgaatttgatttgggttgctgagttttaagagaattcatgtttttgacactctacaggttgcttagtttctcgagtca

SEQ ID NO: 100270 - DNA, 869 bp, Vitis vinifera
  Intron number 1 from transcript GSVIVT01035565001 (locus G SVIVG01035565001) derived from phytozome v7.0 (chr-ID chr4 ; pos 2344467 to 2345335)
ccactcgtgttgttgaggtctctctttctttgctcaattttttgaatgaaaatatatattttttaattaatgtgaaagaactctgatgtttgcttgtggtgatcatgattggttttctgagttactgtttggttgttgagaaaaccgaggagtacgaattcaacttaggttagtggaagaattgagcaaataatctccacacattgttgatgtctgattgtttgttcttttgtgtcaaaatccctccgagaagtttggttgtcctgcaaacatgaaattactcgtccattgtttattccatgtatccataatggggtcattacaggaaaaatgatggttctggttaaaattccgaatgaatccatagcattggttttgacgattacttcatttgctccaatggcctccataagtgttggatttgtgccttcaaatgttagaatgaagattcaatttttttgattaattaattaacttagcatccatttgggtgtacttcctattttcttctcttaaaatcagaagatagtaacaacttttatataagacacaagaacctatagaagcttccagttttaaaaactattttgaaaaattgagatatcaaaaaattacctcaaatattaaaatttttgaaactgatatttaaagcatctgtacattttgtaaaaaaggtcctgcattttatatagaatttattgctattttctattttaaaaaataaaaaattgggtgtgtatccaaacagacatttatttatggttttaatttcaattttatgtttaatttcgctacttttccagtgggtggtcatgtctgagtttctttttgttttgtttaggttgttcggcacctcattcttgcaggac

SEQ ID NO: 100271 - DNA, 1001 bp, Vitis vinifera
  Intron number 2 from transcript GSVIVT01033772001 (locus G SVIVG01033772001) derived from phytozome v7.0 (chr-ID chr8 ; pos 17969585 to 17970585 reverse strand)
gtggagtacaggttcactgtcctgtgatattgaaagtaaaaaccctttttttcttctatattttttcctttcctatccaaaataaaaaacaaaatgaatggaaactaacaaataggaagaaaagatctcctggttacttgggtgcatacattgacaatttgaaaccttcagcatttttgttgagacacttgcataaaaccaatgttttccattcttcagaaaaatccaaaagcaaaatttccttttattttccttaactatctttttgtgcagatttttggacattgatgtattaatccaaattatatattataagaattactcgtaagtcattgtggaaaatatttttcatttttgtcctgaaacttgggcatttacctctgttccttgttttgctaagtagcatgtttatgtgaaaagaaaaattgcttttggagcaaggtagaaaagagattaaaaaacaactagattttaacattttccttgttgaaggaattctattagcattggatgggattctttgtaactacttcaatttcattatcttacttaaaattcttgcacatgaatttttctttttcacatttgaaatatctacttaaagctataattttctaaccattagagtctctttagagcacagggaaagaggcatgtggttttgtgtacagatgtttaattgggtgtcgtttaaattggcttttgagagttgtttttaactcccctaaaccccaatttcaactgaaaggacacaaacaaaaaattgttcggtccactgctcaatcttaacctgaatcctttgatgacagaagatttacaaagtggagcagacaatcaattcttacagggttttatcagtcctttgctttgtattctttagtgagagttatgatcttacatactttacgagttttgcaggttcaggtattcctgcttcccaggatcgggcctcaatttttatggcagcttaccatgatatttgtatacaggttggttggctg

SEQ ID NO: 100272 - DNA, 423 bp, Vitis vinifera
  Intron number 3 from transcript GSVIVT01036454001 (locus G SVIVG01036454001) derived from phytozome v7.0 (chr-ID chr1 4; pos 22241826 to 22242248 reverse strand)
aagtgcagaggcatttgcaattgcagtttttgcaggtagtggatttttctttttttctttttttccccctatcgtctacaactttggtatggtctgttcaattcctcagaaaacaggggaccagacaaaaaattttgaattttatgtttaatattattttggttccggtgaaatgaaaactcttcccaatttaagtgaagtacttgtattagtttgagtttcttggattccaaaatccaaataatgaaaaatataagacatgaatggggcttctttatttttctaaattttatttccaactaattgaaccatgctatttgatgttgctaattttttcagtgtatctaacaaaattgttttttctttttttttttttctttttttccaggaagaaaataggttgtgcacctactggtattctgg

SEQ ID NO: 100273 - DNA, 950 bp, Vitis vinifera
  Intron number 1 from transcript GSVIVT01033627001 (locus G SVIVG01033627001) derived from phytozome v7.0 (chr-ID chr8 ; pos 19126379 to 19127328 reverse strand)
gccgcagagttacaggtagttgttggaatcctttttcagtttttggtttttctgtttggtttatgtgaaaaccaaggaaaatgacaataagctaaagttttgaattttattgttcatcttctcatggtttataaatatataatggaaaaatcaatgaagtggtagttcagtacgtgtttgcagcctctcacaaagaaaaaataaaggcccgttatatatttgatatttcgtccgaatgaaaaattaaatccaaataattaaaatctgcacagtttcttggcgaccaaacagattattcagttgtttaaggtatttataattttcttaataaatgaaatttttattcttttaagtattggatgcaatttatttatgcaagaaaaggaagacatacgattgaaaaacaaaaaggaaaaaaatgtttaaccaaaatgcaaatggttccgttccttttctgtagtcacaaactagtcatattctcatcattgcaagtggaggtaaacaacatattctaaggggccaaagcagagtggctaaaatggttggaagcctttcatcatctggccatacatggttcatattatttcaaaatcattaccagcaattttttaggaattattggtacaatatcttatgatgatgattatgagcacacacgatttctggcgaaaacaccaacagttatttggttttatcagtcccaagtgtttgatggaagttcattaaagagaatagaaattttggtaagcttcatggtctctattttaaaaatacctgttagatcaggtcgttatccacctgcattatgggcatttatggctaatgtgtacagggactgaaagaattgaatgttcagagccattgatagacaagaaaaatcaagtgcttataatggttttctttttccccttgcagagagacaactgattcctacacaatcgctgcatcac

SEQ ID NO: 100274 - DNA, 787 bp, Vitis vinifera
  Intron number 3 from transcript GSVIVT01036092001 (locus G SVIVG01036092001) derived from phytozome v7.0 (chr-ID chr6 ; pos 20767809 to 20768595)
tattacagacttcaacacactgaattggctctcaagtatgttggtcttgtgtaatgcactattgacttttcatgtattattcataaacatttgtgctttcttgcttgaaatttcagcagtcaagttatattgtttttccctttttttgatacttaccattttttttgttcctactggaactcaaacttgaaacctcccttctttattgttgttgtcatttagtttttttttttcactaaataagatgatattgtcatttattactgagagtctgacatgaataaaagggaaatggctatgccaattagtttttttaaacctttattctgacactgtttgaatgataattttgttaaatcaagtcccaattatatgcagtggaaacaattgaggaattttatttgactaaagattatgaaggatgttgaatcaaaggtttcaacatgtggactgtactttagaaataatatattagcttgtcttccacattacttaccattaggattataggaggaactattgcttctatagtgattccattttgttctattaggtttcagcaacatgcttcactttttatattgtttgaatgctaaatcataggtttttttttaattaacttgaaaataacatcccgtctaatcataactttttctgtaagttatcatgcttttgccaaaatgttttaagcgatgtaagacgcagaattctatactagcctgtttatccatggcctttttgcttccatttgatttttacccctggccacatttttcattgatcagat

SEQ ID NO: 100275 - DNA, 672 bp, Vitis vinifera
  Intron number 2 from transcript GSVIVT01032440001 (locus G SVIVG01032440001) derived from phytozome v7.0 (chr-ID chr1 4; pos 27424324 to 27424995 reverse strand)
tttttctattatactcagtaagctatctctttcctcaggcttacctagtatttcactagcaaattatagattcattagtggaaatttggaactagctatacaatgcataacatctaatggattcataagcaaattcttgactatgtgaaatgacaaaatgtggacatcaaagtgggttgcaatttttccatttagaaagtttttaaaaatcctccataacacacaggaattagctgctgtccctggttcaaatggcttgaagttgtaaatatatattacttggaaatgaggcatttcacaaatgaatgttgcttacttgttaattatgatacttacctgaactcaaaaaatcttaaaccatttagggtgagcttgatacatcctcgtctaagaagcaatcgattacaatgtacagttcctactagaaactggaatgtgcatcaatcacaaatccaggttccttaactaactaagcttgctgggcattttttctcctcatttggggctctgctacattttcttctggatgataggctatcatgtcttttgaaactagctttcattttagtttaaagtatttgctttatgtattttctaacatcaagctgtgatgttttttcctttttatactgtacaggtggacctttacattggttactatttattttgggg

SEQ ID NO: 100276 - DNA, 499 bp, Vitis vinifera
  Intron number 1 from transcript GSVIVT01031210001 (locus G SVIVG01031210001) derived from phytozome v7.0 (chr-ID chr1 4; pos 1158634 to 1159132)
ctgaaaataaaaaaaataaaattgaataaggtatattgaataatatgcagattttctgtttaatcatagaaaaaaaatacgggaaaaactcatgtttgttgttgtttggaatgtactgtggatgtagttttgaaaattcagaatctcaataaatgcaaattcataattgactttcaagtgtccacattagttgatagagtgataaaccctaagctttgaagaattcagatgcataatatataaaaatgtatgtgtatacgactacgatgatgttgaggtgtttgtttggatactttagggtatctttgcttgacttttagattaacgcggtatctctagttcaactgaagcttccatgtattttccccagttctttatatagtatagcagttgagcattgtttggctactagagttttggaatttttctttttgatttctcttgaataatttgatggagagtttggcatctctcaaaaggtgttttggccaggagcagg

SEQ ID NO: 100277 - DNA, 812 bp, Vitis vinifera
  Intron number 3 from transcript GSVIVT01031210001 (locus G SVIVG01031210001) derived from phytozome v7.0 (chr-ID chr1 4; pos 1159346 to 1160157)
gaaccttttttccgagtgctggtatgacgagtccctctttctatttctagacaaaataaatttaaaccatagtgtctttttaagttgttcttattgcatcttgtgttgtttcctttagcgaagcttaattaatttgtgtcaaatttagagaaaaccgaccctttctgtgccctggtttccatgcatgatgatattttctgtttttattgttatatttgaggttggatctgaaacaaattactaaatttaggtaagagtggctaccatgccttttccgagctttgaattgttaactgccattgggtgatttggagttttccaaattttcatgaactgtcctaaaaaaattatagtgctttgatggttgcaaaattttgctctgtgaagggccatttttttttattgatttttcctcgtttggtctgtgttgacccgatttaactggctagtattgatgtgaatgaatggttgatttcaacctatcaagaaaacagagtaagaaaaaagaaaccgaatgaatgggaagtttcaagttgtatgattatgtagatttcttaactaatcatgtgtgcaataagactataacttaaggttaacatatctgtcctctgaaaatcagctgaaattaatattgttgcatgtttgaaatcctctttatagcaatagaagatttgatctgttcattggtactgatatagattactgaaacaattcatattgaatcatatttgtttccattactgtttgctaattattctgcatattgttcctgagaaggtgagggaggaggtggaacgagcaagtcggctctt

SEQ ID NO: 100278 - DNA, 483 bp, Vitis vinifera
  Intron number 3 from transcript GSVIVT01033674001 (locus G SVIVG01033674001) derived from phytozome v7.0 (chr-ID chr8 ; pos 18768859 to 18769341)
aaataaaaagggtcggtatttttcaatctcttttttttttcttcattctgtgttgtttgggttttgatatcgaaaggagaatagaaatgagagatgaaattggaaaataggaatcttattttggggctgatttggggtcacatggattcccttagattaccttttgctttttgtctggaaatgttgtttgaatgtttggtgtctgggaaaagttatgggttttatcaagggataaaagatgcagactctgcggataaggtttggcatctacgttttgtttctgtgtgcgctagcaatttggacatattctgcaatcttgagttatctttttctttcctttccttttatacttttctttttcctgtctttttcattttgaatactttttaattattataaaatcatattaaacactacataatattattgctatttcggtatttgtctttcaggttatctgctctttgtgtggcacagaacaag

SEQ ID NO: 100279 - DNA, 759 bp, Vitis vinifera
  Intron number 1 from transcript GSVIVT01033771001 (locus G SVIVG01033771001) derived from phytozome v7.0 (chr-ID chr8 ; pos 17973028 to 17973786 reverse strand)
ctctcgatcctcgcaaaatccaagagcacttcgaggttgtatccttcgtccttccctatttttttattttttttaataaattttgatcgtaattcatttgttgtgattttttttgttttacattttttattgtcatggaagtcgaatgggttttgatttttcaacttttttctcataaaccaaacaacaaattaggcttcttatctcttgtcggaacgcaattcctgaaattaaattaaattaaactgaaatttatgtttgctatatataaagaattggggtctgacaagaattgagaaaatacttttttcttgcatattctttaaaagatgctatgatatacaaaaacaattaaagaataaaaggtgataaagattctcccaaggatatctccatccgtagcatggaaagtcaaacaccctccatatctcccataatatctccatgcgaaaatcacatatcttcatatctccaatatacaaatgcatttcataatgtattttaaaaggaatatttccgatataatcacactattcacaccaggtggcttgaagggaaccacttagacgttctgtattgctttagctagctgatggatttgtgtatccgtcgaagctgataattttgaaatgcattcaatttttactcttctacaattattatgagtgctgttgccactgatgccgatattttctgtggtggtactggtttctgttggccataatgttattgttttttatgctgttttgcaggattttt

SEQ ID NO: 100280 - DNA, 1012 bp, Vitis vinifera
  Intron number 4 from transcript GSVIVT01035255001 (locus G SVIVG01035255001) derived from phytozome v7.0 (chr-ID chr4 ; pos 11496127 to 11497138)
acctgagagacgaagagctatctgggcaatatgtgagggatttttgatgttagtagaatgaattgttctctcttgtaggatctttatattcatgcttgagatgtgataaacaaaatggaattaggaagttctactgattctaattgtattatgtattaaatggtttgcgggatttcattaaatattttgtaaatatttaatcaccaaataaactgtcagagaacccgtgagcatataaggcttggaattcatgaaattgtttacatattagtcaactattcagtttctttcaaaattgggtgcatagtgaaactgtggttctattttgcaaatcataatggttgcctttcacttttttagtggtacaaattttagaagtgccaataggcattaattacaatctctgtaagtctttcaagaggtaatttttattaaagaaaacacagtgatgttggtagaccctgtaggtcaagcagtagatgattaaccacttcttttgcatttgaaagtacatttgattccttgaaaggaaagttcattttgattttactctccaacacagcaaaagtattaccttggtgaaaatgatttcaacttgttacactcaaattgatttatctacaagccacattgaaattcttgttttagtcattgaggctaaattcaggttttttcatgagttgggaatttgatgaatggtaatgagattttggcctcaatgcccaaaaatacaactatgagtttccatgaaaaatgaaagagataactctggtgtattatgtatcatctttcggcttatttatcttctagaattaattatttttttaaataattgagaaatttccatgttctttctttattatcttttactttcaacctgatcatagagtcaatgaattttgtaaatatgcacaatacacaagttcaatactgaaacaaagacgagaggatttatattctcttttgtttcttatgattctctctccatgaacagtgtggtgtcggagaacag

SEQ ID NO: 100281 - DNA, 581 bp, Vitis vinifera
  Intron number 2 from transcript GSVIVT01036736001 (locus G SVIVG01036736001) derived from phytozome v7.0 (chr-ID chr1 9; pos 23186208 to 23186788)
tgcgctccgaaggccgatcgatctccgagttcaaggttctgctccaatatctaatccctattcaatcaatcgacttatatgtaagatacaatcgtttgatgagaaaaatgaaagagaattttgaatcgtgaaatttcaccatctagagctcgtggatacagaaaacccatgcgactctttggcttggttcatttgagttttggattttatttttcgtttgttttggatttttggtaaaagaaagtgatagcgatataacataggagtcaaaatgtggttttcttttgtttttcttcattttcttggtaaccaaatagagggtggggttttagtctcgagtactttataacttgggaatgctactgccggagattttgaattctatggtttctctttgaacagccgttggaatagtttcaagtttggattacagctgtgactgaaatttttgttagattgtcggtctttgctatttgggaatgttttcttgtgcaaaaataattttagttagatgcagggaaaagtggtcaagtacctttagtttatttcttttctgctactaattcttcgcattcaggaac

SEQ ID NO: 100282 - DNA, 633 bp, Vitis vinifera
  Intron number 1 from transcript GSVIVT01034950001 (locus G SVIVG01034950001) derived from phytozome v7.0 (chr-ID chr5 ; pos 378958 to 379590)
actaatatatctaaattgagtttttttttttaggaaggtgtttacaataatgtgtgaaatgttaaaagaattacgacaaactccttcattttatctaaaataaaataaaataaaatattttgtttaataaattttcaaagtgaaattgataattgggcttgggccttgagcccatctggcccatgggccaacttgggtgaaacgaaatgggtcgagagaggggggcatatattcagttcacggcaatctttttttctctccttctttaatctctgacccttctcttactctccctctatttttcagtttccacctttttggagaattctaatttctctttgcccctcagatcctgacaaatccaattttcagttgtgcaaatcgctcttttctttaagacccctcattttgattaggtcaaaccaactccattcaattccaagaaaccgactttctcgcaacacccatctcgaaatttcatccggtaaggcaaatcccaaaccttgtcatgattttctgaaaagtattcgtaattttgattgaaattttcggtatgaattctggggttttcccagaagaggttattcttcaaatacttgcaagattgcctgtgaaatcagtcttcagaagcaa

SEQ ID NO: 100283 - DNA, 635 bp, Vitis vinifera
  Intron number 1 from transcript GSVIVT01038560001 (locus G SVIVG01038560001) derived from phytozome v7.0 (chr-ID chr1 6; pos 21830800 to 21831434 reverse strand)
atcagaggtgagaaggaaaggagggaaaagaggacttagtgggttgaaatgggtcatggttttcactgaaatccaggaataaatttccaggatttctcttccattctgttaaagtacaagccttttcaaccgattctgcagtttcacacgtgtaaattactcatgattttggcattctctgggcatttatcttggatgatttccataagccacagataaaacaaattttctgcagttttgtgtgtggctgttaccttggaatttgtactggaacactgtttcttctgggttgcaatccctttccatagggctgtgccctctggttttgagttgaggaagacttaacctgtggtttctgtaagttgttgggttgttttgggtttgagtcgaagttgattgtattgtgctttttgcatacatttaattgtattgtgttttcttgtttttctttctttcttttttatttttatttctgtgatttatgtgggtgttctttttccagtttgatttgtctgaactgtttttaggctttgtgaaagagaaattggggattttataattttgagtggattctaacttttaatttcctctttgacttgacattttcagaaggagaggaagcaaattcttgagca

SEQ ID NO: 100284 - DNA, 588 bp, Vitis vinifera
  Intron number 2 from transcript GSVIVT01035145001 (locus G SVIVG01035145001) derived from phytozome v7.0 (chr-ID chr5 ; pos 1853009 to 1853596 reverse strand)
atattctttcccctgttgatcaatcaccatataattccatgtaagttttcctttggttcccttcatgaattatgtagaaaaacaacttaaaaaacagtcttatagctgcaacatgagctttgggagttcaaaattcaggaatctatacaaaaccatggcatgaaaagatgcaagatttagcagaatcgacaattttctaatgcacatcaaacttaacaattggaacagtttttaaacttctaaattataattaactacaaaagaggcccttacaaaccagttgagcaactcagtcctttgcccctggtttctttaattagaagtttagatctgaatttaagacccaaataacatgaaaaggtgcatgtatacatataatgcaataacagcattaagggtagataactttccagtatgttacacacaaaattttcattttcttgtcctgattaaagaaattctaagttggtccccatttcaacataacgtcgatcctaacctagcaaagagcaactagaaactaaagtatcattattttgaaataatgggatagatcattctgtcatctgtttgcagctatatacccaa

SEQ ID NO: 100285 - DNA, 819 bp, Vitis vinifera
  Intron number 2 from transcript GSVIVT01031226001 (locus G SVIVG01031226001) derived from phytozome v7.0 (chr-ID chr1 4; pos 1047583 to 1048401 reverse strand)
gtgacgtaagtaattattttgttctttcaagggtaaaattgtcagaaaaaatcatttgcattttgagtcattgtccttgtatatgagtcatcttttcagtagaagggcaaaaaggagaagttgatcacgtgggaagaaattaaacgtcatgatgaagggtaaaatagtcatataaaaatgtttctacgactaaattaatattttggcattcactatgtatgaagtcataatgtttcatcaatagttaaaacggtcaaataattatttttaatgtgatttgacttagataaccttggttaaaattttatttccctttctcgaagggcacactatggtcagaaaaatgtggtatttgtggttagactaatatacccttaatagaactttttaaggtaattttgtcctatgaaaattttaaggtgtaaatggccataaattatttgtttaagggtaaaatagtcatataaaatattgatccatctacaatattttgtaatattgtagtgaattaatctaatggtttcataattggctttgatatattttttagaaaatataaacttatttgcatgataatgtgaattgaccattatacccttaatggaagtttcggggtaattatatcacttgaaaatgttaaggtggtagatggtcataatttaagggtaaaatagtcatgtaaaaattgacccatctacaatattttgtaatactttatagtggatgatattaatagtttcataattgacttttataaattaatttacatgatatgtgaattgactaatataccctttggtgtagattaaggtggagact

SEQ ID NO: 100286 - DNA, 488 bp, Vitis vinifera
  Intron number 2 from transcript GSVIVT01035634001 (locus G SVIVG01035634001) derived from phytozome v7.0 (chr-ID chr4 ; pos 2880367 to 2880854)
ttgaacgaagtatcaggtttcttttccattatttttataaattttcttttcagttgggttttgataatatttcagtttcgattcaataaggagtctatttttcttcaatttatgaaaagattatgatcctttttccttttcgaattttgatcgtttttcttttccacttttcaaaagattatgatccttttcccttttcggatattgattgcttttgttttttgttttttggatatttattttacccatcaaagaaaaaaaaaacctctaattcactagtacggatggcttgtgactatcaaatgtggatatcccattgatcgctgttaaaccttcaataatttaattgtactggttgttttaatcacctcaattatggatgtgcattgtaagagattgctgtcgaaaacttcttataagaaacagagatcactatacagtatgatatataattagcttacagtggtgagtttttcggcagtggcgag

SEQ ID NO: 100287 - DNA, 781 bp, Vitis vinifera
  Intron number 1 from transcript GSVIVT01038103001 (locus G SVIVG01038103001) derived from phytozome v7.0 (chr-ID chr5 ; pos 23508721 to 23509501)
gtggaggtgtgtctcttttgttaatcttcatatctgagttgctgggtgtcctagaaaaaaatggtttaatacttaatgttgcttctgctttgttgtgtttccatgcattttcatggctaccaaacagagcattagtccaatttgggaatttttatctgggtaagtgctattttccggagaaaattgtatgctacacgttgctgttgctttcttcacattttcttggctaacaaacagcgcaagttggggaagcttaatttttggtatctgttatttccccaagaagatggtataatatttaatgttgcttctgttttctcgattctttttcttttttccttttatgcattttcatggccaccaaacagagagcattagtccaatttgggaaattttatcctgggtaattgttgttatccagaggaaatagtccaatacctcttgttccacttgttctgttgggattcttttttccttccatacattttcttggctaccaaacagggtactattcaaaattgggaaattttaccttgttcaaatgcactttgatacacacatgaatgagaataaacgatgtataagaaagtcaatttgggaactgggtttcgatacttcagattgttggagctatctttgttttatatcattcaatttgatgttaatataaatttttgtaatgaatgaaataccttgttatcagtggtgccagttcgaaactaacattgatattgatttgcttgcagtgagagttctaaaagttaggggaacacgggttgct

SEQ ID NO: 100288 - DNA, 967 bp, Vitis vinifera
  Intron number 5 from transcript GSVIVT01038103001 (locus G SVIVG01038103001) derived from phytozome v7.0 (chr-ID chr5 ; pos 23510372 to 23511338)
ctgtaagttgacattatctttgaagagtattggaagcaaatttattatttaactatttatttactttttgttagaaattggggcggaagttttctatatgataatagaactgcactatagtgataaattacctatttcttattcttacatctcttggcttaacaaatagtttgctttgaagggacttgtgcatttagtgattaaaaagataggctagatcttgcttgtccattgcaagattcatcgacaatgaggaattccccttcctaggaagaggaaaattcttttctcctttgtaattaattttatcaagttgatctagaaccaaaagaatgagggcctcttatatttacaagactcaaagaaagatctgaaccctaaggccttgggagactcttcaaaagcttcctaaatcttatatgcttcccagacaactccaaaaacttctactgaactttgaagaagtctgaacaaagcttttagaatgtttcaaactcgtttgtcttattttacatcttctatataaagattaaataatttaaatatggctaagtttctaactaattttagttatattttattttcttttgtgttttcaattgtaaaaccaaatataagaaaatcatttttcttatcattttttccttccctttgcaccttcttggaaccaaacatggcataagggtcttaagctgttgagtttgtagaattttgagcagctagctgctgtctctagaaagttctgcccactatggggctcatttgtgtggtgtgcaatatataggagtctttttgaggaaatttctacacttcgtcaagggattatactaattaaattttaatatatatttttttaccttagtataagtatctgtttccaagcaatatagagtcaactgttatatgctgctggtttgttgagaagagatggtgtaactggcatctttgttcctttttttacaggata

SEQ ID NO: 100289 - DNA, 884 bp, Vitis vinifera
  Intron number 1 from transcript GSVIVT01033263001 (locus G SVIVG01033263001) derived from phytozome v7.0 (chr-ID chr8 ; pos 22045403 to 22046286 reverse strand)
gactctattttcccctgccactctcaatcctcgcagtcctcgcaggtactaatcatgttattttttatttttttgcatcccccgtttgattcccaagaaaatccatcccccatttgatttccgggaaaattcatccttgtttgatttccgagaaaatccatgcaaaacctccaaggaaaaccaaaaaaattgattttttttgctccctgtgttttctggatatgttctaagggtctctttgcttttatgccactggatttgaatttcatgttcgtaggctgaaaagcacaacctttgcctgcaaatcatgatcagattaccaaataacatcttatgttttaaaaaaaaataaaaaaaaatgggcagattttgtatcctgtgcgcgggctggactggactggtaggaaatgtcgggaaatttcccgaaaaatcggtaaaaataccgataattaccgaaattttccgtctatcgaaaaattatatgtatatatatcaggtatatatgtttggttcccgggaaaatgctaaggaaataatgtggaaaattattttctaaaaaatataaatgaaaatattaaagaaattatcttcacataataaaattaatttggaaaaaaaattttaaattgtgaattaaaaaaaaaaacttttcaaatattgtaagaaatttggaaacaatttaaatgtagattgtttttagaaaaaaaaatagaaaatagaaaaaaaactaatatttagctaatgatttctggttcttcatttttttcattttgttggatattcttctttttgttcttttgtgttcatcttgttatttttagtttttctttttcttttttgttatttgttttacataatcatgtctaatgattttttttttcagc

SEQ ID NO: 100290 - DNA, 345 bp, Vitis vinifera
  Intron number 1 from transcript GSVIVT01035572001 (locus G SVIVG01035572001) derived from phytozome v7.0 (chr-ID chr4 ; pos 2397313 to 2397657)
aagggattgagttccttttatctggtgaaggaaaggtagccatgtaactctgaattctttgtctattctctcagccctgttgtttgttgtgacttctactagaattccaaatttaagctcttattacctattacatgctttggaatgaaccattatttggggtattttctgaatcaatctgtttggttgctgagaagatggataaaagaaatagaaggatcttttcaggaacccaatagagccatgatgtgaaatttgcttgtatatatatatatatgaaattgaagcaaaataactcatgttttgatcctgttataggtctctttatcatcaactgaagggaag

SEQ ID NO: 100291 - DNA, 973 bp, Vitis vinifera
  Intron number 1 from transcript GSVIVT01033879001 (locus G SVIVG01033879001) derived from phytozome v7.0 (chr-ID chr8 ; pos 17064515 to 17065487)
gcgacaccaacccaaggtgtatttatggtttaaaccaaaattcggattctttttagctcttagagaaggaaactagtcagagaatggtatcccgagtaaaccgttttctccgttttcttgggaaaatggatgataacgttaattgtagctatgaatttttgtctaaccaagaaaccccacataaccttgcctagtataaatatttggctcagttggattgagcttcttggtttttggaaataacctgaatgttctcttggcatgtaatttctattgcttgaaggatccagagttcgtttgtattttcatgatagtttttgttcttttggtgttctgaatgaatttctgaatctcatggcaaagtgggattccaaggtttctcattgcttgaattgactgatttttcaacatcttagtgcatttttaataagggaaaagaaaaggaaaggttgaagatcacttaatatggatttcttcagttattgtcagattgtcctttactttcctcgattttttcaagatccaaccagtgcattaaactatgtacataaatttgtaaaattttggttttgggaatgaatgcttgcactattcaattaaaaattgtgagaggcctaattgggtttctttgtcatatgtatttagctcttttctttcttgcttgtttaatggacaaactaagctacaatttgtactgaatatggcatgtgaatgaaatatcctatttgctgattatattacgaggaatcgactttctgttcaggtcttgtatcactttcagcatctatcaagccttttttccagtgggacatgaatagatagattgctctgctgttaggtgttagtttgatagtactgtattcattttcctaacacttttttattgtgatctatggtttcatggagtgtgttttttattttacgatttcattttgcagcaacttctgcattatagaaggaccggagactgtcc

SEQ ID NO: 100292 - DNA, 686 bp, Vitis vinifera
  Intron number 2 from transcript GSVIVT01032998001 (locus G SVIVG01032998001) derived from phytozome v7.0 (chr-ID chr1 4; pos 24972481 to 24973166 reverse strand)
cttaggtctgtcgtgcccaagatcagcaaggtaatcaatttctatggcacataatgcttttcccttgaataaatttattaaaaattgcttcataggtttttcttgataatcttcagttagtgtatagattctaccattaagatatatgacacttgctcttgaaataacttccttattccatttattctagcttaatgttttttcctttcaatgttttctcttttcctttaggctccatttgattctggaaacttaaaattgacttcatttcttatcatttttgaaccatttcctccttctttgagagaaagagccaaatagagttgttttggaagttatgtaaccagcatgtaaagtttagccgttatatttactcttgaagtaatctctcatggaaaggatatgcaaaggactatgagaatttatgtggaggaacaacaccctagaagaaattccagttaaagattaagttataatcttttcatctcaaaagaaaaaaaaatgaaaataaattaagccgcaactttataattttgccattgtgaatccaatgattctagggaagacagtatctgaactgtctcaaatcagggatcagttgtggtttcttcaatgacacaattgctttggtgtttttacgcgtttattaatgtgtctattacttgaactaatgctcaaatttgcag

SEQ ID NO: 100293 - DNA, 916 bp, Vitis vinifera
  Intron number 2 from transcript GSVIVT01038569001 (locus G SVIVG01038569001) derived from phytozome v7.0 (chr-ID chr1 6; pos 21791913 to 21792828)
gggacttaaagttggttagatccctgttggatgtaactcctcttttgcatgagcattgtatttgtcaccctgatttagcaaattatgtttactgttaaatagccattcattcctttggtttttcatagtaattattcatggcacagtagttatctgaatgttcccaattggaattttgctatacttcatgtcagttataaaatttttatggttaacaagaggtgcttgataggatgggtttaagataagtgggtgagacccaattcaggaaaaagatcaaaggcctagccaatgcaagcaaggctggaaaaagaataatatgttttagagagttgcaccatcttcagcatagtgaactatgaacattttagaattagataaaaaaaaaaaagaaaaaagaggaaagcaattggagattaattccttgcatagagaatgggttaaaattcatggaaatgggcctctagatagaaagaaggattatggtcaggaaggctctttcaaaaatcaaactcacacaatattttcttcaaaaaactaatctagagcttttagatagaaacatgtgaaagccattttagagggcccatttagagagtggtttctctcctgaagaatggagcttgtggaggataacctgttatttgggatttctaggatgtttgttagtatagaatagtatccttcgaggagctttatccttactggtcatattttgtcctactctggaggtgaaatggtggttgcttctacctttggtcatattcttgcatatgttactgaaagataatgggctacatcctatgtcaatattggaactcgtgtaacttggatttcacatttcttttattttccttctaactatgttttcttgtttcttttttttttctcttttgttcatgttcatgatggccag

SEQ ID NO: 100294 - DNA, 897 bp, Vitis vinifera
  Intron number 3 from transcript GSVIVT01036785001 (locus G SVIVG01036785001) derived from phytozome v7.0 (chr-ID chr1 9; pos 22576208 to 22577104)
tcatcagctctctcatatttcttgttttgctaactgtgagttccagaaagctctacatggatatcatatttctcttatgatgtgttagaagaacaatttcatttacttaagataaaagttaattcgtgtttatttcatatgtctctaagctttcataaagtactcatggaagttcgaaagatcgggttatagagcaaaatgtgcatgttttctacataataattattttccgttgtaatcagttgtttttgaaagtcttgctcaaaatttgtagcatcagaaaattattctgttctttgtgagaaagtcatcggaatgaattttgtataaaattgcatgtatcagtggcatttgaatcccttttcaagtgatgggtatgagtgttatttgtttatctccgtttcgatattatatgtaaaggaatgtgtgactctttatcatagtggttgtgatatataaatataggtcgtaaatatagatcgtgtactttggtgcaccctatttcaagcgcttatatattctctcttgatgcctactacatactacatacatacatacatgagaattttcagaacatgttgcaagcttgctttctgcaagcagaatttccgtttctttgctttctttgttttgttgctcaagtggttatcttatcattttgcattggtgaacaatagttcttgatgcttggcacttattgttttgtttttgatgttacatgatcataagttataactcctttgttacactttgtaacattttttagttgtctgccaagacctactaattcatctttttttagtgtatgattagcaatgattagattaagcatgataatttgcattcatttggtttctccccttgcagtttattgggaatatccaggaaacttgtggc

SEQ ID NO: 100295 - DNA, 807 bp, Vitis vinifera
  Intron number 1 from transcript GSVIVT01031779001 (locus G SVIVG01031779001) derived from phytozome v7.0 (chr-ID chr3 ; pos 4300206 to 4301012)
gcagacgatctctgtttcttcaccaaggtttgttgattcatctcctcacaaaatggtattctatgaaggagcgaacgtgtatggattgtttgggttacgagtccagttttcaattattttctattactagaaatttggttggcatgtggtgttgtctgatctaggtgtttgaataatcaaatatttttttccaacgtttccgggttttgttttgctaattcattgaactgaagcaaacccagatttccttttcctttcttcagagtctggtaggattgagaatttcagcttgaatcatttgatttttgtttttgttttttttgttttgttttgtttttgtttttttttttgttataaaatcagttatcattatttttttgtgggttatcttctagttagagaatgagggtatacattttctagcccaaccagattgattttttctttctttcttctttttttttatttttatttttatttttattattattattttttcccttttctctacccctttttcatcatctgggtagctcaatccgaatggattcctattcctgcttctagttagactatttattagtgcccatgtcatataccccttctgatttaacccttgtgtcctttgggttgctcgatcaaattggattatcggtctcagggtagataatttcagcaatacccatgtcgtttttaagataatttcagcaatacccatgtcgttttttcttgtgatttgcccattttaactctggccacccttgaatcacaggattccttcgtcttcaaggctcctaagaaatctcc

SEQ ID NO: 100296 - DNA, 708 bp, Vitis vinifera
  Intron number 1 from transcript GSVIVT01031132001 (locus G SVIVG01031132001) derived from phytozome v7.0 (chr-ID chr1 4; pos 1869740 to 1870447 reverse strand)
agagttgaaaatttacggtatacgagggagataaggttcgaattaccgtcgtaggatttctaatttcttatcgtttttccttcgttttcttttctgctagcgtaatgcaaaacatttttatcgttggtttgatttgttctttagttattattcactttgtcgactattcaatcagcgttttgataacgttcatttgtatgttttgtttcgttttttggtattaattatgttttatcaatcaaaattatggagtttgttgttgacctagggcatgtttgtatttgttctagcattttctgttcacttcaaaattgctgaaaacagcaacttgtttgggaatcacagtcaaaatctgtttttttaattactcaaaacagataaaaacaccttttttttttggagtagaaatatttttttttcttttttaatttatgatttgttcctctcaattcaatgtttttttcgaattacatgcagcaatcaagggttttatttcttcttttgtatattttttttctttgaaaaagaaccacgtttaaaaaaataaaatacaagggggccctaaattgtagctatttgatggtgcctttggcgggttatgcctttccgaattcatggcatgggtttaattttggcgatttcattgcacgtatttgatcccatcacaatcatttttttaatcaaatcttatgatggtctcaggcaaaa

SEQ ID NO: 100297 - DNA, 610 bp, Vitis vinifera
  Intron number 1 from transcript GSVIVT01035128001 (locus G SVIVG01035128001) derived from phytozome v7.0 (chr-ID chr5 ; pos 1683183 to 1683792)
tatcaaccctcctgtcaattccctctcttttggtactcctctttaatccctcgcccttatcagatctcattcatctcttcaatttttccacctccacttcacatcacacctcaattttatgcttgcctgttcgtcacacaggctttgattttgcccaaattgttgcaagtttttgaattgtaactgtggaacgctagaattgtgggtaattgtgaactgggtttgggtgtaatattaacttcatcaattggcaaagcaagtattaaatgctaaaagtgcctagaagctttctattgggggactctgatctgcatacgattttgtgtatggggatggggtttttcttcaaagtgggatttattcatggtttgacttgtagtgacttgaagatcaatccataattggtattttcacagacttgatcgatgtattcttttcttcgcgtatctaaatttgtttttgcacattcatgctaagaaaataatagactggttggtgttttcggtgaattgggttgttatcccaccctgatcagaaaggtcaatgctattggatgttttgctttcgatgggaagagtgttccctaaggttaagatttgaagtgctgctg

SEQ ID NO: 100298 - DNA, 726 bp, Vitis vinifera
  Intron number 2 from transcript GSVIVT01033851001 (locus G SVIVG01033851001) derived from phytozome v7.0 (chr-ID chr8 ; pos 17249450 to 17250175 reverse strand)
gattccacctgacgagtatattctagaaattgctggtactgatctgatttttttattatttctgctattccaacttgtgcaaattgtctgtttatcatttcttaaatgggcagtagaagcgtacaaatggaaatatattttgatggttaagagtctgttcaatctgtgactgcttaatctgcgcatggaaccagcattgctagtttgttattcaaagaataataccctgacaattaaacaattgcttgcaagtatttttatcttaccttataacataaaatctgatatctctaacattagcatcttacaagtttctccagattcctatctgaatagggatttttttatcttcttgctgcacatattcctgatgatttcaatattatgaaatatttttatgcagtttccaaaaggaacctttttttgttctagtgaaaaatgtaacataaaaaattgcaatttctcctcttgaagtgttaaaacataattctatggctttgtttgtacattcaattttttggttaatttccaggttatcttctgaaagaagttatgttatttaacctccacatgtatatatatatatatatatatatatatatatatatatatatatatatttgaattagttcatttttatatttttattatatgttgatctgtgagtttatggttacactctattatctaggtttcaaggtgaaagagacttcaaaagtgggccct

SEQ ID NO: 100299 - DNA, 429 bp, Vitis vinifera
  Intron number 1 from transcript GSVIVT01033851001 (locus G SVIVG01033851001) derived from phytozome v7.0 (chr-ID chr8 ; pos 17250171 to 17250599 reverse strand)
atacttcggcttgggacgggtgtttttgtttccgggtatggagttttctttctgattgttttggtgtagtttaccctctgtttgagttctgggaaactggaggacaaagaaaaggaaataaaaataatttttatttgttcataatgtaagactatcttcccaattcctggggagtctaaccttattctaaactaatacttccaatacaacctaagaaaattatggtctgataatcagatgtttacttggttgatacattcttatagcaccatctgcttaattgatgagatgagagaagaatttgtactatgcttttttttttttttttcaaatctaatggtgggcagttgcagggtttctggattttcttgaattttaccttgtactttggcaggtattctgcatcttttgtatccgaaagtgagattc

SEQ ID NO: 100300 - DNA, 703 bp, Vitis vinifera
  Intron number 1 from transcript GSVIVT01035394001 (locus G SVIVG01035394001) derived from phytozome v7.0 (chr-ID chr4 ; pos 980834 to 981536 reverse strand)
tcagtttcttctgtttggttgctcagaaaacgaaggtaagggcttcactaaattacacttcggctcctattgtttttgcttaattctatttttatatggtttttccgaaatgctctgcttggctgtgggaaaatttgggaacggaacagatgttgattcttcaacttttaagcctttgggtttttggaaactaaaaccttcctgttaactgaagcctgatgctattatttggatgtagaattttgattatttttcttttttccacacatttttctgatcaaccgagcaaagctcggcatttaagcttaatttatttttaactgtatctattttcagctcatttttatcactttctttgaagatgaattgtgtatttggaggatatgtgttttatgttgtttattttactcttgagcaatgcggcttccatgtttgttgaaatgtcccaaaaaaattcatatactgtgaaacctgtggttagcgtgaatcaaacggttacttatgtactgggttttgtgtgatttttgttttctttgatctctgattcattgttatagattttcaagttgctggctgcactcttgttaatgctggtgacttttcaaagctaattcttctaggaagtgcagttcctagaccttgaaattcagctggactctttggtttagttcatttgcaggaattttcgggtacttgtggggaa

SEQ ID NO: 100301 - DNA, 889 bp, Vitis vinifera
  Intron number 1 from transcript GSVIVT01037405001 (locus G SVIVG01037405001) derived from phytozome v7.0 (chr-ID chr6 ; pos 14279978 to 14280866)
ctgcttcagaaccctcaagctaaccactcctagctgtaagtttatcattcctttctacttccggctatgatggtcaattaaactagacattcaaatcgtttagatgagtagttatgcagacccaggtgattttgagatgaaaacttgtggatatcattttttattgtatgtctatttattgcttgtctttatgcattgtaatattgggattattttgtgactgatccttccaaccaataaagttgttttgtgacttatgacatcgctttgattctcaagtatggtgttcaataaatgttttttatcaagaggaacaaaaattgttaatgatataatgaaatttagatagcaatattgattgacttctaagagtggcatgagaccatcacatgctcctatcagtgcacattcggtcagagatttgatacttggaggtaatgtggttgaagcactcacccttctttgtgtctaagactgaatgactgtctagggtttcagactcaagtggattaatccattactccaatagcatgactactctcacactgcaataaggtgaacagaacttgcaataatccactaagctattgtactcgtcaattacgtaactgtactcatcagttgtattactttagagtagagccagcacaaagaatattctagacagacaattgttaattttttaatttttattatttctgtcatcttttagtgtaacaggaagatgcttcttctcatgatgcttttaatgcagagatatgatgttaatcagtcttttcttttacaactacttctctgccatgttctataaagatatatgctgactaacttttatgttacatttattattattacagttggtgatctgaaccatttgatctctgcaacc

SEQ ID NO: 100302 - DNA, 869 bp, Vitis vinifera
  Intron number 1 from transcript GSVIVT01032856001 (locus G SVIVG01032856001) derived from phytozome v7.0 (chr-ID chr1 3; pos 195543 to 196411)
tctcaagatctccaggcttgccaaatgtatgcccatcgccttccttattttccttccatttgttagtttcaattgaatctttgataatttatcgtttgttgtgcgagaaaacgaaagcagaggcataggattttgaattttatcttttttttgtttttctatgttttcttagcaacgaaacgccttgcataaagaatccaatgatttgcttgtcttatttgagaattaagctaacgagagaatctaatacaaaatttcaatccctttttggtgaagttagagaaaaggatgcaagaatttatcaactatacctcacttccaacatccaagcagattatgacgaagtaaataaataaataaataatctatcttgggatagaggtttgagcaatctgcagaactaacctaattcacatgctggggtagcaatttccatcgccgccagcaagccaagtggtttgtaccgggtgaggcaaatcagcagattgagacttaccggtgtatggattggggtgaaaataagtgctagcattacaagctcaagatgtcaatcagtgagctacaaacctgaaactaaaatatctattttattaaaaccgaacttcaaatagtagctgctgctcttgtcttacgttgaagagttggatctcagggctaccttactctgcattttgtatcatcatgtgcaatttccctaaatcttgttttcataggccatattttggagttgttatttcaaaaagtctgactcattaggtttgatattgggcctggaaagagttcaaattatttctgttacatgttgttgtgctgacattaagttttgtgttttacatttgcatcaacttgcagtggcaaaaaagtcatca

SEQ ID NO: 100303 - DNA, 637 bp, Vitis vinifera
  Intron number 1 from transcript GSVIVT01030565001 (locus G SVIVG01030565001) derived from phytozome v7.0 (chr-ID chr1 2; pos 6779251 to 6779887)
gcaagttttgcttggatataccagccctggcggtaactctgaactatagaatttttggttttattctactgtttggttcctgtgaaaaatgttggaagtgaaaagaaattgacgccttaaatcttacatgttatgtttgttgggtttccaaaattatgaaaattttacctgagttgagtgaagggttgctttcatgggtctcgaattcttaaaagtttaagtttctaagttttttattccccagattttcttgttgtccaaacagagctttgatgaaatgatttcttttgtttttttttttctttctacaatttctgaacattttatgctttatgctaacttggtttgcaaaacgactgttgactggaccatttatttttttgcttaggctataagtaatgaaacatctcagattacgaacttagatgtttttctcttgcattctaactcaccaactgaacagttatctaatttacggcaactgtgacactttagcttttcattgtttgattggtttcttgttaaaattgtttgccattgtaatttcttgaattaattggatcccaatggcttattgttaacattattttgtattgaaccagttactgcaattaataacttatacgctgcattgggt

SEQ ID NO: 100304 - DNA, 1017 bp, Vitis vinifera
  Intron number 1 from transcript GSVIVT01034283001 (locus G SVIVG01034283001) derived from phytozome v7.0 (chr-ID chr9 ; pos 14067944 to 14068960 reverse strand)
aatctttacaacattcagagttaccaaagtttataattcataaagacctcattaacagtgaggaacaactaactgtaggtaaccatgggaaaagtaaggaaaacaaaatgagggaaaagcaaggaattaggaaaatgatttcatccccataaaaaaaaaattctaaagaataaaaaggtaaaagaaagttttaaaaaaaatgtatttttcaaaaatttgatttctttgctttcattttgctatggacaaccaaacaagaaaattattttgtagttctttttttttaaaaaaaaaaaaaaattctttcattctctttttttttccccctactttatttcttttgcctcaaactttcttcatagtgaacatagcctaagataaataaggaagaaattttttagtatttatttaattagtttgaatttttcttactttttttttgtattttatccaaatatacgaaaattatttctttatttattctttttcctcctactttttaggagtgaatcatactttaaaagaaaattaatttttaattagaagttagatttaaggagaaacgtggatcatagataataaaaaaattaaggaaattgaatttttgaaactaagtctaatcatattgcttcatttgatacaaatttgaataaaaattctttcaatgaaaattcaaggaaaggaaaaaacatttttatgtatagataataatactaaatcttttaaaaaatctcctaacatcatttatgttcatctttctttttatggatttgaaaaaatcaataatttgaagtaaaagtttactgttgaagaagattataaatattataatcaccgttgaatagataatgttaaaaatatttgttgggaatttaggtacttttatagaaaagtggacaagtgttctagtttatgaaaacaatgcatttctttagttaggtataaaaaaataaaactatcggttttggtcatttatttaaagtagcaaacgtcttatttcattttgtatttaagaac

SEQ ID NO: 100305 - DNA, 990 bp, Vitis vinifera
  Intron number 3 from transcript GSVIVT01036004001 (locus G SVIVG01036004001) derived from phytozome v7.0 (chr-ID chr4 ; pos 7009853 to 7010842)
ttccgcaccctcttcagtacaaaatcattattagggtttgtacttcccctccactttttgtttcccccttgggaaaatggaccattttccgttgaaatgaaacgaggggagctcagaaaaagatcatttttcgttgcgaatagattcttttgattgagtttattggaaatacactgcgaatttttctgtagattttgcaggtcattaaaccatagtggttgtctaattcatcataggtctagggtttatcaaaaccctaaacaattatcttgtaattaggagttcttctagctgggaattagatcaaataccctttgcattgattgaatgctcaactgctcatttggtccagaaccccaacttggtctttgagaaagaataaaaaatagaattatttacacctcatatagtttgataccagccctattaatttggttgtttctgttgattttattgttttgattgttcttacggatctgatttacattcatgctgttgggtgctctattgaattgcatcatttcatcagaaataaaagaggatttgaatatattgtcaggttgatcccatttatctgattaagtgctgaaggaaatcagctctgtttcatgactttagtgtttacttttaatcaattataatttctgattcagatgttagaacttctcaggagttgatctttggggcagttgagatattaagtagggccaatggggcagtgggcttcaatcccttttattgatgttaacatgacatgctaatgacatatgttatggggatgaacttcattttagtgaaacctattttttttattttcttaattcagaatatttacatttgcatgtttttccttttaagtctctggtttctgtagttggtgaactaaatcagagtgaggcatattcagaatccttttaaagttctggtgctcctggttttgaacaatttggtggtgtttttcagattcacactaccagtcagtcttcacca

SEQ ID NO: 100306 - DNA, 1005 bp, Vitis vinifera
  Intron number 1 from transcript GSVIVT01033467001 (locus G SVIVG01033467001) derived from phytozome v7.0 (chr-ID chr8 ; pos 20446536 to 20447540 reverse strand)
gtagacaattaccaacgagtgattccgacgaacaggtgagtggattactgctttcttagtctagtttttgggggtttggtccgagattgaaaagggaaaatgttgtgttagggtttactatcaatggataaaaaccgggtgaaatgggaaaattttgctgtcatatatcttttggttcaattaacgataggaaaatattgtcacagggcttatcatcaatgtaaaaatcttgtattagggtttatcatcaatggataaatacagaagtttgcctcttaggatgcgtttggtattcgggaatggaaatggagaggaatcaaaatcttacaaggctctgttttggtttccatgataataatttttttattcatattcccatttcgcattgtaatccaaacacgctaatgcataggaaatggaatggattttgcgtgtttggtagagtgagaatatgatcggaatggaggtgaatcacaataccatgtggaaaggagaatcaaaagcttggtaagtgtgggatttggtttcccattctaaaaagttatccaaacacagtaatgaatgcgagatggaataaatttccctttcacattctttatttcaacattccaaacattctttggtgtgtgggaataggaataagaggaatagaaataaaggtgaattataataccatttaagagataaatcaaaattcttacaacaatgggttttgattttcatgaaggtgaattttttattcatattctcatttctaataagtaatccaaatgcataaatgaatgggaaatgaaatgaatttctcgttccctattctcacataccccttagagtttatcatcaatggataaatacaggagtttgctttatcttctgtttgtgtgtgtaatgcttgtcactcgtatgaagaactatggattacataactcttgattgtttctgattggtattcatgtgttcttgatgacaggggcaattgcataaaattatataggtaatatagaa

SEQ ID NO: 100307 - DNA, 677 bp, Vitis vinifera
  Intron number 2 from transcript GSVIVT01036278001 (locus G SVIVG01036278001) derived from phytozome v7.0 (chr-ID chr1 4; pos 7599504 to 7600180)
ctactggccaagctgcctgtggcaagtgcttgaaggtaagatcaatcatatgaaaccggttcctcaatttctcatgtatgtttgttttttcttaacattttgttgaaatttatatgtttttataaaatttaatcacatttagtgtgatatcccacgttgaataagtacgagcttattttaatcttgtacacacattttaaaatcgtgaggttcatttggatgaacagcagactacatggatgaatacgggttttgaaatctttataataaaaattttcaagtgtgagaaatattaaaaacactttataaacttaccatcaaacacattctaaacttgtttataaatagtaccatgattgcttaatctaatcattctttctcgaagtgctggagcttctccatacctctgttatttgttttccgggtcaaattcttcttggtatccatctctatcctgaatttggagggtccagtagcgagaaactctagtaatttcttagaaaaaaagaaactattagtaattaaagccagtaattcaaactacaatatctttcgcaaatatttatttagacaacaattttatttttatcctacaaattttaattttgatagcgactttatgtgaactggccataattgcaggtcacaaatactggcacggggacacaagcaacagt

SEQ ID NO: 100308 - DNA, 410 bp, Vitis vinifera
  Intron number 1 from transcript GSVIVT01038387001 (locus G SVIVG01038387001) derived from phytozome v7.0 (chr-ID chr9 ; pos 11557501 to 11557910 reverse strand)
ggtatgtaatggtttcttccattaaattctttgaatattcgtaacttaactagtcctggataacaccttgagttctcattgtgatcttatttgtcattcaactattagtacttggcctgttgattactagaactccctggctattccaaatcagtctgaaatgactgcaattgctgttttttctacccttaatgagatgcattggtttccttcactctgttttacttttattttctttttgctgggtttatgtcccaaaaagcttgcatggttggcatttgaactccattagaagcatcacataacaatccataaggaatgtttcattaccaaaagctcttgtcatccagaactatcctcacatgcatacatcttttattttagcaggcaatctgaaacacaaatatttg

SEQ ID NO: 100309 - DNA, 657 bp, Vitis vinifera
  Intron number 1 from transcript GSVIVT01034576001 (locus G SVIVG01034576001) derived from phytozome v7.0 (chr-ID chr1 8; pos 19179787 to 19180443)
caaggagtgctgaatcctttgagaaactcgataaggtgaggcccttctgatttttttattttcaatttcttttttctttttttttgtatgaatttcatttgtatgtgtaggagtatgcaattaaccaggaatgattttttttttttttcatgaactcatcattgttgaagtggttatgattcgaatatttggcaattgtttgttatgttgaagggttctctggttgtaaaagcagagtggaagggattgtgtcttgcaattgtcttttcacctaatctctcattttttgtgggtcaccctactttttagaagaaatctttctgtaactctgttttctcaggactagttccgtttggtttctgggaaagaggagaaaaataaaaaatatagttttggatctcatgtttctttccttttagttaccaaggagtacaaaactcagcccaactgaagtagatggttgtattaggctgaggcaagtggagatctttactaattattgtttcaatttattttcagtttattccctttgcttaattttctcagcagccaaacagtgcatacataagtctactgattctactggggaaagaagtagatatttgaactgaattttgatgtgtctggtattacagataggccagggcacctacagta

SEQ ID NO: 100310 - DNA, 316 bp, Vitis vinifera
  Intron number 2 from transcript GSVIVT01030822001 (locus G SVIVG01030822001) derived from phytozome v7.0 (chr-ID chr1 4; pos 16884911 to 16885226)
ctcattataaggcttcacaagctgttgggcaacaggcaagctccgtaacagaagtaaatcaattactaggaatgtatcctcacattaggacgtgaaagccgtcattgtttaacatagggaggggaaaaaaaggaagaaagaaaagaacaggtttccgagtaattcttaaataattttaatttcaatttacaaatatatcatttattttattttatttttggagcactgacttggagccttctgaaattgtatctatcaaaattcgtttttgatatctaccagcttaacttctatttctatttactctcttgtgcag

SEQ ID NO: 100311 - DNA, 562 bp, Vitis vinifera
  Intron number 4 from transcript GSVIVT01038496001 (locus G SVIVG01038496001) derived from phytozome v7.0 (chr-ID chr3 ; pos 10402492 to 10403053)
tgcttctctaaggaaggatcacactaagaccttgggtgaattcttttttggaaacctcaccattctcaacaattgttctctaattttatttactattgtatatttgtgtttcatctatagtgcattcataatcttccatgggatgctctatatgtaatgtatttgtttgttggtcttaaatttgacttttatgcgcttttcttgagctctctatctctcttactcacacacacacacaatggaagttgtatttatgagagaataaagaagggtttttccattttgagttggtgtatttacggtttaccataatgatatgtagaagatacacttgtaaagagagctttccttaaatcttgaatttttcaagttttagcactcttctataggcaatctaaatgagaatgaatatgttttctttagtaatgattaattcgttgcaatgtttttctttttaagcattcgaattggcaattttcatttctaagtgtttatctaatttgggttgatttctttcctactcctagcctcaaattcttgcattcgtgatacctttactttt

SEQ ID NO: 100312 - DNA, 842 bp, Vitis vinifera
  Intron number 2 from transcript GSVIVT01035389001 (locus G SVIVG01035389001) derived from phytozome v7.0 (chr-ID chr4 ; pos 944311 to 945152 reverse strand)
tgtggtgtgaagaggtttgcctcaacttgcagtagggtggggtttcactaaaactctgattcgtggcccttcattatcagctatatagccctaataaacttgatatactttactgactcaatatctaagtaacttaaacttttagatcaattggtagcttaacatgatattagagtcattcaacgggaggttaatattttgaacatcaccacatgcttatttctcctgatttagatgtcgaacacatgcaaattcatcaaaaaagattatccatgaaaaggggtgttcgggtttttatatatatagttaacttcctacctaacaacttaagcttctaaaataattggtagcttaacactcatctcagtaggcatcatgatggctttgctgtttggcttacaaaattggatgcgaccgtcacgaaagcagtaatattttgctttggtgcatcaaaattttgatcactacactaatcatcctatcttgagttgagcaatgttggaaccaatgaagagaatgagttcctattttatggaactggttggatttgaggtataattactgaagaacttatgcttcaaaggtgagatgaaggaaggattttatggattgtttttatttttttcccccttgcatttcacaataaacaaagaatgaaggacatggcagataacaatgacattgaaaagtcgcctgatcttgctgacacattttccttgatggctataattgcactgaatacaaagtcaagatcaactcaaagaaaagctgataagagtaatgtttgagttgtttcattttctgcagtattaattgccatagggacggagggaaatctgctg

SEQ ID NO: 100313 - DNA, 802 bp, Vitis vinifera
  Intron number 1 from transcript GSVIVT01030537001 (locus G SVIVG01030537001) derived from phytozome v7.0 (chr-ID chr1 2; pos 6564228 to 6565029)
tactactgcttttcctcgcagagtagtcgtcaccggtattctctctgttttttcctctgtttggctaccgagagagccgaggaaaacaaaattgatgaaaaatttggaccttttttcgtttttttgtttcggtctccaagagagctaaattctctgtttttaaattttttttttcaaatttaatttttttttttctcggtgaccaaatgctacattgagctttaagatcaatttccgtttcgttcttatgtttacccgctctattctgcgtttggttgctgagaaaactcaggagaatgaaagaaagaaaattttgaaatttatatttggcttgaggaaaaagtgaagaggttactacaaactaccctcaatgcctgtatcagtgtcaacttccaaaaaatgaaagatttgagattcaaaattttggctcatttctcctttcattttatcaatgaccaaagggaatgtcaagcttcaattccacgttcaaccgtgtcgaaacgtcttgccctctctgtcaaagccactcatagtgtagtctgttaatgaacaagatcgaagagtagaaaggaagagagagtttctgtttcttttgtatctgtaatcccaaatataaaaaataaattcttttatttccctacaatctctaagctttttaatggagcattaagcttcaattgcaactactttcactttctccttccctctctatatacaaacacacactaatgtaaaaaaattattagttagatctgtaatagtattgattttccatggatctaaatatgtcgtaggtttaggc

SEQ ID NO: 100314 - DNA, 967 bp, Vitis vinifera
  Intron number 1 from transcript GSVIVT01035337001 (locus G SVIVG01035337001) derived from phytozome v7.0 (chr-ID chr4 ; pos 596162 to 597128)
ctagcaacttggtgcctccggcgtcatcgagtcaggtaactttgaggatttcatggttatatcttcatattctttgtccattttgttaaggcttcttaactggtttatgttatgatgcggttgttttctgtttttgaaggagaagattgagttttgttctgtcgttttgattgatttcagttttaattaatggatcgacatgtgacctagatttcatatgaggatcagaggttgtctaaaggggaaatttagggattgtatggttctagccttgacatttgctataatattgatttgcttgttccgaataaatattggatctttatgttcattctaggattttgggtatcaattttgcatttttctcaggctcattgctcacttacattgttaagcagcttctgtgcagcacagttaaccttgctttttatttgggacctctcccaaatgggacacctaaatccatacccaagaatcattgctcctcaaccgaaggatattactcccttaacttagtctggaaaattgatcagcaattgattttggctttcttgttatttagagtatatttgggactaattcagcttagtgtacaaaattttttatgttacagtaatttttagttggcactctttttggaagtcaatggcaagcaaagcaactgttttgaggggcaagttgtttatctgtttgtattttaattttttattagtttgttggtgtggtggggtctgtaaagctcttaactggatttgtgatcggcaatagttgtcatctctgttgtagttcacagatggggtcttgttcttgtttttcctgcctgttcctattttacaatattctcttttgatttttctaaagaattttatgacgggacaagatctgtcagttaatgtttttattcaaagaagaaatcttattgttgttcttgattgctatagcaatttatggttgcagggaagtggcc

SEQ ID NO: 100315 - DNA, 501 bp, Vitis vinifera
  Intron number 3 from transcript GSVIVT01030611001 (locus G SVIVG01030611001) derived from phytozome v7.0 (chr-ID chr1 2; pos 7163484 to 7163984 reverse strand)
gcactgttgtccaggaccctgagctaggccaggtttgcctcttaccctttcattaaaacctatagagctcatatctaaaccttccagtctttggttttactatcattgaagatgatcctgcaattgttcttgaaacttgcattgattccctctttaaagggcaaagaattgattacatgctaaataaaacttccaccagccttttatttttgaatgaaaatctagtagaaaattaagagtgtgtttggcaatgcttttagaaagcatatctgaagaaaaatcaggcgtttagcaaaatttagaaagtatgtttaaaaaaattgaaaaatcacttgtagcattttgataagtgattctcccgaaaacacttattaagaaaacatttctactaaaaacacatcatcaatatttctaccttctgtaatacaccattttcggagagttggtattttgatttcctatgggtgcaggtcattcaacttcagggtgatcaaaggaaga

SEQ ID NO: 100316 - DNA, 658 bp, Vitis vinifera
  Intron number 3 from transcript GSVIVT01032154001 (locus G SVIVG01032154001) derived from phytozome v7.0 (chr-ID chr1 3; pos 22071828 to 22072485)
gctaaagcttactcaaacacatcctgatcttgcaggtatagagttgagaggctcttgtattattattattattttggacaaaatacctcagtatatttttgttaatgtatggtgttcttttagtacttcttgtggaatttctcttattttttattgtgtttggtgtcatcctattcatgaggttcacttatggttgaataattgtcttaacaagtagccttttttgagctttgctttttcattcttttgaagatgcataatgcctataacccgtggcattatgaaacttaaggctcaactttttgaagatgttctactaatgatacacaaaccacagttaatagaaaattttctcatctctgttaaattcatttcaagccttcttctctaagtccatatcttctggcatcaccattttcattttcttcctttcaaagctgttctttgacagctgggaggcccacttgttatgacgtatctaataggcagcctgaatctgtcaatcatccccatattgtgagattccttataacctagtagacaggatgactgtgctttttagttgaattttattttgctatgatgtctcacatgtaacgattataataccagacactactttcttgttgatctcatgaattatgtatttcaggattaa

SEQ ID NO: 100317 - DNA, 762 bp, Vitis vinifera
  Intron number 1 from transcript GSVIVT01037779001 (locus G SVIVG01037779001) derived from phytozome v7.0 (chr-ID chr1 9; pos 7784649 to 7785410 reverse strand)
caccggcgtctcagttacagttggctacctatccggtactctctatttatttgctctgaaaacgaggggaattgaaaattgattcgattttggaaaaacccacctctgttttgctctcaaaatggaggaaaagtggaaaagatttgattgtggaaaaacccgattcagatatagggtaaaagttgtgttggttgtggttgtctgaaagtatgagttttttctcggttccaaacaaataaaaaaaaaaaaaatcgaatttggaaaaggccccattccaattcaaatagagggctcatagtggtgtttttttgtggttgactgaagggttggatttttgatcgggttgcagaaagtgaaaagaaagagtaaatttgtctcagcaaccaaacagagtgtcaacgtgtgtgattctggtgttgagtctaaatccctgttagtttctgagaaacgagagaaaatgtagaatctttttctcacatcttaatgtttctttactccatttgggttgctttgtaaacaaaggaaagttggtgaaaagaaaaaggttggattttgggttgttattgttttgattgcaaaaatgaaacaactttaccaattaatgtgttagtttcagttgaatgaaaccagagattcataaatttattctagtttattttcttagtatcaaaacagagtgtaggcttgtaattttctgaatgttcctttttctgcaatggtgattgatctacaggaataaagcctaacatcaggggaccttca

SEQ ID NO: 100318 - DNA, 868 bp, Vitis vinifera
  Intron number 2 from transcript GSVIVT01031160001 (locus G SVIVG01031160001) derived from phytozome v7.0 (chr-ID chr1 4; pos 1614333 to 1615200 reverse strand)
tattggagttggagatctaccccagaatcaaggtttgcttttttttttctttgtttcaaatcctatcgaagtttcataggattcacttgaacccaatatgtttttagtggatttaggttgagtataattatgtttggatcaaattcatatttaataaagaggttattttcctaaaagcttagtgacttgaacccatgacttcttgtcaaactaagtttagatacgttgaattactaatatttttaaaagtttaagttttcttgatttggacttaatatgcaattcactctcttgaactgctttttgggttcatgtgcataatatgaatttgattcgaattgatctatttaataattgtattgattaatctaaatataactttaacttatttaattcatatttgattgatcatttcaaaattgttttgaataaatagctcggttaattgtctcgtaaacatattaaattagaaagttaatcatataaacttatttaaaatttagtttgatatattattaaatagaaagacttgattctaaaatgaatcatactatgtattacttatttaataattaagtaacatttaagtatatattatttaataattaggtcatacttgagtatatatttttaattcaaatatcattcaagttgtgtttagaacgacctattaagtgactatctaacatgatgtatgtgagtatgactcaccaacccgaattaccaccctaaaatccgtaaattatgatctcgatatccattatgactttaattaaagtcatcttggaatgttgaaaaccatgtcatttttcttaaatcaaagtactaattcaaatgcactaacattttcttatctacaggttctcac

SEQ ID NO: 100319 - DNA, 767 bp, Vitis vinifera
  Intron number 2 from transcript GSVIVT01033862001 (locus G SVIVG01033862001) derived from phytozome v7.0 (chr-ID chr8 ; pos 17170094 to 17170860)
cctcgaagcggcttggaccaaactaaaaggagaaggttttgtttattctgtaacttcaattactcaatcaggacccttttttgtggctgaaaacgaagttatgcataatgtttcgatattttgctcaaccaaatacaattagcgcattttcctgtatttagggcttgtaaaatcctagtaggttgcatcaccaaagttcagagataatccttgaatggataagcaagtgatcaacagttaaagtcttactcaaaatatcgataaagccaagaaggataccttggtggttatctcagctgctccaaaccaccatgatctccattgcaaaagctgataataatgatttgattgaggactaccattcttagtccaaggccaacatatattgtccagatccatccctccctgcaactctaagcccatgcagagttaaagagcatgtgcacctactacatcttaacatatttgcttcagaattagcatggttatttgttccaagttttttacttttcagttctcaacatatttggttttagaagaacagggtcttggttttggtttaaggaaagctaaaatatatttcaggctagttgattcttaacgtgtcatccaaatttcaatatggatccattttctttgacagatttatttatttatttatttttattcttatttttttatttttttgtggccattaatgttgaagttgttgctatgcaattttgtgtgcctcagaggttttgaccaaggaaaatattgtggagcca

SEQ ID NO: 100320 - DNA, 476 bp, Vitis vinifera
  Intron number 2 from transcript GSVIVT01035474001 (locus G SVIVG01035474001) derived from phytozome v7.0 (chr-ID chr4 ; pos 1558724 to 1559199)
attggctttgggtgctctcctgggacccggacgaggttagttgtgagaccttctcttgttgatttaatgcatcctttattgaagtatttgttgaaggatttgattcacaataaaatagaaaattaagtagtttaaaattggaatatccacatgcgtgcattatagataattttagacaataaagttggacattttagtggtcattttatgaagccctttgaaatatgtatatccaggtttattgagttcgaatcaatattttattaaactgcacatcagttatttcattcttcagtagcaattctttcattcaattaataactatctcgcctcccataagggaaaaaaaattgttatatttctgatttttttttttttttcagttgtttctctttagcatttagcttagatcccaaattcaatttaatttgctgattgatttaaagaataacaatctgctgcagagctactttttg

SEQ ID NO: 100321 - DNA, 821 bp, Vitis vinifera
  Intron number 1 from transcript GSVIVT01031982001 (locus G SVIVG01031982001) derived from phytozome v7.0 (chr-ID chr3 ; pos 5902334 to 5903154 reverse strand)
actggaagcaacagcattggtgatcaagaacagaggtattacttttacaacataactctgtttttcccttgtacatgtcatgcatgcaccattctgttcaaagttttccaacttttggaaaaattgatgattttggaagtgaaatcgcttaatacaacttcatagaaatgcctataaaattaagagttcagccacagtataggaagcatggtatgatccatgaggattaaactaaatctgcagaagtttttttaagacttaaaacatgatcttgtccatgtgttgctgcaggccaaacacacccttaaatgtagataaagaatgtattaaattctcttggagcttcttatcctgtccctaatccaaatgaaaacccacatgagatctaatcctactgggtgtggatcacatgcaagcagtctagcgtcaaccactcccataaaaatacaatgtaaaagtcttaagagtcccaaccaagattccctagtatatacccaactcattatctccacttgatattcttcagagctcttctggcactgtcatgaaagttctagacttcaaacttcaaatccccattgtttggaccccccatctgaactgatataaaatgacaatatcaaaaactaatactttacttaattttgtgatgtaatattgagttaagtggaagggaagagttgatatatagagcgagagagaagtatatatagtggtgggcagtgggtagacagagtttgtcttgttcatatgctaaaattggtctctcttttgatatctttacaggctgctgaagtgtataaagctgcaataaaggtcca

SEQ ID NO: 100322 - DNA, 1054 bp, Vitis vinifera
  Intron number 3 from transcript GSVIVT01033401001 (locus G SVIVG01033401001) derived from phytozome v7.0 (chr-ID chr8 ; pos 20950714 to 20951767 reverse strand)
cttttgcccttggagagatttcttccccaacccaagtatgtttgctcttctttcgtacgttttgttctctagatttgtgtatccctttgacatagcttgggttacaactgatgagattcccttgtgtgaaatctatatttttatcatgctacattactctctccccaattatgatcaaagtgggcatacgagattgaattttttctgagttagttgacttaaaaagtctccaaatgccagtattttcatagtttaactcagaaaattacttgttgtatacccttttcttcttgatttgtaattatgatagactgtttggtgacttcaaggctctatatgactgccgcaaattttgtggtcaagaacctaatatatgatttggcttaatggaatagctcaaataatgtgctttcttcctttttcttcctcgtttctttcttttggtatgtgtattaggatgtaattgtttagcaaggaccttcctcaacataagagagagacataacatgctatttttatagtagaactttgattatgtatgggatggctgcatagggctgatctgctcagtctctctcataaatctggctggggattcagttttaggttcatgggatacagcaaggcccaagtttacagtcttagttgattttatgttagcatgagctggaaaatttagcttgttggaattaacccatttttcttagtgcatgtgagtaggttttagtgatagaattgaaaatggtgctgtttagctatagatggcattatgcatctgtaccaatcaaactttgtcatttctggagaattagaacacatcccattttgctctaacctaactgcagtccagttacttgcagtaatgagtatgattcacggaatatgctgaatttggcccttcagattttttgggcttttattcattgctaaaattttatttacattgtttccctagtactctaaccgactggaatgtcttattgtttcgaattgaagtgtgatgtgggattatcttgcaggggacatccacaagctgcttttaggggtggtcgcg

SEQ ID NO: 100323 - DNA, 899 bp, Vitis vinifera
  Intron number 1 from transcript GSVIVT01032709001 (locus G SVIVG01032709001) derived from phytozome v7.0 (chr-ID chr1 3; pos 1343376 to 1344274)
aaaatagcgtgcaatcgggtggaggcggtctcaccgtaacttacggtaggcaaaaaataaaataaaatatcacaaatttttaattgatgattttaagaaagattattcaggccagaatgccaaaataatccttatttaacttgtcaaaaatatcttttatttttttaagaaaaaaaaaatttcctataaaatcttagaagtttttgtaaagtatatttttgttaaaaaaatattttgtatttcctttttctaattttcagttatttaatgtaagtcatatttaaaaaaaaaaataagagtttgtttaattacgtaatttaaaaatatttttttatttaaaaataaaagtatatttttaaaatttcttaatattatttaaccattatttttttgaaaattattttttaaaaataaaataaaataaaataaaataaaattttagataataaagagtttttttcactcggtcttaaaaacaaaagaaaaatataggcccattagattcatttgatcgcattttttaaaatttgtttttaaaaaacaggttcaatgaaccttaaattgttaaaatatgattttaatatattttatgataagaatgacaaaacaaacttgctttaaaataaaataattcggtagtcaaaatagttcaattttggatgcatttaaattagggctcttcgagaagtctttgccgtaatacggacataaatacaaagtagtggtgggtgggaacattttagccagctgtcgcgattcattggcagaggaagccgggtgcagtgttcacaaacgtcttcgatcacagaggacatactctcgacgacaccaccaccccaattataatctcgttcagtgaatcagtgtacatctcttatttcgcttcgtctttcctctct

SEQ ID NO: 100324 - DNA, 911 bp, Vitis vinifera
  Intron number 1 from transcript GSVIVT01037142001 (locus G SVIVG01037142001) derived from phytozome v7.0 (chr-ID chr1 8; pos 28686610 to 28687520)
cttctggagtatgtttttcctttctcttttttttttttttttttttttgtccttttgtgctggtttacaatattggggttttttttaatctgtttggttggttagaaaatgtgaggaaaatggagagaagttgagagtttgaatgtggggtttttgtttgggaactagaagaaagggtcttgtttggtttttttctttccccctcttctgatcttctactattcgggtttcccttgtctgtttggctggtgggagaatgtaagaaatgaagagactgaggttttgaatcttgagtttttttgttgtttggggactcagggaagtgcatggttggtattttttttttctccctgtttggctgatgagaaaatttgagtataagtatggaactttgaactttgaatcttaggttttttctgtttagtacaaggcatgtttggtgattttttcccccccttgtttgcttgctgagaaaatttgagtaaatgtgagaatttgaacattgaaactttaaggttttacatgcggaacttgggctgatacaatgcttcctggaaaaatcttcattaagaaatttatgaaggaacagattttttttttaaaaaaaaaaaaaaatcttttgctgtcccaattcttggaatttttttaagattcataattttaaaaatgcattttcaaggctgaaccaaacataccctaaacctctatgcaatggaaccaaatgcagtaattaggccagtcttttagtatggaaacaaaaacaacattgacatacattttccattttcttcccttccttaagttttctcggcaaccaaacagagcatttttatctgttcacatttattttatatgtttgtgttgtctctgatttaggtgtctgaattgggcttgaagaaagaagtgagaga

SEQ ID NO: 100325 - DNA, 788 bp, Vitis vinifera
  Intron number 1 from transcript GSVIVT01033788001 (locus G SVIVG01033788001) derived from phytozome v7.0 (chr-ID chr8 ; pos 17828501 to 17829288 reverse strand)
tgaattaacgagcgatttctatctccaaacagcaggtattcaattttctctctctctctctctctaaatcttctttgcgacactctcaaacccttttcttttgacgggttgcactgtttccggcgtataattgctgtcttgtcgagtgactctgcatgtcttcttcacctgagaatcatattgcaaaattgttatttattttgcatttttctttttcgttctgagaatgatttaatgttttaaggctgcttcccctggttttctctgtcaggcgccggggggcttgttgccctagttcactgttgctttcgagctggatctctatattctgtacactttgaactagctatactagggtttttatgtggtctcaaacttatttgtgtgaattcctattgaaatttcaaattaattcagagctatctgacaatgtggatttttctgttagtttaatatgatatatcatctgatactgcacttcaatcaaaatatctatctatttttggtgatatacataatatatttagtttcttaaaatgaaatggttaattcatgtgcagatgcttctttttctcgttcatgtggtcaattggtcgttggctttcttaaaagaattccaatgacattacccttcagtcatgatttccagcattctcaaaacattccataaaatacaataattgcatgagtaatctgcctgcctttagtatccttcgatcttaacatcaagtttcattttttattccataaaagattgaatacctcaagtggcttgcacagttgacaaa

SEQ ID NO: 100326 - DNA, 890 bp, Vitis vinifera
  Intron number 3 from transcript GSVIVT01034509001 (locus G SVIVG01034509001) derived from phytozome v7.0 (chr-ID chr1 8; pos 20160043 to 20160932)
tgactgagcgtttattatttcatcttaatatctatgtgagtattgcgtctttttgtgtcttgccgtccttttttttttttttactattactaattgttgagcatagctaattatatcatatgtatagttaccggtataaagtatttggatttggagcttaaagacttttcttgtaaaatctctatttgcttggtacctgattttttggggaatgcatgtttggtagatttaattgatattttaggcatgggtttggcttttgccaaacccttcttgttgacttttttctgttttatttcttcccatttctttgtgctctttgtatacttcctaaatttcgggttaataggttcttaatagtatgatttgcccataaaagaaggtatgcatatttaccattatgtaatttagcttatcaattttattaagcaaatgtggtttactcaactgcaattcttactaaataagtttgcaactgtgaagtcatttctgaattctgataacagcagtaaaaatttgaacagtgttggccccatgtttgttgctaaaagccacagttactgtatgatgatatgtagattcatttttcctatggaaccacaatgatgtccaagtcctgccaggctgttttgtatggataaaagtctatactaagaagccttttgtgtgtgtgtgtgtgcgtgcacacgtgtgtgcttttttgtttgttttccctgtgaggggagacggggtttagttagtggtttgagagtgcagaatcagcaacaaacctggtgtgtggtgttgacgttggagccataggaattccttaggcagtttataccatccatacatagtgttttgatctaagatttcaattcttccatgtttcagcagtagcatattgttcc

SEQ ID NO: 100327 - DNA, 879 bp, Vitis vinifera
  Intron number 2 from transcript GSVIVT01038198001 (locus G SVIVG01038198001) derived from phytozome v7.0 (chr-ID chr5 ; pos 24278263 to 24279141 reverse strand)
cttttattcggttcctttactcatccaggtatgttggaagtctctttttccatatattcaaccctcttaaattgcttagtgaggtgagtatggcccagtggcaaattagatcattactttgattgttttgaagcacatatatgatttaatgatggcaataaacttcaaggtaatcccatccagacacagtacatacagattgttctttcaatcagctagatcttggaaaccttggggaaaaactgttaaaagagtgttggaggcttcacatgcaacatgccatttttatattgatatgaccctttagagttagataatactagaaatacttgtaagcttaggaccagtttgggaatgttttcaaaaatagttcttaattgttttttggaataaaattctgtttgggaaatcaaacatgaaaaacagttttttcatctgtttctccatgaaggcattacatatttatgaacagtgcaaaagttttcaaaaaattcttcatatttttaattgttggttagaacactctacaaaaaaacaactaaaaacacttaaaatttgttctaaaaaacaaacatatttttagaataagttgtcacaaaatcaaaagttcgctgaacgtgttttctgagttggaaattttttttcaagaacaatttccgaggaggtcttaaccttaacataaacagggtcaaactctatcctgttataagaaaaccatatcctgctgaaaagaggattgattttatcttcctgtactgatgtagccttgtgtgtcattgttcccaggttcctagtcagttttctgtttatccatcctagtattagagtcctaaaatttgtatccttttgatgctgtgatgcagctttgaagaggaagaa

SEQ ID NO: 100328 - DNA, 375 bp, Vitis vinifera
  Intron number 1 from transcript GSVIVT01035995001 (locus G SVIVG01035995001) derived from phytozome v7.0 (chr-ID chr4 ; pos 6956526 to 6956900 reverse strand)
aagaattcggggaggagtatcaggtcagttttgatggattgaagcacggctagatttcaaatcacttagcctctgtttggttgccgagaaaatctatgaaaataaaataaattaaaagaatttatatgattattaaatattgaaacccatggaatacagaacctctgtcgaattgagttgactataattgaactataaaggaaccccaaacatatgatataagactcaaaattctactatcttttcttctacctccaaattcttcagcagcaaatgaaacattaggggaacaataatagtgatatgcgcttatctatttgttggatcatgttgtgtgtattaagagtatgtgttgcaggtgtttgttactgactt

SEQ ID NO: 100329 - DNA, 819 bp, Vitis vinifera
  Intron number 1 from transcript GSVIVT01032041001 (locus G SVIVG01032041001) derived from phytozome v7.0 (chr-ID chr1 3; pos 23266905 to 23267723 reverse strand)
gtcaacagacacaagtccaagctcaccaagctcaggtatattgtgctctgttaggaggttttattttctgacctgtttggttggcaataacatgtgggatttttcttttcttttttcatgaagtttgtttgtatggggtttcattggtttgtttggtttccgagtaaattaagctaaatataagaaagcaagggcctgtttggtagcggaaatgaaatcttttcaatttagagaaagaaaacattgaacatgttgggtctttcatcactttcaattgatgaaacgcttgcattttctgtatctcatttcgagtggtttgtaattaactatgtagtgtccatttttcctgttctgttcttaatgctcagaaatttggttactgatgaaatttagtaaacgatatattaaattctctaatatcttattcctgtttttctcactcttaatgtcctttgttttggggtctgatatggggttctcacttttgtccctttggttgcctataaaataggaaaagaaatgaaattaaagctttgagtttgaaggttttcgtaatctggcatgtgagaaaaagaaagctaatactgctattttttagttggattcggaaataaagacataaatgaaagggaaaaactaagatccaaattgagccttagctttgttgagatgattttccatgtcttgggaaatcagaacagtagatgttagattcaaaattttcttttgggttctcaatttttcaggacaagttatgatttgtctctcttatttattttctcagggctagtattactccgggtactgtgctgatcatcc

SEQ ID NO: 100330 - DNA, 993 bp, Vitis vinifera
  Intron number 2 from transcript GSVIVT01033996001 (locus G SVIVG01033996001) derived from phytozome v7.0 (chr-ID chr8 ; pos 16028974 to 16029966 reverse strand)
aggaattcaacatatttgaaggtacaacctattttggtcctttgttgtgtgtgtttattttacctttttaatttggttcctaaagtcgattttttttttttttgccaatgttttagaagctggactgcttattaacccatgaaagggactagattaaaggtcactattttctactgctgatttttcatcacatcatcatcatcaatatggtaatcattatttataataattagagaaaatgaaatattaggtcaattaactgaaaaaataaaaataaaaataaaaaattcaagtgtgtaactcaatagctagttaatgttatgtgttaagatgcaattttcaatgaggagaacaagaagaaaagagacaaagatgagagtggagtcatgtgggagatgataaagaagagtgggaactgaaaatcctgaaagaactcatggtatatagtttatgaataaccagcttgctggttccagttaaattgggtctgtggttttactgatggtccaagacttctttttcaaaatgctttagtcatggattgttaactttttctatatttatttttttatgtttttatttatattgcatgaggatgtcaatctctaagtggctgatgaacaaaatttggaaatgcaaaaggtttaagaatacaatcaaatgatagatgctgtccttttcttatatcacaaatgttttgttttttgttaattagggaaaaatcacaatatccgcagggagtggtgattgcataaatgaaatagtgctaggcgtgtggattatttgttttgttatttcaatactctagaagctactaattctacggcccaatagactgttttgctatggttttgcataggatgaactctggtcaaacatttttgagtcttttttggatgcgtttttctatttatctatgatttgagattattttttcacctttagctgtttgataccaatttgattttcaggggtcaagcgtgtggtagatct

SEQ ID NO: 100331 - DNA, 1018 bp, Vitis vinifera
  Intron number 1 from transcript GSVIVT01033151001 (locus G SVIVG01033151001) derived from phytozome v7.0 (chr-ID chr4 ; pos 8484299 to 8485316)
tcgttggtgcagctgcagctggtactctctccctctctctctctctctctcaatactctcacacataatgattagattattaatctatttagaaaattgaattgtattaccgagaaaactgtaagcacatattgaatctatggttaacttaacttaacatgccgtactaattttaaaataagagatgctattttatcattttctattttttttatgcttattttgagtgtatctctcaaacaacagatcaatgtatgatatttgggttctttttcttttagagatcccataattgagacctataactggactaattaccaataaaaatacgattgtctttagctaatttggatttttttttaattatcaccttattggcagatggtgattaaaagagacaaaatatgtatctatgttttttatttacatttcttcttctgtctgttgacatttacagcctttctaacatggtaaaagaagtagtaaagctattaattaagcaaagttgttgatggaaaagagtcctcatgtttaaccacactgtcatatccattaaagatggcaaattaagagtctctataaattggaatcaaagattatgcaaaaggtcttcataagttttcctgttttttttataaaagtcaactccggtattgtggccaagagccatgagaatattcgagttggagttaataaatatgtgtctatttttaggggagaatgggaagtagttaccgaaatgagatgccagttgcttgggattatgattatcagcggctgtttggtagaaaagctagttcgtcatgaaaatatgtactattatgtctcaattaatacaatatcaactaagttcttttattcatgcaaccaaggatgatttttatttctatttctaccttgtttaattgctaataatatactccaaagatataatgaaattttggaatctttaaatctgataaagtatttgattatgtttcgaacctcctgtgaaattcagctctagacttgttgcaaa

SEQ ID NO: 100332 - DNA, 469 bp, Vitis vinifera
  Intron number 1 from transcript GSVIVT01036014001 (locus G SVIVG01036014001) derived from phytozome v7.0 (chr-ID chr4 ; pos 7205164 to 7205632)
aaacagagggtcagtgccctgcctgctgtgtttcttacactaaaaaaattgtagggatagcaggatactgcaagagattgtggcagaaatcaatttggagagaaaaatgaaatcacagaagtcaaagactgaattatctgaagaaatgaaacaacttggcagtgtgcaagtgatttaacgcaactaattttggtgccatcaacgagagggaatgcactatatgcctatttgatttgcacccatcagcagcagattgtcactgttctctggatatatatgcatgcctaaatcacgcaaaacagttgtgttcttgtgctttacaccactgatttcctaatggattcttgaattccgagatgctgagctgagcatgcagggtttaaattccaaacagatcaagcagtctgccaatgcaatatctcaatagataaaagtcactgcaagtccaacaaacgaaagtttctctgca

SEQ ID NO: 100333 - DNA, 858 bp, Vitis vinifera
  Intron number 1 from transcript GSVIVT01032257001 (locus G SVIVG01032257001) derived from phytozome v7.0 (chr-ID chr1 1; pos 14109969 to 14110826)
agatttattattataatatatgtgacattaggtagtaataataataataataatattacattattatatatatatatatatatatatatatatatatatatatatatatatatatatatattatattattttatataccttgcatttgtttattattattttttattttttaataaaatattataattgatcaattaaattattttaatataaattgatgtatttttaaattatttaatttttatataaaaaatttaaaatacttaatttgaagtaatatgtaaaaattatttattgattttatttttttcttcattttttagccaaatatgggtaaggaaaaattaaaggagaggaaacagaaagaaaaaaacataaaaaatattcaatattaataaattatttttatatattacttaatttttttgttattttacttcttttatataaggattaaataattttaaaatatagaggtttgcaattaattttaattatatttaattttttaaaaaatatttttcatattaaaaataaaaaaggatgataaaataatttttattaatttttttttcgttaaaaatactttaaactataatctctccaatacatagtctaaatttggaaaaaaaagtcaaagacctacttttaatttgaaataaaactcaacctagaaactagtttgatgagattgattacatacaattaggtggtttgcaagtgaaccaccacaacgctgacgcgtcaatatctaattggagagctgagaaagcaagcagcaggttacctccaaggcaacaaggcttcttaacttgtattcaagttgcaagcaaatatagaggcggagcattcaatctc

SEQ ID NO: 100334 - DNA, 824 bp, Vitis vinifera
  Intron number 2 from transcript GSVIVT01033441001 (locus G SVIVG01033441001) derived from phytozome v7.0 (chr-ID chr8 ; pos 20671566 to 20672389 reverse strand)
ccgggaatcgacttgtagctgcactatcactggttggtttcgcagattttgattgggttatgctaggtttgtgagttctagggtttaatgatgtggtttctgtcatatgatgatttagatgtacaattcaactcgatttgatgattttgtacattttttgtaacctaattggaggaaacattaggatgcttagtggaaagaattttccgctctgcttcaaaactctatgaatgaattgacttttttttgtatgtacaatatggaaaagagggagcatctaatgatgggttccagtcccttctgttgtgctggtatggtatggttccattctgccatgtgatgatttagatatacaattcaacatgattgggtgatgggcacttcttttaacctaatcggagaaaacatgttggctgtttagtggaaacaattttctggtttgctttaaaactctttgaattaattgagtttttttgcatacacaatatggaaaagagggtttatccaatgacagatgccattccttatctcaaatgtatttctcaaatgatgtggtgatgatacttttaaaactgatggcaggataatttttttttttgtttcatttcattttttgggggttttgaaatgatttgtgaagtaaagttcacaaggtcaagttattttttttgcttgcttgctttctttgttatggggagtcaatgatgtatttgatttttcgttttgtttattgagtgtgcttagctggtgcacattttgcatgggcttactgatcatgattcttatttttggcgattcttggctttcacagtttcgatatcagc

SEQ ID NO: 100335 - DNA, 578 bp, Vitis vinifera
  Intron number 2 from transcript GSVIVT01034964001 (locus G SVIVG01034964001) derived from phytozome v7.0 (chr-ID chr5 ; pos 493731 to 494308 reverse strand)
tgtacttatcctgctgatcccgagcaggtatgttgatgaattttctttaattatgcttgtctgtgacttttttttgttgtttgttttatgctaattgggactcttttaacgagtagagcacattatgtcttatgtctaagtttttcagagctttaccatttgttgcggcgaattgggttgatttgtaattttatttctgtaaaatctgaaatgttctgcttttgatatgattttgttttgtggcgtaaagctattattgattcgaggttataaaacgtttatcaacgtgattcacatttggttcttttttgtttgttcgtggatatttggcttttgtataaacattctgtaaataagtactttttataaaaaattcaggggctctgatgcagggtacttttcatcaggggcatggcctttttctatgtgcttatttcttctttacattatgaatcaacttaggctcagggacttaatgtgctctttgtaattttcatttctatttatgacaaggcagtgtaaaatgttaaatcatttggcattgttgctatgcaggaaattgatttaaagaatcacaa

SEQ ID NO: 100336 - DNA, 557 bp, Vitis vinifera
  Intron number 2 from transcript GSVIVT01038546001 (locus G SVIVG01038546001) derived from phytozome v7.0 (chr-ID chr1 6; pos 21976870 to 21977426 reverse strand)
caacaatcttacaacgttccacaccgcgtccttcggtaaatactaaatacccttttcacgctttccattattttttattttacaattatcagggaaaaaaacgcacgtgacctctcacggtagtgcggcagtgcctttatccatttgcatggccatttgattgacggaaatacccttgaatgagcacctttcttttttttagtggcctgcatttgaggccaagaagaatccgccatgttgggagcattagaatgatagaggatgctccaaaacccattttcatggcattgttgagattttcactttaatgtaggggcaatgtagtcacaaaattaattgaatgcatgggttgtggatagaatttaaaggacacgatggaatcacattattggaggtgggtcatgaggatggcacggtgactagatttctcagcccattgatcaaccagctcattttcaaaaactgatttgataatcatatattatatttttttaaatttgttacttctattttggtgatttacagctgctacaggagctggtttcattgccagagac

SEQ ID NO: 100337 - DNA, 657 bp, Vitis vinifera
  Intron number 1 from transcript GSVIVT01038546001 (locus G SVIVG01038546001) derived from phytozome v7.0 (chr-ID chr1 6; pos 21977494 to 21978150 reverse strand)
agtcgccggacgattatttacgtgaaggcgggaaggtaaaaaataaaaataaaaattatatatttattttgatgcggaaagaaaacagtatccctagcttcctcgtgaatttacaaattgttttttctagccctccttttttagtgcgattttgacttcaatcagagcatcatgcgatcaaagaggctgttctgctcgtgaaaagttgcctttttttttttctttttttttttttgtaaatctttataattaatcttaaaatgtaaaatttttaaaaagttgccctcccctacttttatttttaataaagaaaattttggtagaagtttttttcttagaaaaaaaaagacacgcatttaaaagattatgaagttatcaatgtttgaaataaaaatgtgctacaacaccactcattttatgactatttttattatatgcttacataaaaataaaaataaaaataaaagattattgaatttaatgaaagcaaattttgctttatttaaagatattaattttaaaatcaaattaattctcattaaatgaaacaaaaatgatcgaaaatacatattcttcttaaaaataaataatggtttgtatttatttattttcaatttttcaggtacgaggagaataatttaaaggttgggaggaaga

SEQ ID NO: 100338 - DNA, 758 bp, Vitis vinifera
  Intron number 1 from transcript GSVIVT01031542001 (locus G SVIVG01031542001) derived from phytozome v7.0 (chr-ID chr6 ; pos 17354477 to 17355234)
aaaatagtagattacctaagagaaaagattttgaagttgtaaaccttcctttttattggaactcttcatatccggttcatcctttggaaccatatcatgcatatatatatcccgaattttatacaataagataaattgagatggcgtttaatattagaatataaatagtacatttattctaggtaagtatgatagaccaaaggggaattttaggaaaaaagatcttttagttttcgatccctttccatgcatagagtcaataaggattgagaagatttactcaagatcaagagctccattgtataatttagaccaaaccattaattgagaactagttaataatatcgattttattcatgttttaaatattttgctcaaaaaaatgtcaaataacaattaaattatatagtattttatttgttagatggatagataaatatatatttttaattattaagacccaagtttagaaagagcttataaaaataaagttaaattgaataccttaacttgcaagtcaattcgaatctcttactttgaaatttgatttaagttcttcatcaacccaattaaattttcccaagttaaaaccctagtataaacacatcaaacaatatatttatcacaaaaaattatgtttaattaccccacataatcaattaatcttatttttttgcttacaagttcaaattttcttgctgagggctttgtctttagaatgagtctacccccacacaaacggcaaagataaccaaggt

SEQ ID NO: 100339 - DNA, 387 bp, Vitis vinifera
  Intron number 1 from transcript GSVIVT01033734001 (locus G SVIVG01033734001) derived from phytozome v7.0 (chr-ID chr8 ; pos 18237784 to 18238170)
accatcgcaagcaccaggttttctttttgtctcttaattatttttgtttcattgaccgatcgtttggtttctcctgaatttataggaagaccaatgaacttcattttatagaaaaaagaaaagaaaagaatcaagaaagaatcctccgaactaatactataactggcttttgcttactttggattgagatttactttttcagaactaggagaacagcgggaattgttagatcgtgatggctaattttttaatgatttagttttcttttcattcgttttctttggaaacggagggctcctttttatgatccaagattcgtttctgtttattttgattttgttggatcgatcaggtctcgttgaggggagctagcgccaaagaaattac

SEQ ID NO: 100340 - DNA, 782 bp, Vitis vinifera
  Intron number 2 from transcript GSVIVT01034475001 (locus G SVIVG01034475001) derived from phytozome v7.0 (chr-ID chr1 8; pos 20732127 to 20732908 reverse strand)
ttcaagaaggattagacattacgtgtgacaggctggtgaaatgggtttgctttaacattttcactttagtgtggtctaagtagtttatttcaatttggttcttgtatcgggaacttctttgaattgcaactagctttagggctaatctattgaatcctttacagttaatttaaggtacgcatgaagtttaagtgtattttaaaaacctaattaaagtaaaattgccagccataatgtctcaatgatgttgtactatgattaaaatttccaatattacacatgctgataaggtttttctgaaatatatagggaaggaaaattggaagctatcttgattcttgtctacttccaggaggcctcatgaaaatatctgaatgaagctaaattccctggaagcagccaagatagccctaccctgtgacaaaataatatttcaacacaattagaagctttgtacttaaattccataattcttcatgttttaattgaagtctgctaggtatgaaagctagacaccaagtaaatgagataggccacttctctaaggtacttattgatggttgtgaataataatagtaaaaatcattttatgatgtttttgccctggatacctgtttcaactgttaaggagtttggatggggatgtgggaggttctaagcttgaatccctatatggaggaaaaggaacaaaaaattttaaagatacaattaaaaataaaaattattattttatgatgtttctaccaccatttattcttttttctttgtttgaaagtgcaggg

SEQ ID NO: 100341 - DNA, 388 bp, Vitis vinifera
  Intron number 2 from transcript GSVIVT01032604001 (locus G SVIVG01032604001) derived from phytozome v7.0 (chr-ID chr1 4; pos 28775147 to 28775534 reverse strand)
ccgagctcgttaagcacctgaaaggcattatcaaggttgtacaattgttgctttttgtcttcttctgttactttagttatgcagctaggatgtttgtgcaaatgtcgttgaagtgggtttttgtttttacttttataacgtggatattatattatcatacccacaaaagcgaaatgaaaaatgatttatcttctttgtaatgaattgtctaatgtttgtcattggtgttagtttgaggcttgaaatgattgtgttggagaattgagtaggaaagtgtagcatcaattagataaaatggacatgagattgttcactggaagtagaaaatgacaaaaaataaattaatttttcagttccgcggtgggccaatctcagtagctgagtacat

SEQ ID NO: 100342 - DNA, 794 bp, Vitis vinifera
  Intron number 1 from transcript GSVIVT01036283001 (locus G SVIVG01036283001) derived from phytozome v7.0 (chr-ID chr1 4; pos 7563707 to 7564500)
cctccatccaacgacccggcaaaaccaccagccaagtaagttctgttttcttgagttctaggttttttttctcttgatattggcatgaaaaaggaaaaaaagaaaaagaaaaaggtagtaaggagatcagaaaaatatggggcatctcctaaaagtctgtttgattttagtagtgtttttcttttaaaatttctctgcataatccaccacttttccttgaaattctgtttggtaagattggaaatttgaagggagagagaaaaaacagtgaagttcctcagacactcaaaaataatttcccttgaattagaaaattcttggaattatcttaattttgttcacatggatggaggaaatcaaaggagacgtgtctgcattacaccctaggccccattggagatgaatattttaagggctgtggtttattgttgagaaaacacaaaggaaaagaacaaaacatttcgaatctttactttttctcaaccaccaaacagtggaggtaaaacaaagaggggacagcattgtctatagtacaagcattgcattttgaaatcagcatatttgctgtcttaattattggagtgagttcacaaaccttcacactgctcatgaccatgaaaaataattaaataaatataattccaaaatttaaaaaaaaaaaaaaaagaagaagaactgttctttgacttaatgctcgtcttaatatgctttttctttcctttttttggatctaaaacccaataatgatcaatttttcagggcacaagtggtgggttggcctccggtgagatcgt

SEQ ID NO: 100343 - DNA, 767 bp, Vitis vinifera
  Intron number 1 from transcript GSVIVT01032739001 (locus G SVIVG01032739001) derived from phytozome v7.0 (chr-ID chr1 3; pos 1153432 to 1154198)
gtgaacatagataatataaggtacagtacaagaattgggaagaaaggttcaaactgtgagaaacttgttttcaattatgctttttttgcctttacaggataggtgtcaaattttgatagtatcccatccatgaacacaactcaaattcatgagcttagatcgagtataatcggatttgagtcttctcttgaattatgctttttctgtatatacaataaaggtgtcaagtttgatagtatccatgaatacgacttgaatctaagaatacattttccatgtatttggattgagtatgattggatttgaatcaaacttgcaaaactcatttaataaatagatagttttttagttcacctatataacatgaatttgatctgaactgattcgtttaataattgtgtggactaaccaaaatataactttaaactatttaacttatatttgattcatttgaaatttatttttaaataaataagttaattaacttataaatatgttttattaatacattaatcatatatatatatatatatatatatatatatatatatatatatatatatttggataacttaattattgagttaaaagggggacatgaagtttgtttaataataaggtaacatttgagttaatatttttaatatgattattatccatgttgagttttgaacaacttatgtggtaaaacatcttgactcgaacacacatgaattgctatacaatggcctattttacttgttttgctatgttttctaacaggtgtg

SEQ ID NO: 100344 - DNA, 926 bp, Vitis vinifera
  Intron number 3 from transcript GSVIVT01032504001 (locus G SVIVG01032504001) derived from phytozome v7.0 (chr-ID chr1 4; pos 27959773 to 27960698)
taacatttacaagatctcatccccactgtctcgatgtaagctacttttttctataatggttaggaattgttcttaattaaatgtgtttagttgagttctattatctaagttccatcttcccataaagttgttgtcattacttggttttagtaggtatgccttaatacccagttaaagttccatatcgagatttgttgttttgtgtttttggccttgtggaaggacttggcttcattctttggggatacttatttttctgatttcttattagttatttcttgaaagatctctcacccaatcccagcttttagttttcatccacttatgaaaaatgaggttttaatttgcttttgtttagcagaagactccacttttgaaagtacattagaccttttagttttgtttctggagaaccaattccatcttttagtgatttgctatctttcacttttgtgacgaagtttctttattgacactctagacttgttcttctgtccttttttctctatcagtctatggtcctttatctttgttatctaaatgaagattctcacgcacttttctacagagcaaactcatgattgtatactctaatgtttgggaatctctttgagcttctacaagaagccacacccattttaatttttcttttttcaaatttatgggtccattcaaattttttggtaaggcctttttttatgtagaacaatttgggtagattttctttaatcaccacctgcatttcattaccatggcttctgttttatatggttcaggcaaagaatgttgagtcagattatgttgttgtttatggttctacctccttagtagcttggttgttttggtacagttctacatgttttgtatgttaaagttgatgatgaactgcagatagcagacccaaactggttgctggctcgcctgat

SEQ ID NO: 100345 - DNA, 664 bp, Vitis vinifera
  Intron number 1 from transcript GSVIVT01032793001 (locus G SVIVG01032793001) derived from phytozome v7.0 (chr-ID chr1 3; pos 728363 to 729026)
ttgatctcggaggagattctaaacaggtaattttccatttatttacctagaaaaatgatgtttttctccctttttttaaattttttattttttatatttgaatttgcttcgtcctgagaatcaaattctgtaaatgaatacggatttattggaatcttagttgaagttgaatttcggatgaaaccgagctaattgaaattgatttaggatgaaaacaatttaactaaccatggaataggtggaatttcaatggcattaattgggggattctgatgacaaatcatggtttcaaagttcaggttttcctatagatacctgtagattttgaagtcaatggttcaacaagagtttgggtggttgaaattacatgggaaattagtaaggtgttaaaaacttgaaattcaaggcatgatgctataaaactaagaaaccctcgttgtatcttatggtgtagaaagcataagttcatttttgttggagaagtagcaaagctgtagggcattacctgttcctgaagaatttagaatgattcaaagttcaaaacatcaaataatgttatatgtgcttttatttatggatcatgttttagaatggttcatttttttagtccttggagcttgtcttgaccatgttctgtaattacaggctttctttggtgtttttg

SEQ ID NO: 100346 - DNA, 587 bp, Vitis vinifera
  Intron number 2 from transcript GSVIVT01032092001 (locus G SVIVG01032092001) derived from phytozome v7.0 (chr-ID chr1 3; pos 22791942 to 22792528)
ctctctgatcgacacagcctttattggccatttaggtttgctttttatattctattcttatgttcttgttatatgtaaacaacataaaataaagtaattcttacgacaatggtacatattaatcatacttatctccacaaatgagagataatattttactatacgataaaaataatgtgaaggatagaaacaaatataactattggtcccaacatcccctttccccgccccctttttttttgtatctttacttggaattacgggtcattttcctcttcacttttcctcacatctacacctatcctagtaaacccttttgctccaccaagtatctctcgctcttcctcatatttgtatccatcacgtataatattcacaagcccatttctctctcgtaattttttcccctaatgacctcaaatgtttatagaaatattcctagattagaatccttttatgattttggtaaaggcatgtgatgtttgaaggggaggaaggggcggtatgtaatctttaaactaatttccacgtaatgatgaacttctttcctaggtccggtggcgcttgctgctgtaggagtttctatc

SEQ ID NO: 100347 - DNA, 714 bp, Vitis vinifera
  Intron number 2 from transcript GSVIVT01038121001 (locus G SVIVG01038121001) derived from phytozome v7.0 (chr-ID chr5 ; pos 23638233 to 23638946)
agaagtgagtggctgccgaagatggtgatattgtcaaaactgctatgggcgctgcagaagaagcaatttcttccataagaatgaaaaattcagagaaagaggattaaaaaaaaaaacgaaggtgaaatgacgcacagcgattgctctgaaacatatctgactgttgttttcaatgcttcatattcggcgagcttctatgctggcaagtatctaactgtgctttgattggttgtttcatatttgaaaaccttctcatatcttggttctttttagacattttctaggttaatccacatgcatttgagcccactgattaagacatgaagtgtggtttttgatggttcatctcattttcttcatttatgctttgttttcgcaattttctctctgctcctagcgtttgcacatttttggatatgggaccgtaccctgggatgcgagaccatgggatggtggtattgacaggaaagagcagtgagctagcagctcaacctatttttctggagaggagcctattttcagctgatagtaaaaccgacaacccagagttgggtttgtcattgctcaaatgggtttggccctgtgtcacaagattcacaagtttggcgcaatgatggcggccaaaagtttcagaaataatggaaggtggactggaatgtgtggaatcaagggcttaaagcatcattttttttaaccaaaagtctctgggtttta

SEQ ID NO: 100348 - DNA, 835 bp, Vitis vinifera
  Intron number 2 from transcript GSVIVT01037530001 (locus G SVIVG01037530001) derived from phytozome v7.0 (chr-ID chr6 ; pos 12067935 to 12068769 reverse strand)
tcctagaattgaggtatggtggtaagtcttttgaagtctgttggtggagtatgttagcttaatattcattattttttctttttctctgtggctcaaccccttggtgaagtagtcctctaacaggatgtatttgctttggtcctatatgtgttgggttcctgataatcttgttccacatgtcaaatggctggctagttgtgtgcgaacaggctatctttggatgggacatggcatcccttttagaatttcttataactatggtaacgatagtgatccaccgaatggggtcatactgctgaatcttggagctatgaatggaaaagtggtttatattttgatccattttgtttcacttaattaagaagagtggcctgaaaatctttggtaatgaaagcttatagtttaatttattcttcaggacaagttttcccattgcaatgcttgatttcaattatctttgcataatccctgtgcttgtgtgtatctcccatatgattatgtacatatgtttgtttgtttatattattttttataatgtcactgcttaatcatgggcataacacaaaatgtttagtgctctgatccttgttttcccggcatacgcaattatagcatttgttttcttgaatttcactgatccttgttttcctggcatacacaattatagcagttgtttgctttctgttgaaattcaatttatttcttctccttttttctgtacataattaatttattagcattacttctcccagtttctcacatgcttaaaataacactttaatggctgttatgtttgttagggctgccattggagcttcttggttaactggtaaag

SEQ ID NO: 100349 - DNA, 563 bp, Vitis vinifera
  Intron number 1 from transcript GSVIVT01037530001 (locus G SVIVG01037530001) derived from phytozome v7.0 (chr-ID chr6 ; pos 12068861 to 12069423 reverse strand)
gaaagaaaacaggattgagcctgtttcgctgtgaggtatgtctcaaatcgcctccaaaccttcttcaatctctctatgtgcagatctctgctcgcatttgttcacacttttgtagcgctcatgtacgttttgtttgccctagattgatataattcatatcccaaatttgcttttattattgtttcttttttcttgtttgatcattctggacaatgatttcgatattattcctattgccattatatgggtcattttggaagtttggatatgggattgtgccctggttggtggctgggaattggttccagaaagttttgtgcgtgtttttatttggttgggagagttcagaattgagaaattttgatgtttccaatactattatcatcatttttactattatgactgttattttctgtgtgggattgtgctgtgtttggttgcggaggaatgggtctagaataattatgttggtctctatttgcttttatttggttgggagaagtgagttctgaggtttgtagtggattggctgatattgggttacatttttatttggcgaaggg

SEQ ID NO: 100350 - DNA, 462 bp, Vitis vinifera
  Intron number 1 from transcript GSVIVT01033839001 (locus G SVIVG01033839001) derived from phytozome v7.0 (chr-ID chr8 ; pos 17323351 to 17323812)
aacgttctccctccacttcttcttggcactgcaaggtttcttcatttttttttcctcagtttggttcatcagaatatgttggaaatgttttggttcactgggttttactttggcactaaacgagatggtagtattaggatgcttgattcgtctcaagtactgaaaaaaacgaggttttggattcatttgttttttttttttttttctgttctttgtttcctctcaattcagcaaacagttggatcgatgattgtatgtgtatgtgtgtgtgcttttttaaaacttattgttattaatttttctgtccgaatttgattgtattatgtcctaggagtttaattatcggatgatcggtatccagagtggagtcgaggtattattattattgttattttgaattcatgatgatgtggatgctattacgcaggcagttttggaagaaacacacactaggacagttag

SEQ ID NO: 100351 - DNA, 806 bp, Vitis vinifera
  Intron number 1 from transcript GSVIVT01031684001 (locus G SVIVG01031684001) derived from phytozome v7.0 (chr-ID chr5 ; pos 20147432 to 20148237 reverse strand)
taactccaattgttccttcacaatccctttctcaggtaacctaaaatattaaggtctacaatcatgagaaatgaagagtttgatagtgtttctactcgaagtataataaaagtgttttctctaaaaatgttcttagaaaaattacttatcaaatatttatctaaaaaacactataactcattttttctgatttttgaaactgttttttttttttttaaattttatcaaatacttaacttttttttcaaaagcattttttaaactaaaagtgttttatagaatcaccgtccaatggactcaaaatgtaattaatctatgtacatgaaaaagaaaaaatatatataagctatgtttggttcttagaaaagttaaggagggaaagaaaacaaaaaggaaacgtagaaggaaagaaataagaaaaataaaagatggattgaaaatcaataaattattttacatgctaatttaaactcatttcacatgtttcttttcttatacataaaaattaaataatttgaaaatatataaattttaaattagttttaatcatatttaatattatttttaattttttttaaagaaatcaaatatgaggaaattatttttcttaatatttttttttcttttcttagtacgaacaaatatatccatagtatttttttgcgttttccttcttgcatttgtaatacttgtaccttgttccaatgtttaacagtcttaagtccaattacttttctttcttgctttgctcaagggaaaaagaaatatccatttatgcaggattgtgttcaagatttaaacaacag

SEQ ID NO: 100352 - DNA, 626 bp, Vitis vinifera
  Intron number 2 from transcript GSVIVT01030905001 (locus G SVIVG01030905001) derived from phytozome v7.0 (chr-ID chr1 4; pos 18806557 to 18807182)
tccggccttttctgggtgttcctggactctcgtctgtaagcctcttctctctctctctctctcttttttcaatctcttcctctttttctgttgttgaggtctttttattcttttcttttcctttgaagggaaatcgattctcaagttttaagtacttttatggcctgaaatttgatatatatgtttttgcttttccttcactcatctttctgtagattttgtggtgcttccgttattcaattctctctagtttttatgattggggatgattggatttctctgtttttgtgctattctttgacattcttgaagaaaaaaaagatccaacttttgagggatagttttggaatgattgtgaaagacgttggaggttctgtttaaagaaatttcaaagaaatcgtgagagacttgatgatactctttttgtgtttaactccaacctgctttgtttttccttgtctaattcgtcttttgtcggaattgtaattatcaggtggtattggagtctgaaatttagtttttggaatacagtgttaattctagggatttctcggtttttgcttggctcgtcaaattcactggaagtttcattttggggtttttcctctcagacagagggaaaaaaa

SEQ ID NO: 100353 - DNA, 839 bp, Vitis vinifera
  Intron number 2 from transcript GSVIVT01035294001 (locus G SVIVG01035294001) derived from phytozome v7.0 (chr-ID chr4 ; pos 157857 to 158695)
aggaggtccctctttgatcaggttctcctctcttctctgaaaattttaattttcaatccaaattttacttgtgcttttatgaaatggggttggtcctttttagataatccatttttgtttttcgtatgcatatggttttaactaaaaaaaaaatggagtaaattataaaattcacccttacaatgtcatccgtgtttgaatttaatttcttttgttttttattttttaaagcaacattaatcatacattatactcaaatatcaaatataggatttttttgtaataaaaagttgataaaaaaaattcatttgacgagcatgtaaacaaaatcgacatatccaaaatatatcacctaaaagctcatgcaaatgaatatataatttaaatatcagtattagtatcaaattttgacgaaaactcttaatataacttaggaacgacaatgctttgaaaaaaggaaaagaataagagtgacttttccaatttatccaaaaactaaaatagtggttttacagtcctcgaagtgttccacccaaccaatcacatcgttaactcgattcatgcatatttgcgacggcccagtccataatctggtttgggtcaagcctggagaaccccaaggaggccttgtgagctgtgttctttcaactggtttagacccagaacctgataatgggctctgaaggactccatattagatctgtaatccaacccaataatcaattttcatggcctaggaaaacacattactagatcctggaataagttgataatggtaaataaaatgatgtgcgggttatgcaggggtaccttgacgagcagtttgttcagctagagga

SEQ ID NO: 100354 - DNA, 496 bp, Vitis vinifera
  Intron number 1 from transcript GSVIVT01032825001 (locus G SVIVG01032825001) derived from phytozome v7.0 (chr-ID chr1 3; pos 467984 to 468479 reverse strand)
ctgacaccaaggcgctgcagtccatccgttgtgaggttagcgatgaaatgctctcaaccacctcttcttattctcaaagaccgtcgcggattggactaaaaaacttttcaaggacttcattgagttgttttctccatctgaaaaacattttttttttttttttaagatatcactgattttcagaaatttctcagttttggttgcggtttgatgttcttttgttgtgatttggaagaaaaaattttgatttttgagtttaactcgaaaatcccggtaactcagacgattcacctgagtcaaatcggactatcgatcgagtcaaccgattttaacccacccttgcaagtaccttcactttaacgagaagggtggtgttgaaggtttaacaaagtgtgcattttaatttcagaaactacaaaggatataaatgcaattatttttttctctagattatgtaaaaatataattaaatagggtgatttacatttttgcagtc

SEQ ID NO: 100355 - DNA, 771 bp, Vitis vinifera
  Intron number 1 from transcript GSVIVT01032384001 (locus G SVIVG01032384001) derived from phytozome v7.0 (chr-ID chr1 4; pos 26855990 to 26856760)
tttgccggacgttggtcgacgagctcctcttgcaggtagtgcttgatggcgttggggtttgttttttattttgggtatctgtgtggttgttgagaaatgggcagaaagaaatgaaattagattgttcgatcttaggtttatgcgttcattagggctctcaactgaatctaatacaaccgtttgacctaactagagtaattttcttgttctaattttcctctctattttatttccctctcattttcccctcaaaatttccggaaccaacattcccttaatactttggaagaaaacagaaggtatctgaaacgctatttatttttcttttctggggttttctccacaatcaaatggagggtaatggttttcctcaagaatctaacttccttttttatgttgtagcccttaccgtcatcaattgtatttttactgaaattgttttaacataatcgaccgaatttagatggataagcctctgcttgtttgctgagaaactgagaaggaaaagtttcatatgaattgctgtttaataagttaaacagttctgtcagactgattgaatggagggttttgtttttctgtgtcttttgacttctttaattcactcaatttttctatatttctgagcaaccaaacacagaacatgttttcgcagaatcgtctgattgcaagccctttggaaaagggaccttcagatgaagtcatcttttcaagtgctcccctgactcttaattactgaattgcaggcagaggctcaggaagcaataattc

SEQ ID NO: 100356 - DNA, 823 bp, Vitis vinifera
  Intron number 3 from transcript GSVIVT01037825001 (locus G SVIVG01037825001) derived from phytozome v7.0 (chr-ID chr3 ; pos 7442037 to 7442859)
cttctggccctgctcagctctattttgaggtaatcaactattggtcacatacttggaaaactgtatgctgggactaatttatatacactacttgcttttgattcccagtccctccaatgatgttgaagaactaagttgagcattcaaaaaggataatatttgtaatatttacaacaattttctatatatttagattcttttactccttttagggctgaaacttgtgcgagttgggttgggttgatgacttaatctcaatttaaattaagaaacaaccaatctgagctcatgtctacccaatttttaaacccaatttgactctatttatctaaattcaagttgaattcgtatgatccaaaattcatccacaatatttctttaaaacctttttcagcatgtttgtaccaaaatttaaatagtaaataataccaaattttaagataaggtaaaataaataaatttatatattttttaaatattaaaaaaagtatatgatacaattataatttcatatttttatttaaatttttttttagaaaataaacattattatataggataatataatataaatattataaaaatataaaataggttcaagttatgttatttgacttggtctatatcatgatttcgaccaatccaatcggagttcaagttgaaaatacttaatataaactcaattcaagtattaaaattgattgctcagatacagggttgagttggttgcatccgtacttgcattaattgatttgaatgttggctcaaaactaacttttaagagttgatcaactgttcagagcaaaaatacatcagtagagat

SEQ ID NO: 100357 - DNA, 652 bp, Vitis vinifera
  Intron number 1 from transcript GSVIVT01037698001 (locus G SVIVG01037698001) derived from phytozome v7.0 (chr-ID chr1 9; pos 7053878 to 7054529)
ttttgcatttttccccctctagaacggttttcctggtaagtttatatctttgttggtccttcaaagattagttgttacaatctgcattggttagttggtccgtttggtcaatgggaaaacaaaggaaaaagaaaacaaaagaaaagaactggagattttacccccttctgtttcttttggtatttgatcggaggaatcagtttattgagctcagttggatggagatttggttgcttagagtttaaactatgacagtttttttttttggttcctctttctcactttttctgaggttggtctgtttggatgtctgagaacaccaaggaaaaggacaaaagccagaagattatgatccttcctctgtttcttttggtttctcacgattggaaaattttgggaaatcaattaaagtaattagttccattgagttttgtcaggtaggagattttagtttttgaagaccttaagtattaatttcctctcttttcttggagtttctcagcaaccaaagtgctttgattctgtaaattgattccttatcgttgaaaaaagattcagctttgtgtattatttggttcaaggaatccttatctaacactctatttgctctttttcagttgagattctgggataattcaaattcattcttctc

SEQ ID NO: 100358 - DNA, 550 bp, Vitis vinifera
  Intron number 2 from transcript GSVIVT01032444001 (locus G SVIVG01032444001) derived from phytozome v7.0 (chr-ID chr1 4; pos 27461979 to 27462528)
tggagagacccttcctcactggcagatttcaccaggttccgcactcctttctttttgtctctttgatccgtttggttcgtgataaaatgcgggaacatgaaaatagacaagattcttaatgttgtgtttgttcattattttcaaaactaatataacttaacctaagtcaactattttagtttcattaaatgtttcccccaatattttgggaacaaaaacaacaaattatttcatcttcttcagttttcctggcaaccaaacgtgttttttgggtctgtactggttctcaagaatggggaaaagagttaaagaaaattaaaagtgtgaaaaaatgaacaaaatagggagtcgtgacattatctagttaagctgaaaattctgttttcttggagttaaatggcataaagaggatgacttaattaattctaattacattttcccctttttcttgctaaccaaacctgacataaattctcacaaaattctaagttctgattatttggttattgcttcaggaaacaaagtcacgacacagcgaagcaaaaggctt

SEQ ID NO: 100359 - DNA, 746 bp, Vitis vinifera
  Intron number 4 from transcript GSVIVT01032444001 (locus G SVIVG01032444001) derived from phytozome v7.0 (chr-ID chr1 4; pos 27462794 to 27463539)
cttcagttcaggtatattttatagccatatcatcaaggatatagtgtaaacgtgtgtctgagttgtttatttcgtgatttgttgttttaccaatcaaaaaaatattgtggtttgttgattctggtaagctttacaagtcaaactgttgcaccatctatgcatccatatatctcctattagttggttcatgatcttcacgagttgtgaatcttgtgatactttgaccattaagtgttcacaaagaaacaggcgtgttgaaacagaaaagatatgtttaatttagtataacagaggtgtttttagtggttgccccgtgtgctcatgctgtgtgtttatgggcttgcattttttttcatacgatggaacaagattgtaaaatcattttttatccattttttagtttgaccctacaaaaggttttatttgaatacatggtgataaatagattcttggcatgctaataagcatatctgtctcagtcaatatttagtatttacacattaaaatgcaattgaaattcatttttttctgtttttatgtagtctggttaatttttaaagcacagaaaatgctactgtactgcagattaaatgtcaagttaacataaactctcaacagttctgtttaaaatggtgggcaaccttaaggatatgctgctgttgcttaacttggttgtagtttttgtgcactttataagtattgtagtaatgatttgtttgtcattgtataggaactcattgttatcg

SEQ ID NO: 100360 - DNA, 676 bp, Vitis vinifera
  Intron number 1 from transcript GSVIVT01036529001 (locus G SVIVG01036529001) derived from phytozome v7.0 (chr-ID chr1 4; pos 23088099 to 23088774 reverse strand)
cttccgtttcttgatctctcagttaagattttacaggcttctttcattgtcgcgtccgtttcgttgctgagaaaccgtgggaaaagaaaaaggaaagatagttcgatacgaattctgaatcaaattttagtttgttcttttcttaacaacctaacgtcttataattgtccaaaaactgtgtacaccttgcagaatttgattttatgtagaaatgttatgattcgtatttttttctttttatattttgttattttattttatttttgcattttctgatggtcacgaggttgagttttgtacaccttgcagaatttgattttatgtagaaatgttatgattcgtatttttttctttttatattttgttattttattttattttatttttgcattttctgatggtatccgatctttctctgttggcattaaactaaacatggcatcccaggaacaaatttttttctcattttttgtttcataactttttgttcaaaattttggacataaatcctactattgaaatgtgcagtgatgattctttggggaataaatttagtttctatgaaatggatttcagatgacaaaagaatcaaaatatacttttaagatttttctagtgtcttttagttttgtttcctgtggagattgacaaaatattcctcaatttccaggttgtg

SEQ ID NO: 100361 - DNA, 586 bp, Vitis vinifera
  Intron number 2 from transcript GSVIVT01031502001 (locus G SVIVG01031502001) derived from phytozome v7.0 (chr-ID chr6 ; pos 17872548 to 17873133 reverse strand)
ttccaaagtcgtcaaatatttgaagggtcttgacggtatgcttgcagcctactcccactgtcgacgatttcattgtttttgtttttgcgattaatcgatgccctctgttttggtttggtttggtttccatttcgattttttttttttttgtgaaaattttgtgtctagattcgagcattactgttttgcttttcgctttcattttcgttgttcttttacatcattttttttgctttttgtttttctgtcaaatttaagtggtaaagattaatcaattgttgatgatttgttctgttttttttgcttttcatttttctatgcaatagaatccagaatcttcttgtttgctttttaattttgacgatatcttatctaaatttgtgttccttctctcagatccggtttcgttttctattttgaattttgcatgcctttctctttctttccttttttttccctcaaaattgtctaatataaaagagggggaaatgatatcgattgagttctagctctgaaattatctgtttgcgatttctgttccgtgaataaaggtgtggcgaacgcgaaagcagacagcgacactaac

SEQ ID NO: 100362 - DNA, 953 bp, Vitis vinifera
  Intron number 1 from transcript GSVIVT01038106001 (locus G SVIVG01038106001) derived from phytozome v7.0 (chr-ID chr5 ; pos 23524766 to 23525718)
aattattacttaataggtaatgaaatatgaattttggctttagttctcttcttctaccttacatgtgtgtgaatgtctcttaacaaaagcagaaatttttttatcctagttaatgaaaggtagtggcaagttgcaactgtatgaaatgattcttgctccaactcctaaaagctaaaaccaataagatttgagattgctattgttttgatcataaatatcatcaaggagtttggtatgagtgatgtgccgttattggtgtggagatgatgaccagccaccttccatgactttaaaagtcatgtacacattaagaggccccaatcataccatgtagatattaaccatgactattagggcctctatcttggatttgagaagagcccactcctaccctgtagatatgaactgtgaccgttagagcctctgtcacatggggttgtcggggccggtattcatgtggaacttaactggccccataatgaattaatcaatcctcgactcagttgatgtttgaatataaataaaaaaaagaaagtgtttttcatagtctcttttaatatattacgtaaaataatttaatgaattaagagcacaattaaagaagggaaacttgtgttttgggtcggccatttgggaataatttggttttcaaactcaagaattggaaatctgagatacaaccgttaatgtggaaaataatttggtttttgtgcactttgtgttgactcctttttttgtgcccaaattgctctcacccaatctccatgttagcattcatggcccaaaacataagtttcccaaaacacaagtctgtcttcaactttcctcccctgtttttcttcaccgtcttccactgaaatttagttgttgctcgccatcataacttgtccaccgtcacacctttgtgattgtctgcagccacgaaacacatcaaagtcggcaaggcttcgttg

SEQ ID NO: 100363 - DNA, 954 bp, Vitis vinifera
  Intron number 1 from transcript GSVIVT01031801001 (locus G SVIVG01031801001) derived from phytozome v7.0 (chr-ID chr3 ; pos 4478581 to 4479534 reverse strand)
actgtatagtaaatgtaactgttcttttcttttcttaaacgtccataaatttttaccattttctctgccacaatcctcagctgtgcattctcttctgcaaaattgcattaggcttaatagacaaacttaagagtgcttttttgtagcaactacaaggaagatttacttcttttgactgtgtttttcatttctaatacaacctctttcaagtgccctttatgctccttccagtaatgaagaggatgttggaaaagaaacaaaatgttttgatgcatcttactgttaatcctttccctaggttccctgttctatatattaaaatacaagcaaactaaaacagactgcagttatttccaatatattaatggaacatgaatcaaagaaggaagaaaaaaatcacagtttctatttgttgcctatctcaattcaatcacctgtatttcttgacaaaacaaacagaagttgacactgcctttgtacttctgatgccagtactgaaggatgaaggtaagtattgattttcctcttttgtgactttctctgcatttttacagcatgaacattgaattttcctgtaagattcaactttaatgggaaacatactattttcaatctttccaccctaaccaagtatgaggctaagaggaaaggaaaaagaatgcaaaggtgcccttatactgaacaaaggtggaactggttcttttagttactatttcaatgaccaaacttgatataagaacttaaaatagcagatgttgaattagcagttcttcttccctgaagttgcttctaaacacactagtttaaaatggaccaattcaggcgtgaaaactcattgtagttcactatttctgcttgaagttagcatgttctgacttttaacttttaagttgctgaggagcatatcttaactttctttcttggtatagggctgtgacgcctctgtgcttcttg

SEQ ID NO: 100364 - DNA, 822 bp, Vitis vinifera
  Intron number 1 from transcript GSVIVT01035736001 (locus G SVIVG01035736001) derived from phytozome v7.0 (chr-ID chr4 ; pos 3810455 to 3811276 reverse strand)
gaaagacagtctcggttaaccaatttcaggtaaacttttattgattaaagattgtttgggttaattgctatacatgtgttttgtatagagccctgtacttgaagcttaacaatttttcatgatgactagtttactgcaataatgtatcaactgtttgataacaagatcttatgttgaaaatttccacggtgatataatctagaagtgtgaatttgaactataaaatcaaagctgcaaactggggcttcttttttattatcctaatcatgtttatccttttagctgcttgaatccttaagtacaacatattcaacattaaaaaaaaaaatttatgctaaactttcagttttatcaaactctgttttagtttgtggtacttaggttcctttgtagaaagttgttggttgaggatttagttattttttctacttaattttgtgtaaatattaattaatttgtgaagattcagtcttctgggaatcacttgtctctctaattgggtggttatatagctgttgattgagattatattacagaatattgatatacaagaccccaatgattaatggttctgttaacttgtttttaatttttagttttttgccactattgtctgtgctattgtttcaatctgtgcatatgtatttacattgttgactgggtaattgtaacccccctttaaatcattattcatgtgtcaccatcctcattttatatgcagcttcattcctatccaatattttgcttgatgttgtgcatatctttgtaacttctaatcaacttggtgttctatctacctgtgaaaacaattgtaggttaagg

SEQ ID NO: 100365 - DNA, 924 bp, Vitis vinifera
  Intron number 1 from transcript GSVIVT01031495001 (locus G SVIVG01031495001) derived from phytozome v7.0 (chr-ID chr6 ; pos 17956199 to 17957122)
actgagttgctgacaaggtaaatttggttgaattttcggttttctgtgatatttggcatctgggctgtctgatattttagcaattattgggtttatcaagttctgaggttccacctgatggattgtttttccctaagaatttgcattttggattggggtttttaacttcctggaacccttgttgattgggttgtttgatttttgagctgttattgaggcattgttttgcttacatgtcctgagcttcttacttctacatgatcactgtttttcatcaggagaattctgagctgttattgagcggactgttttgtgttatttgcacttttggtgcaattgaatcatctgcaaatcttaaatgggctgtttggattttgagcagataaggaagttttttttcttttcctttttcattatcactcaagttttcagtatcaatttatctgtgttaattaagtctgattgattctgttttccttttcctttctttttttcttttttttttttctttttctttttttttttggggccttttttgggaactcaggtatttggttttgttctgtgttccgagagttaactgagtgatttttcaatttcttggtgactgccgttggaaaatttccaaattggggtttgaattcaaattagactccttttggaatttggaaaaaataaatcttgcagatcatgctccaaaccgtaactgacagtctaggtaacttttttatactaagttctgcagatgtcctaaattgatcgagtatagtgatcttatgctcccaatgataagctgactcatctattagcaccagcacatttcacacatttttttttcttctgtttatttgatttttattcaaacaaacaggaccactgtatttctgagaattgagatgagtgttttttgaaattggagcagat

SEQ ID NO: 100366 - DNA, 590 bp, Vitis vinifera
  Intron number 1 from transcript GSVIVT01038591001 (locus G SVIVG01038591001) derived from phytozome v7.0 (chr-ID chr1 6; pos 21637274 to 21637863 reverse strand)
gacacagctcagtggccacaggtacacagaccccatgttttctctctatgaaatcatgagatcttctcttttttggggtttgctctatttatatagatataggtgtagatattcaaggcaaaattcagactttagaattttatttttattttttggctgtgggttttgaaatttttttcttgttgattgttctaaaagttgagaactttttttccatgagatgatgctgttgagcccccactaatatttgaattttgtgttgttgtcattttgagatctttcatcagtttcaaattgaaagtactgcacttttttgttttaatttttttttcttttcaaaaatactatctgatgctaaaaagggccaagaaaaaagcagttataatttgtttttattgcttgctgctgtaatcctcactagtgtaaagctagctagcgacctcgttttctttgtcttgtttgtttcccatgactttggctccatttttttttcttgagagacaaacactatggttttctgatgatgaatttatgcctcatggccttttctttcttgtctggatttttaggggattggagtggttaaaccc

SEQ ID NO: 100367 - DNA, 765 bp, Vitis vinifera
  Intron number 3 from transcript GSVIVT01031763001 (locus G SVIVG01031763001) derived from phytozome v7.0 (chr-ID chr3 ; pos 4180837 to 4181601 reverse strand)
tagtgtttcttttggtcgggccttgtaaattcaaggtagctgttaaaccttcttgttacttggatatacaacctttttgtttcaattcctgttggtgctggtttcaattacctcctaattaatatcacaattcagaatggactaattcggaagatgtattcaatgccctgaaaaattataggattgggttgcaaagcaacttttctatacaggtggggtagaatacttagcatagaagatatagggttgagggtggtactgaaactgttttgggtcattatttctagtgtgtgatatcaaaggaaaacagaaaatgtagaaagtaggagttgggaaatctggtgatcaaaaagtaagattcaaaagactcagtaattgaataggtattgtcaagagtgacaaagtagttctcatgtttgagtttcttctctcccatgcaaaaaaaaaaaaaatggaatggctaatttcagtactaactagtatggaattttgaacttcacctcagggcttgggaaatgaaaccccaaatcgctctgaagaaaacaatagaaggaatgtgaatgataggttaattcatactttttcttgagaaaaggttttgtaattcagacttcatattccctttggcatgtggattgttgtgtttaattctgaaatttcttactgcttgaaattggtatctgttttcatggtagctttctctgtcttattctcatctccaactttctaggtgttcattgtgagggtcgaaaacacaatagaaga

SEQ ID NO: 100368 - DNA, 973 bp, Vitis vinifera
  Intron number 1 from transcript GSVIVT01035163001 (locus G SVIVG01035163001) derived from phytozome v7.0 (chr-ID chr1 1; pos 12457245 to 12458217 reverse strand)
ccttgtcttctcccgccagaaaaattcgccgactggtacttttcttttcctttctgtcttcttttcccccgaattttgtttgttttcctagaaaattggaagggaatgagacgctgaagctaaacattcgttttttttttcttttttctttttctatcttgaaatccgtctattggtagtttctttctccagaacatcaccgtttgtatgttttttccgggaaaaaatttacggtacatgcttcttttgaagcttaatttttgtttttctttttttagaaaaaaatggcgttaatactctttcctcgttgaaggaaccttttatttgggccttttttttttttttttttgagaaaattgacagaagaggatgccgataggcacttcttcttcccttccaagataatcgagttggcttgtttcccaggaaatttaggggaaatgcaaatttgaggttaaattgtcgtttgtctttttctcttttgatctttgtgattatgtcaaatagtttttacgtttctggatctcggagaatggacaatcagacgttaaatattttatcagcaaccgaagagacctttgttcaatgtttcttcccgccaggaaaattcccttctgcctcttttttctcttgtatttaatggctttttcctggagcgattcatggtgtttgttggccaagaaaatttaaagaaaatgcaactttggaactactaaaatattcaatttttttttttccctgtgttttttgaaattcggtttctctctggatatggcaaatctgagattaaaaattttatcaccatccgatggaactttaacaaatatttgaattattctttaagctatatagaatccgcaaaaatatatgtataaatttttattactaaaaagattgtgaagcttgtcgttaaatttgattaaattgtgacaatgttgtattaaaaacattttttttttttgtttcgcgtagg

SEQ ID NO: 100369 - DNA, 801 bp, Vitis vinifera
  Intron number 2 from transcript GSVIVT01031729001 (locus G SVIVG01031729001) derived from phytozome v7.0 (chr-ID chr3 ; pos 3882656 to 3883456)
aaatttttgatctcatagctttgccggttagttttcaagaacgtagatttcattattgctgattttatacatcgtatgattcatgaattggagaatggggttgttgtgatagtggttgcagcaatgctgcctgataatggtaactagaatttattagattgacaattggagattttggcaaagaataaggttagagaagttcctatcaactgtttgaagcaaagagttttaggggcttgtggtgttagatgaggatcctgcattaattggtagggccattgaagagaagcaactagtactcaaaattggaggaaaaattctagttctttaggccatgtttggttatgcaaatttgaggtaaaatgcaagggaaaaaaataaagaggaaaatagaaggaaagaaaaagtaaagaaaaattttaaaaacagatttagaatcaataaattatttttatatggtatgtcaaactcattaacatatttaagtttttttacataaaaattaaataatttgaaaatgcataagtttccaagtagttttaatcatatttgcttcttttccgtatttttcatagtaaaacctatcatgagaaaatggttttccttaacattttttttcctttcattagtgctttcctagaaccagacatagctttagatttcttgttctttttatgtttgcatttcccaattgatgaaatcaattgttgttatttgttttcccttttgcgatgtttattcttctgatctggtttgatattttataaatggcttatatcatgtgcattgtttaagggagga

SEQ ID NO: 100370 - DNA, 808 bp, Vitis vinifera
  Intron number 3 from transcript GSVIVT01035590001 (locus G SVIVG01035590001) derived from phytozome v7.0 (chr-ID chr4 ; pos 2563660 to 2564467)
ctggtgcccctggaaatgtaactacaggggttatggcttaaaatgccactatcttcatgatgaaaatgcaccagctatgccttttatcaatctacctgtgatccctctgccttttcttctctgtttcccttcccaagttctgtatatagaactataatctccattttttaagtgtaagttatgcttaaatgaagaagaaagttgtgtttttctatttatgatggttcatgatgtgcctgtatctatacttatcagagatgaacaccaggctttactgcaattttttaaatagctaagtataaatctgatttgggtttttttatttatttattggaagtaaaagaaaaataaaagttgccttataagttataatgccttaatgccaagtcaaagttaatcacattcttcaggctaaaaaacaggtaggattcctttgtctttgtcaactttccctgaacccaaaaggaaaaaggttttattcaaagaataattatccaaatttatgtaaaataaaataaatcaaagtggacctacaattgtggggtctgtttgggagtgagacagagtacagtccacattgatatgggacatccccactccccagtgcctattctgttgtttctattccttcaaacctttcagtgattgaatattcaaggccagactggaagcaagagaggttggtttttattctctttttctaatgacggggatgaatggaaaatatccatgccatgtatggatcatggatggatgagatttatagggttatcagtgttttgactgcagggggatttgggggtagaag

SEQ ID NO: 100371 - DNA, 493 bp, Vitis vinifera
  Intron number 2 from transcript GSVIVT01031453001 (locus G SVIVG01031453001) derived from phytozome v7.0 (chr-ID chr6 ; pos 18343656 to 18344148 reverse strand)
tattgtgccattttaacagtagggtgagaatctttcctgaatgttttgcttattttgaatttatttccccatttccaagcccactgcaatggattcctttttccacaattggaaccctagaccaaccttcttgcaaagacaagagctaacactaggcattgctaggctctgacctggtgttttttaaaatttgttaattagttgtactctctctctctctctctctcgatttagttgtcttctctgatagttaataattgcccaccatgcagctacctttatgatacatgagaatccttttccatctatttccctattttcctttatgatgcatgagaatccttttccaagcccgctgcctaggcacggccagctcccaagttgtaggagcagctacctttttcagttgtattctctaggattagtaaattgtctgataataattgcttactgtgcagctgccaggttgtatcagcagcaacctttcgagttc

SEQ ID NO: 100372 - DNA, 581 bp, Vitis vinifera
  Intron number 1 from transcript GSVIVT01031383001 (locus G SVIVG01031383001) derived from phytozome v7.0 (chr-ID chr6 ; pos 19318023 to 19318603 reverse strand)
aagaagaaactaaacgcttggcagagattcgagaggtaagttgataggcttagccataagatcatgctatcttctacttgaaaaagcttacatcaattcaaaccgattttagtaggtgtagatgaagtaggttaatcagtttggaattgggaaaacaacaccactggcatatatctatgttttagtttaattttaaagaatttatgattctcccctctatttgattccagaggtaacatgggaaagaaaagaaaagaaaagaaaagaaaacttatgctttcataattatttgggactggtaagctaactgcagagttctgttccctcttcatgcaattaaagaaagtaaaaccaattgcagtgtaactggttttcttttctcttcatctgcaatagttctatattcaaggtcctaattatcactttcatatatgaattaatctatctgtccatttcaatcataagtcattgtgtttttgtgtctaactatcatgtttaacttgttaatgatgagatatttgcttgcttcacttaaaatcaaaaccaaaatctattaggagcttgaagctctcagtgatcca

SEQ ID NO: 100373 - DNA, 582 bp, Vitis vinifera
  Intron number 1 from transcript GSVIVT01035984001 (locus G SVIVG01035984001) derived from phytozome v7.0 (chr-ID chr4 ; pos 6805324 to 6805905)
caacgaacgattctctctcatcttcgctcaacgtatctctctctacctcttctctctcctttcattctcaaatgcaaattagggtttttatttttattttattattattattttttaaaattccttctgctgttgaagttctgtttggttgccaagaaaaaagtaggaaaaaaaaggagaaatcaaaatttgaggtttatgttctattctattttattttttcgtaatttggagtggagaaaagacaaaccttcacttgattgagcgtaatacaagtgtaggctcagttcaggtgcttctttttctctctccttctttcttcctttcttattttttcccccccacactatttggtgggggccaaagcatagtacgatatataaatctggggttcttgatcgttgtttggttaactaggggtggttctcaacgtagattcaggatgtaggctgtgaatagggttgatttgatcatttctgcacctaaaatttgataaatcatggatggtgaaatactttttatgatgttttgagggtgttcaaattagtgttgaggtgggaggagcaactattcacttgaaag

SEQ ID NO: 100374 - DNA, 1036 bp, Vitis vinifera
  Intron number 1 from transcript GSVIVT01038176001 (locus G SVIVG01038176001) derived from phytozome v7.0 (chr-ID chr5 ; pos 24085265 to 24086300 reverse strand)
aagtagggttttgaactcaaagaccacaatttcaggtatatttctaaccctaaccctcctgtttggtttccgagaaaatcgaggaaagtgaaaagaatatatcgagcttttttgttatgtttttattaggtttgccagtttttttatcagatcctgaatgatgccaatttttttctttttttgaatttcctctgtttggttgctcagaaaatagaggagaagggaacgaaatgatattcagagtctatatggtctgattttatttttattttattaaagattcaaaagagaaacccccagttcaacttagccaagtacttcgattgatgatatatcctaacattcaaattttttggtttgttttcgtaggtattctttagcttaattttctcggctgccaagcagtagtctggatttaaaattttgatttgttttattttctgaaattttctcagcgaccaaatgagtctaatttggttcttgtttatacagagctacttgttctggttctgagttatgttcttttgtgcttactatgttcttttgtgggtttgattcggtgctgtgttgaggaaatgtgatctggtggtttccggctattagagatggaattgaatgattgatgtggctatagagttagtattttgttataaaatttattggggtttgtggattctttggatataatgttttatatctatcctttttcactgttaattattttcatatttgcatttgagtttggtttagataattgctgtatggagcaactttgatgcttaccgtgctagttatgaaattagaaatgaggacgaattgacgatgttatgcaatttatcataatatcatgggattaaaatataacaaattcatagaccaaattagtggagtgatttgcgttacctttagtattagcaattgattcttgttagttcttttctctttgcatttttgttttccaatgattgttaggttgactatgatatgattatgtcttttaggattcagaacttcctttctcaaagtcgagaaacac

SEQ ID NO: 100375 - DNA, 974 bp, Vitis vinifera
  Intron number 1 from transcript GSVIVT01032750001 (locus G SVIVG01032750001) derived from phytozome v7.0 (chr-ID chr1 3; pos 1043734 to 1044707 reverse strand)
tccgccgcgcttcttctgcccccaagcctcaccaggttgattccttttctttgaattccctaagctccttttggctgccgagaaaactgtggaataaaaggttatgtttggttcccggaaaatttgagggtaaatagagggaaagaaaacacatttaaattcaataaattatttttatatcctagttcttgcttatatactttattttaactcttctatacaaagattacataatttgacaatgtataaatatttaactcattttatttatatttgatttttttttagtatttgctctagtatatgaaattctggattttgtgttgtactggttttgggaaaaggcgagatactccccctaaagcataatatttgagttgagctcaatggaccggggatttttaactgtctcgttttctgatcagtgagaaatgtggtatttagatttctgcgctatttgtcccctcggactctgaccaaccaacagggagtttagagaaatatggtattaacaattcaagcttctggtttaattccagttgtatctaatatattgctataggaatactacttataggtgcttatgttgattcattattataagagtgatgctattgactccaaatagcctttacaaagtgcttctgagcacatatagttggcaaatgtctggtgcacaaatttagaatgttatgcccctgagggtgttaagagaagcaaacccgaaaagtaaattgtgccgcaaatcatttttctattataggatagtcatatattgcaagtttatcatatgaacacaatttaaattttctccgggattctataaacacatgcgctttgttaacaattgatatttgtgctgatactttaaccatgttttcagagatctatttttttttcgttatttcagtctttgtcttgttgcttatgattttgcaggtgttgggggtaattctctctcccacaagggagtt

SEQ ID NO: 100376 - DNA, 1035 bp, Vitis vinifera
  Intron number 1 from transcript GSVIVT01030951001 (locus G SVIVG01030951001) derived from phytozome v7.0 (chr-ID chr1 4; pos 19602477 to 19603511)
ttaccggctttagccttcttgtaagtcttcttctcttcttaaactcctgtcatgaaagtatgtgtttgtctttttgtgctatctttggttcgagaaaaaagaaaaacaacacaaaaatgaatttctcatattttattttattatgaaaaataaaaaaatcaaatataattaaaattattaaaaaatttatatatttttgaattatttaataaaaaaagttcaaaataatacataaaaataatttattaattttaaatttattttttatttttctttatttttcctttttattttctttccccacatcaaacttttcaaaaaccaaacggaagcgtaatattatttgataggaatggctgttttgtttggaataccaccaacttggtaaaattcacctgaattcttagtcacacagggcacaatcaacctaaaattaactgagtccataaggaaggtgtttcaacagtaagttttcagggcagcttcattggttggaccttattgtttagtatagaagcaagaggtaaacttttgttgttgatgttcaactaaatgaatatcaatttatcaaattcagtatattctgataattaactttgtaatggttcacacaaatgaagagccacaaacttaggctgtgtctaagaactgagaaatgggcaaaaaaaataaaagaatataaaaataaaaacagcttaatttctttagcaaagtcatccatttttctctccctttcctcagtttttcctgagaatcaattgctgggatattagtggcctttagtttgcttggaatgagagactgaggtgggatctgtactctcgcttacaaaaaggaatcacttccttcatgggcttgattcccctcacatccatcctcaaattgctcaacaattaatttgtcctactatatatgcaattattacagtaattaacaattcaacaacaacaattcatcttataagtccagaacaactaattagttgaattttatgcatggcaatcagtcaggattggcaggtggattggaaactct

SEQ ID NO: 100377 - DNA, 880 bp, Vitis vinifera
  Intron number 2 from transcript GSVIVT01031927001 (locus G SVIVG01031927001) derived from phytozome v7.0 (chr-ID chr3 ; pos 5454325 to 5455204 reverse strand)
atcgaagaaccagcaacatttggaacaacaaagaggttggtgatgatttttacccacaactcttagcttgatatatattgtgagactgatttccatacaactcttaaaccttttgagatgactagtagtttccaatagcagcctctcaattatttttaatcctgcacataaaagtttctaagtccttacaaaaccaaaactgcagccttcttagttttccctcgcctgcaacaacgccatttctttccctcttttctgttttttggctatgaggtaatctcagctcaatccatgatgatgataaaccattctatatttttgtgggtctgtagctttgaggaagaaactgaggtagtagtgctagtgactgtaatcattcccttaattgctactacctttctacttgacaggtgcagagtaaagccttgtttgggatatcatctttttggctttagcttgagcttgaagctgaagtggaaacttaatcttttcgtattaataagtattgaacataaaatagcttcttacataagctaaaagaaagcttacacgagagctaatattttcctggcttccatattaagcttttcattaagctatacattcttaaacagaatgacctaaatagctacacgactcttatttaatttataaaagagcttttgactttttagaattcgatccaacatatttaaatcaagctcttattaagattgtattaacttgaaataacttccaaaacccgataattggaccttgtttgtactaagcttttgtttttgactttagtatatttgaatttttttaataagtataaaataaattttcatataagttaaaataaagcttataattgaagtaattttccttttttttttag

SEQ ID NO: 100378 - DNA, 902 bp, Vitis vinifera
  Intron number 1 from transcript GSVIVT01034097001 (locus G SVIVG01034097001) derived from phytozome v7.0 (chr-ID chr8 ; pos 15169310 to 15170211 reverse strand)
agttcgtcaaggacgtcaagcgtgtcattgttaaggttgtttcatactctcattttctgcgcacctttttaccgtttcatcatctttcaccttcgatttcgtaagccctagtctcagagtcatcaggatatatatatatacattcacgtatgattgttttatcctttttcctgtgtatccttttctttcttgttcacggctctttgcagggagattttgatttttaaacaaataaagaaaaaagtaatgctattctgattgggaaacgaaaacaaaaataaaaaatgctgttgattgagaaaagtgacaacccatgtccttttctattattattttccctttaaattaaaagactgatatagaccagcgtcattattagacgcaatattttgatttggttttgaaaatatagttaaattacttaatgtgattttaatttttaattgcatattcagatcgtttccttttgaagatcgtcgctttccatttgttttggcatttgttattgaaaataaaagaagaaaagtgataagtcaagtgaatgcttcatggcattaagcattctaatcctttgatcatttattgtggctttagtcagatttatttattttaattttttgtttttctggcaatcttggcgcaattggataccattaattctgtgccattcaattctattgatttgtttctcgatttattttaattaattatttttttaattgatctcagtaatgggattttggcttagaaattaaacagacaagtgatcatttatattatgtaaaaatttgatgatttatcatgcttccgatgatccggcattattagcattcaccatttgttttgttgactggttggtttttggatggtgaaggttggaacagctgtggttactcgagccg

SEQ ID NO: 100379 - DNA, 620 bp, Vitis vinifera
  Intron number 3 from transcript GSVIVT01030760001 (locus G SVIVG01030760001) derived from phytozome v7.0 (chr-ID chr1 4; pos 15494149 to 15494768 reverse strand)
attggttcccgtgattctgttggtcctagtagcacgtaagtatggtttgatgtttatcatttggttttcaacaataagtttttgtttatggctatctcagaattcaatgttatgttttcaaattttttagtagaaccatgagagagaccttaatcccaacaaggtgtgtgattttaccaacttttgaattagtaatgtatagatttcagacaaaacagaggaaatgaaaaggaaaatgaaaatttgagtctcatgttttatgtttttgttcactgaaaattggaaaaacaaaagaaaaaaaaaaaccacctcaatttacctaactggttttataaagatcagtccagtggagattctgctattcttgggctctaattcccaaatagcaaccatttatgactgacaatttccaaagtctatttgattgggttctaagatagtgtaggtgaagaatgggggttagaattcttgaatcttaggttttacattttctggtacccaagagaacaaaagtctcccttaggtatccctattatggctatttttcttggaagagaagagcctttttgttaacttgtgttcttttaactgttatcttttttatctgtaagaggaaatct

SEQ ID NO: 100380 - DNA, 737 bp, Vitis vinifera
  Intron number 2 from transcript GSVIVT01038549001 (locus G SVIVG01038549001) derived from phytozome v7.0 (chr-ID chr1 6; pos 21956406 to 21957142)
cggttttgttattacaaggtgtaattccatcgagcccctattattctcttacaatttacattagacctttatcatgctactggttttctgatgtcaacttacactattgagtagactgaggctgaagttaaactaccttaattgtaatggaacatgcctccccactttgtatgaaaaggcttgctgtaacaactgttttatccaatgcccttttgagctgacgtatatgtttttactttaaattaaggatttggttaggtttgttttgttgaaattaaggaagaagcgaagagccatattagttggtatgactaacagttccctacacatacacacatatttgcaggtagtacttacagtttggtcatcaatatgcttggaactgatgtctcaaaaagcaatattcctaaatcattcaattgtctgaagcatccaaaataacatttcttccatatcatggccaatccatctgtgtttgacctcagtttggttaggctttcactttgtactgtcctggccatgtgggtgtggtccatggaaaaactagtccatcagttaatcaatttggtcttgttagcaccattattaacagcctcaaacacttgataccatagatttaaattgaacaaatttgttataacctgaatcaatgttttgtatgaagcaaattatcagtaacaaatgtattttgtgaattggcaggtagggctctacaaaagtatcattggcataagctt

SEQ ID NO: 100381 - DNA, 943 bp, Vitis vinifera
  Intron number 1 from transcript GSVIVT01037922001 (locus G SVIVG01037922001) derived from phytozome v7.0 (chr-ID chr3 ; pos 6314700 to 6315642)
ttaaggtacaatttattttttcttttgcaaaagctaatattattaacaccgcctaattaaaagaaggtgcacaaatgtacacaagaagtttagaaattagacataaaggcaattggattgagagattaacaaaagcacctctctataatcatcaagagcctaaccaatcaacacaatctaatatggacagtcatgttaaaagccagagagagcataagaaagaatttgttagagtttgttccgattattcttcattgacaaaaactctaaaatgttaaggtacaattttgaacatcttttctattgaaagaacagaatatcttcgacaccactatttttgtttctccatatgagactattgatagccaatgaatcttgtgcattttgaagctggccttgatgcgatattcaagatcaaggtgtattgttataagtcattccctacataaatagtcaaaaaataatctcttgatggaatatatgtttaatttatttatctattccatgctaacaaaacatgtctactatttttaatatcaactaactgatcgcccaaaagctttgtcattatgtggccattttttttccttggtatccaaatggatcaatatgacaatatttctaaatggtttgacttttacttagctaattaagttgatttttttctgttgagtcaccttgttttcacttggccatggtttattgagggtatgttttaccatccattctgtgaataagtacaaaaaatagttgattggttgtagcatatcaatgaatttggcctcttctattagagcagacacttgttaatgaatgctaattgcattatcttatttgtgccctctctacatatttttcaggaaataagtatgactcattaatctttaaatagtaattattgttgtttggaatgcctttcaggcaccgtttataaacaggtatt

SEQ ID NO: 100382 - DNA, 1069 bp, Vitis vinifera
  Intron number 3 from transcript GSVIVT01034990001 (locus G SVIVG01034990001) derived from phytozome v7.0 (chr-ID chr5 ; pos 724983 to 726051 reverse strand)
ggtcaggaggaaattgccatcccagtacattcatcgtaggtcttctttctattattctgttcctgtgttttctgttgttattctgtacttgaacttcaaaatttgaaagtgttacatatgtagatgtaggtttatcttatttcagtgagtttgactggtacacttccttagtttttttggactgtatgacttgctataatatcgtacatttaactaataaataatttctctggtcatctaaataacaaaacagaattgggtcagtctttgggtgcccttttctctttatatataatactgtgtttttacctatcgaaaaatctaaatgacaaaaacagaactagttagattctattacactttatggtttgccatagcatcagaagcaaaattcattgagcctcaatttattaatactaatttgtatgaatatgatggtggtaaactctgtaaattgtagatcttctagacttggtagttatgtgtcatagccactttaaactgataataacttaccagttgccactgaatgattccaacattttaaaaaattattgtatttgtatgtttttggtgctaatagtgtttatcatgtgttcatcgcttgtgccctctgtgttaagtgtctcttggtaagtccttttttttgcttataaaagaaaatgttttcagtgctaaaaagttgactttagtgaaccatttgctcaagtgaattaaattcatttgattgtaatattttagtattattagcatggtgctctacaggagtttataaaatctctgatgtcaatatgttagtatcacaacttatatctgacgcattttatttctccaattcatagccaatatgtcctaatatcaaaataattttaatcacctgatgaactttataatttatacacaatagttttgtagcactcttcaattgacttagtaaaaaatttatacttcatcaatactgccttgttggatctgaatgttaatgtttcttatcttcatctggattccccccccacccccttttttttttgcagcattgaagcagctagtgcagcacatcctactgctg

SEQ ID NO: 100383 - DNA, 314 bp, Vitis vinifera
  Intron number 1 from transcript GSVIVT01031103001 (locus G SVIVG01031103001) derived from phytozome v7.0 (chr-ID chr1 4; pos 2273876 to 2274189 reverse strand)
gtgttcatagtttgcttagggagcctatcaagattgttcattaaggttctgtatactccaattcattattacaaaatgaaaagctactaagatctattggtaagtgctactattttggtgaacatgacaggttaatatgttaatactgtttgtgatcttaacatttgtttggtagtcaatattgtcagtggaattgaaaaaaatttctgttgaataagaataatgcacattgtgttggtgtttctaatcaaaatccaattttacactcttcaaaattagctggtgttgcaggcggagcaactacagctgcattg

SEQ ID NO: 100384 - DNA, 527 bp, Vitis vinifera
  Intron number 1 from transcript GSVIVT01035263001 (locus G SVIVG01035263001) derived from phytozome v7.0 (chr-ID chr4 ; pos 11595243 to 11595769)
tattgaataaaggaaagtaagttcatgaaaataattatctcaattttcacatttaattttttttttcattagtttgttgccattttaggattaacggctttaatatcttttatggcgcatttattattgtaatattgattgaattcttaaatctctatatattgagagcacacctcagaagaccgaagctattctcgggtttgtgacgtattttttttcatgtttgttctttaaggtttttaattctagggtttggttttctttgtatatggtattcaccgtttctctgccttgtttcgtattgtcattatcttttatgaaagcatagcaactttagattgattttgattgtttcaaggtgaaattttagaaactttgtgttttaaggttttttttttcccagtttcaatcatgttgttcaattacaatttccatttggggttttgattttttttgttttgtttttgaaatattttcctcttgttgttttagggcagaggttcttttcatttggcattgaggattgg

SEQ ID NO: 100385 - DNA, 925 bp, Vitis vinifera
  Intron number 3 from transcript GSVIVT01033968001 (locus G SVIVG01033968001) derived from phytozome v7.0 (chr-ID chr8 ; pos 16221003 to 16221927 reverse strand)
ctgcttctagtttggattcaagatcttttggcccagtatgttgccttaacaccatgttcctatattacttgaaggaggggggctttggaggtttaaatgatgattatattcttcattattttatttcggtatttgcatgatcacaaatttagaagtctatactggaaaatatagaaacatttgagtttgaagtagacttggcataatagttctgaataattgttctccaatgtcatgctttctgagacacacacaaatagacacactccttggccaacttagtgcctatgatactgatttaggttgtttactgcaccagtcaatggcgataaaatgtgcagtttgatgtagacttagcataataatactgagaataggtgttgcatgaggcttttggtagagaattagtgtacgaaggaagaacaaaatttgtgacgattttaatttgttctctccatcagtattggcaaatgtggtgtgtgtgtttgtttcaactaattgcgcacatagaaagataatgatttagattgcttatctgcatcaatcttaataccaagaatatattaagagtaagtgagtaacaactcaatttaatattggtttgaagtttaggccatgttgttcctgattatctatgttatcttcagagataacctctctgtgacactttacgatcactctttttaatttctgtaatagagtagttggtttttgcctccaggaatcaagttttccccccttggaagctgctttagagcgttcttgttagttgatttttttcttaaacagaaatcaacactgtttactgtttatgttaatatatatactgaactgtgtgattgttagccagagtcttggttttctgtaacttgaatgtgatgccaatgcaggttcctttgggtttagcttgcggaagggccaccca

SEQ ID NO: 100386 - DNA, 689 bp, Vitis vinifera
  Intron number 4 from transcript GSVIVT01035631001 (locus G SVIVG01035631001) derived from phytozome v7.0 (chr-ID chr4 ; pos 2849132 to 2849820)
gctctgcaagttggtctcaaggtaccatctccaataatcaatatcttttttttcagcatttctgttgaatttccctctctctctcttctcctcttatctcttttcctaagaaaaaaattgttggttgcatttgactttgttttttcttatatgggtggcagtttttatttccataaattttcaacactttttttgaactatggtttgtacttcagctcttccttgcaaatgggttgatctttggtgttatcttgttcttgttcttgtttccttaaatttcaacatttatttctcaagttgtgctttatgttccaaacttcatcgcaaataggttgatgatattctgggttacattgttatgaatcatgattgcgccaaatttcaacatgtttcaagtgggttggctacttggtctagaagcaagcctcagtcaaaggtcttaaaaaaagagaaaaaaaccttttttgttgggtgttttctatgttctggtttggatttcaatttgttgtcaaatgtggggttagtgattttttgggttattttcttcttattgccctacattcaaatattttcttcccagtagatttcttaagaaatttagctattaccttattttaacaatttataagtgtctttcttaagaaaattatgtttggtttcaggagataccaaagttcttgcagctgttt

SEQ ID NO: 100387 - DNA, 427 bp, Vitis vinifera
  Intron number 1 from transcript GSVIVT01031351001 (locus G SVIVG01031351001) derived from phytozome v7.0 (chr-ID chr1 4; pos 130923 to 131349 reverse strand)
gcttcaggacgtctgtgttgccgatctcacttctggtactcagtttcctcccttccccccattattcttcttctgtatttgggagagtcaacgctcaagttccattttttctaggatgaaggcaggagaagctcaaaatgggagaactccaccatactttttctcctaagtaatactaataataatgagtgctctgtctgtctttcatttttattttaataataatttcttcttggggggttttagttttagatttgggtttctcccatggaatgaattattgagactagctttgattgatggattgattaatcttcgattgcttcaatcccgccgccattcattggtttttcattcttaatcgaactggtgcggaaaatgatcagacaattttacttgttggatggtggatcaggtgtaaaggtga

SEQ ID NO: 100388 - DNA, 1070 bp, Vitis vinifera
  Intron number 1 from transcript GSVIVT01037687001 (locus G SVIVG01037687001) derived from phytozome v7.0 (chr-ID chr1 9; pos 6894208 to 6895277 reverse strand)
cttattatctgcaagttcttcaaaaagctcaagaggtgtgtttttacaaaaatattttttttctttttttattaaatttggcatgatatgagatatggaggtccattggcgttcaatgtttccttgactttgatgtggtaggatataagaaaaggaagaatttagtatcaatactttttgctataaatgctcattcagtaagtgtcttttggagttaaatgccagaataactagtcttcctaccaccaggtcatgtcaaaatatagatcaatttgggaatacattctttaagctgctttgttattttgaataatttgcattccgtatgctgaagtgtacttgttttcatactatacgatcacttaatacattagccttcaaatcagtaatgatagacatcatttgtattctagtcccatctaaattaaagggattatgattgctgtgtgataattccatatgcattatctgaaggtgtgatatttgctttgacgccagattttgattgctgagcatgtttaattagaatgtgatggtcagactattgcattatttcttttttctttttttctgaaggagttagtgggctgaccaaaatctgtggattactcttgtgatcttgcaaatttcaaattgtcctctaattcaactggagttaaattacagctttagatttggaacatgcaccgaaaggaaattttctgatgctttatatctcacctttccaaggacccattgttggttctccttttctcccttgtggtttacaattactgaatgtatgattcctatttttcacaagctaaatccagcactggatgcagtgtaggataatgcacatcttttgtaacttgggtgttgtaaatggtgccatgtatttatatcttggttggtaataatttagtcttctccaattatctacattcacttcatcaaacctgatagatgatttgagatgataaattactaatgctgactagaatgctttatttagttctctttgttgctgatgccttcattgtctgtggtttccagtcaaaattaactggcaagaatctcaattcagagaa

SEQ ID NO: 100389 - DNA, 810 bp, Vitis vinifera
  Intron number 2 from transcript GSVIVT01038186001 (locus G SVIVG01038186001) derived from phytozome v7.0 (chr-ID chr5 ; pos 24171319 to 24172128)
ttggcctgccccagcactgtgtcatccttctgcaggtttttcttcctatatgatatctcaattttgatgctaatctgatttttgacatcatttttcataatattttgattatctgttggaaaatataagcactcttcatgtggtgagtgccctagtcagtgcatgattaatttagttgaactccccacaattgctccagggtaagttgggtcagatgcgaatttgagggtttattcatgattacagatgtaatgccatttaagttttctccaaggcaagtggctttgggttagctatctaaacagaggtattgaaactactggaagatctgaagatgatgagggagtttggggctgcctccaatcttatggtggagggattggaggacaaatatttgttgggtggcaaatgtgcaaagaggaccattgagatataactataaccaatagatgtgggggaattttggacgttgcttgagttctaggactttggctcttttgtaagtctagattggcagcttaggaagacaataaagctggctaagagacaagtcatccctcttttggactttggtgggggtcaactctctcacctggttttgggtttgggacacatgggtgatttttgtagggagctatgtttttttctctaattttcttatgtgatacatgtattttttttttccttttatgaaggtattctcatcctttttaatccttatatttcttgaatttacatgtatagtttcttattgaaagaacttgtcaataatattcacttacttgatattaatatatagggattcacaga

SEQ ID NO: 100390 - DNA, 336 bp, Vitis vinifera
  Intron number 3 from transcript GSVIVT01031155001 (locus G SVIVG01031155001) derived from phytozome v7.0 (chr-ID chr1 4; pos 1656202 to 1656537)
agggtgtgaatcaggattgcttcattgtgtgggaggtatgcctagaaaattggcaattttataaggcttacttctgagaatttggaggagaaataatggaaaacaacattctgaatataatgtttggagaaaatctcaattaaaccaagaaaatttaagatttaaattttgatgatttttctttaatcttatattttcatagcaaccaaatggcatgatgttgtttatggctagttgtttggttctaaatgaaatgaaaatgtgggttttgattgctttaaattgatgaatgtgattttgtttcttcaatggcaggaatttggagggcaagaggat

SEQ ID NO: 100391 - DNA, 917 bp, Vitis vinifera
  Intron number 2 from transcript GSVIVT01035733001 (locus G SVIVG01035733001) derived from phytozome v7.0 (chr-ID chr4 ; pos 3793120 to 3794036)
ggtaagctgtatagtctgtaaagtatacactctcaagtgctagcacacacattcaactttataaagcctgaagcccaactctagggattgatggacttgaaacactgttcaagtatgcttgatcctcacccaaacccctagaagattcaattttaggaagggcataaattgagttataatgatggctaagatccatgagcatgagatgcattatagctccaaatttttttgttgccttgtctcaatgacctgtaaagtggaaaagatgggaagtattcacagatggcattaggatggcttgctaaagttgagaattggagtatcttctcaagctattgtcagccctttttcttcccctcatcatttttgagatctgaacagaatgtaaaatttctataaagaaaattttagctcagcgcaaatgttggccaccctgaaatggcatatcttcctataacataggtgtgatgttatgaagattttgagatggattattaacttatttataaacatattgaagataaaaaaaaaaaaatagaaatgagcttgaaggcccagtagtactaatagattttgagataagcactatgttcaaacatgtattaataaaaataaaggcagcactggttaagagatgtggggtagtgtagattgaagataccaaataagtgggatgaaggctttttgatatatgcttggtatcctatgctgctgttatcacttactatcttgtccaaatgctcaaaaagctgttgagaatctcttctttctcattataggtaggtagaaggtattgcagtatgaaagaggctttgttaaacacagttggggttctacataatattgactggaatcttcctcctttatgctcacatcacaaagtacagaacaatctctggagttgctgggccattggt

SEQ ID NO: 100392 - DNA, 937 bp, Vitis vinifera
  Intron number 1 from transcript GSVIVT01035409001 (locus G SVIVG01035409001) derived from phytozome v7.0 (chr-ID chr4 ; pos 1080280 to 1081216)
aaaccctagttgagttgctctcgcttcgatactgggtgagtccttttttttcgattttttttttaatttagcgttttggcttctgattttaatgcattagagttagaattgggatgaattactttgatttatgaattgtggatctcttttctgatttgaatatcacagttgaatcatttgttaattgcagtaattctagtttttttttggatgaattgtagtttatttgaataccttgtttccttgtttgtcgattcacctaattatgaacttatttacaatgcttgaaacaagttgactttcatttgctacctgattgggcatgttcgacatctgttggcatgcaattccttgttttggttagggattctagggttctggtcgaggaatcgggatgaattttattttcatttctgaaacacaaaattgataagtctgcacgatgtttccacctgctcctagaaacttttgcatgaattgtgggtgttcttttgtttatggatttctctttttaaattttcacgttgagttagattcattttgcaaatattgtaattaatgctgcattgttccttattggttcatttattatgtatttggttgtggagttgtttgataaaatgaagggaagaatcttatgcttgaggttgttttggttttggaaaaaagaaaaaggtaactgcaattaaatctaatcatgttagccttagttgactagaggttttcgtcatcttgtctcataataatgaaaaatttaagattcaaatttgtaggttattttcttatagattattctcctttcctacatactgtcatccgtaaggtgttgattataatgttgtttcaccagctttaactaaattctatatccgtaatacgcagaaccatatgctggaaatctcatgacaagttttaaattcttacttgcagaactata

SEQ ID NO: 100393 - DNA, 488 bp, Vitis vinifera
  Intron number 1 from transcript GSVIVT01035962001 (locus G SVIVG01035962001) derived from phytozome v7.0 (chr-ID chr4 ; pos 6535060 to 6535547)
cctttgtcagggaatccgaggctcttcacgctaaggtaccactctcacaccttgtttttttcctttccttttgtttgattttccccttgactttgtcaattctgttttagactaccatatactaattgtagaagatgatttagatttcagttagggttttcgttttcagtgttagtttggatagtggaatcatgaccccctaaacgggaattctctcccatctgcattttcttatttcttgaaatggtttctttgctttttcaaaaaatgactccaactcaaatgggtttgtggaggactgtcatttagggttggcatccctttcagagaaacttaatggtctgtttggccattttgtttcctaagttaggaaattgttttcaagaatatgtaccaaacaggccctaagttccagaatgtggcatttctagtcctaaatttttcaatcttatatagaaattttgactggatgttacaggccggtagat

SEQ ID NO: 100394 - DNA, 640 bp, Vitis vinifera
  Intron number 2 from transcript GSVIVT01031646001 (locus G SVIVG01031646001) derived from phytozome v7.0 (chr-ID chr5 ; pos 19573018 to 19573657 reverse strand)
atcgcatcgacactcgcgtgcccattgaagtcacggtttgtgcccttttcgctctttcttcagcgattttttgggtattaattagattgatcttgtgtggttggttcagtcataattttagaagttgattggtggatttttgttaaattagaggggaatgcttttggatgataattcattcaaaagttttaccctttccaaatagaagctcaaccattttatgctggaaactgagtattgtcttactagccatttcagccatgaagtcattagaggtaggattcatcttgcgttgggcaaacctacatgttgacactataggtgctaccattgactacttaaaagagagtattactcgttagctattcagagagccctggccttctgtaaatcatccagccggaatttcttctcaagattattacatttaaggatacccatgtttgcaacttggtttgattactctaacaaaaggctatagtagtgtatgatgattatcttacacatttttctattaatttttatatgaatttctctgtttttagattttttttttttttttttttgtaattaatcttcattttttatatatgcttgtcattaaggtgggtgaactgaagaaattagttgaagagggtaa

SEQ ID NO: 100395 - DNA, 950 bp, Vitis vinifera
  Intron number 1 from transcript GSVIVT01038580001 (locus G SVIVG01038580001) derived from phytozome v7.0 (chr-ID chr1 6; pos 21741821 to 21742770 reverse strand)
cgcttcctctgtcgtcctcggcatccttctcgtcggtgagtgttgttatcaagctttttgggtcatgttggttacatggtgtgtttgggagtccagaaagtggaagaaaattttgaattttggaccttgttttgttgggttgggttggttctgtgttggaagtgaatgatgagaagtccgatgtttcgggcttgttttcttttcgttttccgtcactttcccgggaaccaaacggaaagatctttgatttggcttggatcttttgtcgatggttacttgagttttttaggatataatgtgatctgcttggatgagggttcactgaatatgcttagcttttgttcttcagagcagtttaacgtgttcatttcaggatttgatttatacaaaagaaaaaaaaattaatcagaaaaagtttgtgatcttagtggtttgcgaaaaatcaaaatttggtagatatattatattctattagatagagcctgaattgattttgaaaccacatgaaaacttccatggaaaaaaaaataaaagctgaataatttcaattaattcagtgctgaaatgcctaattgtaatttgaaattgtgggtcaatttattgctcatattccaactttatgtgaatttgatctgcccaaaattttgcttcattgcttcattggttttgcttcaccattaaatgacctgatgaaatttttttgattaatttaagtcaaaaatgtagatggggcaggttgggtttctttctctttttctttctttcttctttttttttgtcttttccaatttatgattcagatggccctctatagtcattgagattagctatggtttcttggatatggggtttaactatgtttgagttaaactttatccctgagttctttaggtaagttttcagaatcaatggaattgaatgttgatgaggttaatctacactatggcagg

SEQ ID NO: 100396 - DNA, 922 bp, Vitis vinifera
  Intron number 1 from transcript GSVIVT01034623001 (locus G SVIVG01034623001) derived from phytozome v7.0 (chr-ID chr1 3; pos 14118167 to 14119088 reverse strand)
aggtatgagacattatattcctttcatgatattttaactctttattcacctcaagaaaggtataagatcaaggcaaagtttctttatcctttagcctgttattgtgttttttttcggacaattttaatgtctataatgttgtgcgtgtggaagatctgataccacttgttgtacatgcgaaaatgtcaacataaacatattaatagaatgacaaaaaaaaaaaaaaaaaaaaaataaagcaaaccacatagaaacgttttaatgtggtttgacctatcatgcttatcttcatagatgagaaaaaacattccactatataataaagaacatcataaaaaataaaattagatacaactattgagttttgaaacatctcacttttcttcactctttgtatctttaccctaaagtactatggactatatattttactccatcaagtgtctctcactttttcttacatttacaccctggtgagccctctttctccaccgaatatctttcgctctttcctcacatttttatccactacgtatagtcctcacaagttcatctccttctcatgacttttccctataaaaggcttagaatatttatataggaatataaggaatctaatatttacaatagcatataaacttataaaaaacattctatataatattccttttatgaaatatatatatatatatatatatatatatatatgttctaattagaagtttgagacacctcccaatatctaacaagtgccatctttgatcaacattaaccttgaagaaagcaccatcttcaactaagttttgggctcctacacattacgtactacacgccttggcttacttttgactacttgggtctttttcttcatatcctatgttccttttatgcactaactaatttacttacattttatggcagt

SEQ ID NO: 100397 - DNA, 254 bp, Vitis vinifera
  Intron number 1 from transcript GSVIVT01032375001 (locus G SVIVG01032375001) derived from phytozome v7.0 (chr-ID chr1 4; pos 26798496 to 26798749)
cctctcaaccttttcaagcaagaccctgtctctcggtaaaccccacctcttccttcctagattccagatttctactttctgtttggttgctgagaaagtgaaggaaaaaaatagagcggaataattatattgacgtatgtgatgttcttttccttcgcctttctcagcatccaaacagaggttctgcctgttttttgatgttttcttttgttcgttattgttattttttggttttgttgcagttccaagttaat

SEQ ID NO: 100398 - DNA, 144 bp, Vitis vinifera
  Intron number 1 from transcript GSVIVT01036734001 (locus G SVIVG01036734001) derived from phytozome v7.0 (chr-ID chr1 9; pos 23194877 to 23195020)
tctccgacctcatcagacgcagaatcgtctcgcaagtgagatttgaacccatcattaattcaatactcaatttgttttttcttcggctaatttgataaatgttggttaggttttggaactgggaattgtggttcattcggtgat

SEQ ID NO: 100399 - DNA, 1023 bp, Vitis vinifera
  Intron number 1 from transcript GSVIVT01032222001 (locus G SVIVG01032222001) derived from phytozome v7.0 (chr-ID chr1 1; pos 13141972 to 13142994)
agcactgcatcatttgcgatatagcaggattttgcgtaatctgacttagtgaatcgctatctaacatggagccaaacatgctttcacgctctgggagatcaggtccacccaatccattgggtgttggcgtcctaacatcaccacggggttttgaccttgtagtggtgtttgtttctctggagcaagtagaatgccccatcatcgtatttatcaatgctgtcaaaaagcctcctaagattgcatcttgctcctgacattctgcaccctagatactcttactcttagtttatatgttttgcgtctgagaaatcaaagcactgcttttatcatttcagtgcaatcaatctgccgagtatagataatggtcatccagagaaatcaggaaattcaattataagagacgacattttaggaaggatccagtttacacctccagtagttttactgatgttgcaacctaatctctgatgtccatcttgtcaaattcatccatgcaacgtaagccattattcttaagggttacattcttcccagctaaatattctttaatcctggtaccactctccagcagagaaaattctcagtttcttcaagttgtacctcttgtgcacctttggaagtggcttctcagatttctttggggtgggaacttccatgtctgtacatatcggtgccacactctgggccgtagccatgctaggatgagcatagaggacctcatgaggatagagagcagggtatggaagtggagttccactaatcaggtttctacacttttttaagtggtcatccaatcaaactcgtctttccgggtatcagcttggttataagcttggctgtgaaggtaccaatgagggtgagaagtgaaaaacacgataacaggacaagggtgaggagccagtggtaatgtcttcggtggacaaaaaaaggagctggtcatcttcgaagctactgtattcaaccattgtcaatgccctctctgatttaggataccagttttcagagctttctgaagttggctgc

SEQ ID NO: 100400 - DNA, 692 bp, Vitis vinifera
  Intron number 2 from transcript GSVIVT01037628001 (locus G SVIVG01037628001) derived from phytozome v7.0 (chr-ID chr1 9; pos 6347673 to 6348364)
taggcacagtgattgctctcgccagatcaatctaggtaaatttttcgcttgctattgcatttcgctgtttggtcgcccagaatataggtggagttgctctgtgttattttttgatatggtagttttggggacgtgtttcttttcctgcattttcctagcatccaaactaggtttgtgtttaattagatatccagaagccttccctccaccatatgagggccttgtttggcacaataatagcctgttgcttgctcagttaaagaaaaatccttaagtgaagttatgtttttccctgttgtcgatggttccaaagaagttagtttggaagttatcgtttcctgcattttctgagcaaccaaacaagctttgtattttgctggatttgcagtagtttttccgtcaccacattaagctcttaatgggtaaaacaggaaacatttcattccttgaagaataaaaaaccccaatgtagttacttaaagacatttttattctcctgatcccatttccccactttttctctgttggaactttcaccatgtgaccattagagaccgagtaatcaatctaatttttcttgttcacgcacttgtgtatggattgagtgagctacggttctatcagtgtttttcattattgaatgacaagcaatttgtcattctatgttagggaaagggggagttactcacaat

SEQ ID NO: 100401 - DNA, 784 bp, Vitis vinifera
  Intron number 1 from transcript GSVIVT01037948001 (locus G SVIVG01037948001) derived from phytozome v7.0 (chr-ID chr1 0; pos 11421933 to 11422716 reverse strand)
gttcctgggaagttggatagacttcacacaccaaggttctatctttcttctttaatctttggatttagagtgaaatctacttttctcgtatatagcatttcaagtaattgtttttcttatgaaattcttgagctgttctgttttcacttcacaccttgtggtggttgctcccaaatagcacataaaaatggagtctttttaatcagatttttgtcggctgcactgggttttctgtaatttcacttctgatttattcacaaatttgaatttgatggttttcactgcaattcagtagtttttatttatgggttttcttgttcttaggctttaaaatttctacacttactgggttgtgtctcatggggtcctcttttggacctgttctgctggggtttgtatgccagttgtctgttatgaatctgtggaatatgctttctccattttatattgatttaattttatcttttattttccataatttgatcttttattttttaatttcctgttttttctgataaacaagttgtgacttcactatgtttgaatttttatttgttaattatttttcccccaactgacctaacactgacattttcgtctggtagtaatgctgtttatgcctttgctttctttctcctttccccttatttttctctgttttcattgcttgaccttttcaggcaattcacataaataaagtatttctacttgactaattatgcttttgaatctgttgtttctgaactcaggaggaatatttcaagatctgatcctcattataatt

SEQ ID NO: 100402 - DNA, 618 bp, Vitis vinifera
  Intron number 1 from transcript GSVIVT01033584001 (locus G SVIVG01033584001) derived from phytozome v7.0 (chr-ID chr8 ; pos 19537827 to 19538444)
cacgcagacactacgccacaaccgacgaacaccaagtactactccctctacccttatatagctttctgcttgttcaattttgtgagtttatgttgtttggcattgttgctcgttaattttatttgcttcactctgcaaccattgtggtttgcttatgaataggaggatttttatttttttttattttttaattgtacgtgctttaagaaaaggtaatttgtatttacagtgacatctaaaaggataagaaatcttttataaagaatggggcttgtttttaaaaacaatttttaagttaaaaaaaaggttttttttttttttttaaagttttataaaaatgaatggttgagaaattgtttttgaaaataaaaaacaaaaaacttatttcaattagttgttttaaaaaaaaattattttgattttataaaagaattgtattacaaatttttggtattaagtagtttcaagttatttctgaaattatcaaaagctaataaatccaatgtttatttagcaagtgaaattggcagattgtagtagtaatgttgcatttggggaatgacgtgttttcatctggctgtagaaccgagccttgttttggtttggtaaccaggtatc

SEQ ID NO: 100403 - DNA, 772 bp, Vitis vinifera
  Intron number 1 from transcript GSVIVT01032399001 (locus G SVIVG01032399001) derived from phytozome v7.0 (chr-ID chr1 4; pos 26965628 to 26966399 reverse strand)
cttgctccgcattctcattactcttttgtaataaggtaatctttggttgttgttctttttttctttgtttctctttttgggttttgtttggttgccaggataaccgcagggaagggaaagaaggggagagcacttttgttctgtctttgtgaggtcttttggttgacaaaatctgttaatgctgggtttgggttgagaaagctgtgtaattttctgggtgctatgtggttatttagatctttatttattgtttatcatttttttggtatgttatttatttatttattattattgtgaattaaggttcatgtattgttttctccgttaagtttggggttttcttggattttatgggttgctggtgatttactctttaatgggtctctgcagatttagtgaattacatttcttttttgaatttgcataatggctgattcgaattcatgccttcggtttgggtgtttgcttagtggttgtgcatagtagtgtcaattacgacactctttctttgagaaagacgcttgccctttgtttggttgctcagaaaactgatgaaaagattaaggatatatttgggtcactacagttttattaagctctgttgcgtggaggctctgttttctctgactgtttcaatagtgaaataagattcaaaattttatttgttttcttttcacacgctttctcagcaacaaaaagggtgatagtttgtaagcaatagccttagaataaggatcgatgagctcaattggattttgatgtgacagcgctg

SEQ ID NO: 100404 - DNA, 567 bp, Vitis vinifera
  Intron number 2 from transcript GSVIVT01031030001 (locus G SVIVG01031030001) derived from phytozome v7.0 (chr-ID chr1 4; pos 21157773 to 21158339)
ccggcaagaccacttccgccatcttcgcggctcaggtgattctcctatcaatttattccatttttctagcattttgagtttttgggatttttacaagagaagtaacagttgtatatatcttaatgggattttttttttttttttttgtgatttggagttgaaaacattttagttgagctggtgctgtctaccaacagattcggatccaaaacttaatccaaccacatttttaggggaaattctgcgctgggtgtggggatatgtaattatttgatggaaattctttacttaattatggggaaaatgcagccatttgatggattatatttgtcatttttattttgtgacgctgaaattgtttgggctccatttggatcctaaaaaagaccagagagaaagagaaaggaaaagggaaatgctggatactgtttgagaaaggaatacgttgttaagtaatttttcagcattttcattttctctcctgaaatatgtgagatccaagcgcagccttcatgttttaaatcagtgttctaacgtatcttctctcatgtgtgtgtgtttagcatt

SEQ ID NO: 100405 - DNA, 884 bp, Vitis vinifera
  Intron number 2 from transcript GSVIVT01031280001 (locus G SVIVG01031280001) derived from phytozome v7.0 (chr-ID chr1 4; pos 633070 to 633953 reverse strand)
tagtgatcactcctgctagcacttttgctgagcaggttggccaaatttcatgagggtgtttttctcattttgaactagtttaaggagtgtttcgaacaatttttgcatggtggcctttcgttcaattctaaaaatgaggtctttgtcctttttcgttctttttttctttaagctgttttttttaggaaaaagttgtttttctgaacagtggtttgagggtcttgttgccattttaaactagtttagattctgtttggctcaatttttttccttgtctcttcgtgccttggtttctacttttgcgtagttatacaagcatggtgttttcattttttgaaaaatcttccttaatttggttttggtctgttttgtttttgttgcctcaaaaaacacttctgtgttttgtcctttttctttaaagcttgtattcgcaaaatcgttttattgttttctcaaaatgatcctgaaaacatgtgatcaaaatacacgttttcaaaaacacacatgcccctgggtgtaacactcttgagggcatttttgttatttcaaactgttattatttctttttattttgaaccattctttcatattttgtaattattatttttacattgtttcccaaaaacaattgaaaaacttgtctaaatgtcttttagcatggagaaacagaaatatgttcacaaaacaggctcttgggttgatgcatagcaaactgtttgtttggtttcttgctttcttagaacagaaaatcctcgactaaacattttctagggagcagccaaagagggctcagtttcttgttcatcaaaaatttcctttcagttgtatcaactatttgaaaacctctttcttatacatacatctgtttgcaggactatttgaat

SEQ ID NO: 100406 - DNA, 628 bp, Vitis vinifera
  Intron number 1 from transcript GSVIVT01031509001 (locus G SVIVG01031509001) derived from phytozome v7.0 (chr-ID chr6 ; pos 17784871 to 17785498)
gacaattccaatttctctgtccccttcaagaccaggttttttcattattttctctaaatttcaacgaattttcctcatgcttgtcaaaatttgcgttgcattttctttggggcttttaatttggtttctgttggtggtttgagggtgggattgagtttcccggagaaaacgcgggaaaaaattgagagaaattgaaagaaatttgtgaattttgtagtttttgtcctttttgtatggagaaagttaaaattgtcatggatttattattatgctacagagttgtgttaggtccaattgagtagacgcttttgctcattcaggtcaacggtggaaaatctatgtttcaggatttttaatgtcttctgttttcctaaatttgatcataaggtagtggtgactaatggtggattagggtttatctctgaatgaaatttgtagttgctagtaacatttacatatgtataatagaatcacatatgacttagctttcggttatttagggattatggatgacatgatactcgtccaggttattggttatcttgtaattctgaatcttttttttgcattttttttaaaaaaattatttccaggccaggtgcttcgtcagggatatttctgggggcag

SEQ ID NO: 100407 - DNA, 862 bp, Vitis vinifera
  Intron number 1 from transcript GSVIVT01034632001 (locus G SVIVG01034632001) derived from phytozome v7.0 (chr-ID chr1 3; pos 13685007 to 13685868 reverse strand)
caggtcggtgggttaattctgtggtaagttactaatcctttagttgaattgaattgccaattaacaatttatatgaatgcatgaagtctagagtcgggttgtaaaatatgtgcatttttgaatcttttttagattgtgaccattatgtcatgtatgttgaatggacaccaagcacaaccaccgcatgcacactattttgatcatttgttctcagtgcaccttctattgaagataattttacttcgtgtcaaaatagaatactatttgttgatgtttgtattgattaatcccacccttgaataagttgttctcagcaaccttaaagtaaaggcaaccaactaggtaatcattgacagatgttgcatgtatcttgatgttgatatattgggtcttgatcttgggacatgtgatatggtatgcaacacttgttacagttatttccctttgtaatatatgcaacagaatttgtcgtgacttttatctaataacataaaacataataagtctccattgatcatgcagttgtttatccctgtatgtgaaaacaatcactggcacatacatgtggtaaactttccaataggttgagtagagatcctatcattattgccactacgtcgagggaacaacatcagtgctttaacgaggcgattgtcactagctatccagaaagcattgcatgcatataaaattcacatgaacctggaggtctcaagatttctgcatgttcaactagatcttgtccaacaaaaaaatgggtaaaagattataatatacttactaataaacatatttttggtcaattatatttctcggatttcagtcatctagatgacaagtctaagtgtaacatgttataggt

SEQ ID NO: 100408 - DNA, 487 bp, Vitis vinifera
  Intron number 1 from transcript GSVIVT01035653001 (locus G SVIVG01035653001) derived from phytozome v7.0 (chr-ID chr4 ; pos 3040554 to 3041040)
tcttcaagtcctccggagtcgacgctccagtggttaacaaatccaaaccaaaactctagaattttctgtttgatcaacaattggaagtgattttcttgcttttggaataaaaaaatgttttcattttggttctctctttggtaattctaacctaactgtagctttggcatcattttttgttcttgcttttcaaggccaaaactgctgtttggttagcgtttaaaagcaatatttctctacctcattggaccgatatcagttctttgtgatgactagattttaaaaaaataaataaataattgaattttaaattttggaagaaagtcgtattgatctagccttttgatcgatgcatttgaattgattgaagttgtggaagtatgtgaattacttgttgtttgagctacattgatgttcaacatgattgatgtaaaattgttggacttgttcagttccgctgtctgtgaaacctgcgaaacctgtggca

SEQ ID NO: 100409 - DNA, 856 bp, Vitis vinifera
  Intron number 1 from transcript GSVIVT01035711001 (locus G SVIVG01035711001) derived from phytozome v7.0 (chr-ID chr4 ; pos 3516721 to 3517576)
tagggtttcgggcagagcatttaattcttcgaatcgtaagtttgccgccaatcctctcttcgatgtctataatgtctccattgctttctgcaatcccatttcttcaagcattaataatttaggggttgaaaaacctttgtttgtttatccggaaaaaaattcccgaaggtttttttacaagacggcaatagttttcatatcctacaaagaggtacttgttttttgagattttacgccgtggcattaggtggaatgtaacttcagtggtcggaaacggctctgtttgttgcgacggaaagtgttggctggggaaattcccgagggaaaaatgaaatttgaagcaatagatatgttttgtatctcttgattagttcttcgttttcgattactatttttcaatacgtttcttctgcagcattggttcgaatgtaaatatttagggtttgggaaaggcctgtcgggacggagaatctttagtttactaacaaaacaaaaataattgttttattgcaaaagaaactggtcattttcgtgtctcaaccgatctgtttggatggttttgggttgtggcattgtttagagcgcagtttgaaaatcaccatttgtttggaaagaaaaatttattctgaatctgctttaattttacgagtgcaaaattccccattattgtttcctattgatatccaaaatttcttcatagtagcattagtcccattatgctatcaagaaaaaaaagacataggttcgaatttgatcactctgatttcctctggttcttgatcacaaattttctcaaaataatttttttttgctgttttcaggttcaagatttttgacattgtctattaaccacttg

SEQ ID NO: 100410 - DNA, 710 bp, Vitis vinifera
  Intron number 1 from transcript GSVIVT01038406001 (locus G SVIVG01038406001) derived from phytozome v7.0 (chr-ID chr9 ; pos 11838956 to 11839665 reverse strand)
catagcaattcggaagcaatctcggagttgaagctgcagagactgagctttgctcttccatggatccacaaaaattcctaggaagagagagaaacaatgaaaagcatattagtttctagagagagagaggagaaattagaaatcccctttctattgtatttgaagtggagataatacaaaggagagagaatatgagaagtgggtcaaaatgtaacgagtgtgtgaggctctagaaagtggaaacatcttgatattcatctctattgatacttgaacaaagcaaatgaaagccaatcatttttttcttattattatttgttattttacaataaatttaaaataaatatttataaaaagtagtactaataaaaaaaacttgtaaggaaaaaaggtttttattatttcttatcaaaaaaaaatattttattttgtaatttaaatatataaatcatattataatattaattattttttaatggccaaatgacaatctaaaaataattaaatattatttttcaatttattgtagttacacatccaacatctttaatttccacccccagcctctctttttttttttttttttttttttattcccccttctaaactagatctaaacatagaaaagattttcgtatacatgatcatttttcaagttacaaaagtgaaccctagctaggatttaattttgaagtccttactaatcctta

SEQ ID NO: 100411 - DNA, 781 bp, Vitis vinifera
  Intron number 2 from transcript GSVIVT01033282001 (locus G SVIVG01033282001) derived from phytozome v7.0 (chr-ID chr8 ; pos 21903573 to 21904353)
agaagaagctcactacaaccccgcacagccgccaggtaaacccttaactctcacgtcgtttattctttttcatcgaaggatgcagcagaaaatcaaaacgaatttcctgaaataaacttcaaaccatttgatctgattcttttttattttttatttttatctccaatactctgatgattatttcattgtttgtttgatttgtttcttttcttggttaggatgtgttggattttaattttcattttgatagttgcgaaaattgagtgcagttcaatattaaaatcctcctgaaaaaaggtctgattttcgatttgctgtttttactatagttctgtttggatcccgagaaaataactaggtacgaaagaaaatgctggaattcgccatttaattaaataatggaattagaactgacataaaaggatacaatcaattagaccaaaaacatgtttggtaacacgggatttttcttatttgttaaagagggcattttaggaaacattgtaatattcttttcggtttttcaacatatgaagcacttcgtaaattgaaatcatcccttggacaattttttttcccgggtagaaatcaaaagggtgtaatatattattttttacatgttctttcaaacccatttccattattattttttcttgcaattagatttgattttctttcctactttccagttcttcccattttttgtgtccttccctgacatctaaatatgatcttaaaattatcgtatcttcctcttattcttgctttgccctgatcagca

SEQ ID NO: 100412 - DNA, 519 bp, Vitis vinifera
  Intron number 2 from transcript GSVIVT01037670001 (locus G SVIVG01037670001) derived from phytozome v7.0 (chr-ID chr1 9; pos 6716609 to 6717127)
ccaattctggaatttcacctctgattctttctagggtatcactttctttcattttccctttttcttcatttggggtttggatgtgatgagccttgtttgaatttcactgttgattacgtgttgcgcgtgcgtgtgttatattttttgataatgtagaatggacagttggttgatagctgatggcatgaactattgagttatttcttgaagaaaaatgtatttagaacattcttaattttccataatagatcaggccaatgcctattgaggtattacttggaattagttcacaattttggtgtgtaagttttgagcctgtacctgttccataaaatggtgatctaacgccgaaattttcataatgtactagccagttgatttccacaaagaagtcagtgttaatgttctaaagttgttccagagcgcaatcagatccttagttgaagtgcatttgtctccaatagtgtgggttttggcttgctttatagatagatttaggtttgtttgactggcagggtt

SEQ ID NO: 100413 - DNA, 414 bp, Vitis vinifera
  Intron number 2 from transcript GSVIVT01032082001 (locus G SVIVG01032082001) derived from phytozome v7.0 (chr-ID chr1 3; pos 22910596 to 22911009 reverse strand)
ctattcctgaagaatgttagttcggaatttttctgtttctgtgtttccatttaatgaccctttaattataattgatgatatattaatttgaacttgaccacataactataatgacctcttctctaatcttttgagccatggctaattaaaagaggtagtcaattttgttgtccttgggatgccagcaatgtttggttttggccttaaaacaagaaaactcttgttgcaaaggattcacaaaagttttgctgtccttggttcttttgttagttccatgctgtcattaattaacttgaacaattttatgaagttaaatttattctgacattgtaaagcctaatcatttatctaacttacaaaattttcttcattttttcaggcagtccaaatcattacagtgccaccagttctcag

SEQ ID NO: 100414 - DNA, 667 bp, Vitis vinifera
  Intron number 2 from transcript GSVIVT01038609001 (locus G SVIVG01038609001) derived from phytozome v7.0 (chr-ID chr1 6; pos 21531127 to 21531793)
tcagtcaatttggtttttgctccaccaactgtgaggtacggcaatttctcaccctcgcttccccccgttagtttcccggaaaataataaaattttccggactgcttatttgtttcattttttttctcgggaacaattttcaatagagtagcggaaaccaagtgaccgaaattgtaggcatttgacgttgatcttgttgctcaatgtgttgcaaaattgagagtaatttcgggttgtggattgatttcatgtgatccgtgtttcttactcttctcattgatgctgatttgactctgtgtggagttataggtgtagtgattccagttagtggaagaaatactgattttcagtcatttccagtcttagcgtccgtttgctccccgagaaagaatgaaagaaaggggaaaagaaaaggaaaatgcttgaatttgataaaggaagcatttggtttcatttcgtctgatgtcctttgttctttcactgaaccaaaggaaggtttacactattagagagctgagcaggtgtagggtttggagaatctcggcttgaattttttccagttgtgcatatttagctattctaaatgttgtgacttaaaatttgaaattgacattgtttttttttttcttctagataaggcttttgaattgggggtctgattttaaaca

SEQ ID NO: 100415 - DNA, 1017 bp, Vitis vinifera
  Intron number 3 from transcript GSVIVT01033427001 (locus G SVIVG01033427001) derived from phytozome v7.0 (chr-ID chr8 ; pos 20815585 to 20816601 reverse strand)
ttggtatgttgaactctgcctgtgttttgctagttgatactaccggatgaaagtaggaaaattttctaacattgtttcccttttaaattatggttgttcttcaatttaacagctattattcaagttatcagatggttatccttgtagtctaattacattgattactttgtgatgccataaaattttgagtcttacaagctatctggcttatcatcctcggaaccaaccacaaggatcctaaagaatatgaatactacatttcttgtagttgattttatttccactgtttctttatatctaaccagctaaatcagcatctctcagtcttttgtcctgcttatctttcctctcatttatttccatggttgtttatatctagccagctaaaccatcaatttgtttactgaatttttattcagttggtggtgtgacatttcatattgaatctatgctgtgacatttcactttggttatgcttagtttctggaaggtgctaagaaaaaggaaaaaatgttaattaaatttttttttgtttagatgccagggaaaatggtaaggaaaaaatggagaaaatgctagaagattttccttccattttctttaagcaattgtgaggaaagttaggggaaagtgcactcctcaaccatctaagtttctttccttcaactttttatgaacaactgaacaagagaatatatatatatatatatgtatgtatatataatttgcttaccagtttttttccttctatcttttttcgctattttctttcccttgaattttccaggaatcaaacatagggttattgattgaaaaaattgtgaggatagtttttcactgatgaagtgatgtggacaacttactcctgattcaaatttttaataatatttctatcagattgtttccgcttggattttttttgaataaataaatataaatgtgtggtatgttactatctgatagaaaaattgtactcttttagatttcaagaaggaattaaggtcgcttaacagagaa

SEQ ID NO: 100416 - DNA, 768 bp, Vitis vinifera
  Intron number 1 from transcript GSVIVT01032393001 (locus G SVIVG01032393001) derived from phytozome v7.0 (chr-ID chr1 4; pos 26918523 to 26919290 reverse strand)
tcatactcaccgacctcaccggatcatcggcggaggttcggtttccttcccacccctcatacaatctctgctaatgtccttttttttttttttttttactattattcttctcttttatttatgtaattttatggggtttgtttgattttgggataagaaagttttgactacaaatgggtcggtgattaaaattgtttgatgtaatttaggtggagttaggaattgtttgaacagaaagttagggttaattgatataattatgagaagtaagaacctactggatttttctacaagttagagaggtggaattggccatttggtgtgggtttattgatgaggagatatttgaagaagatgccatctttagagacttggttcgtttggttttttatgatgatttgcaaatttggctttgtcagaactcttcttcctgagtctttttccggaattctgttatatctttggggaccagtgtgtcaattttgggtccatgacagactgtcttatttcatagtcagcactacacctgtgccaggcatgagtaggttgctgatttagttcttcagatttttacttcccttcaatacagtccatcgatatttatatattccaaaatttgttttgtgaatttattttttgggatctgttgaaatcaggggtctgtttagtacacacactcattttttatcaaatcaagttaaaatggaatgtgttagccttttattattaccgtctgattcaatatgaaatggtttcaggtgcttttgt

SEQ ID NO: 100417 - DNA, 667 bp, Vitis vinifera
  Intron number 2 from transcript GSVIVT01033531001 (locus G SVIVG01033531001) derived from phytozome v7.0 (chr-ID chr8 ; pos 19967122 to 19967788 reverse strand)
atccttcagctatacaagagcaaagacgtgagcgcctctctctctatcgttctttcttttttcttttttctttttttctcttggttttaaaattctgagacatgagagattataagggattttcttctttgattaactttctgcgtctgtctgggagattctctttggaaagggttgtttgggtcacaggaaaagcatgttcaacagattaaatctgcttgtactttctttgaccggatccttgcagaaagaagaggggaggaaagaagaaaatccaaattccaagaaaaattgtttttcctctcttccgaaatccttctttatttcttgttatttgggatttagaccatgacatgtaacaaaccaaagatcatcaagaatttgttgagaattatgtatgtactgaaaagggtacgaagatgggatctgttttttcagctttctttttcttctattttcttctttcttttttctgttttggctggcagagagctacaaatgcacgatgattccaagactttcattcacagctctcctcacttggcttctcctttaatcattgtgtctctctcctccttgtctctctctctttcatggcaattaatgctttcaaaatttcttcttttttccagataactcagatatcagacctccaacgctaaacatt

SEQ ID NO: 100418 - DNA, 918 bp, Vitis vinifera
  Intron number 2 from transcript GSVIVT01036560001 (locus G SVIVG01036560001) derived from phytozome v7.0 (chr-ID chr1 4; pos 23472395 to 23473312 reverse strand)
ttagatcaagcattacagaccaattcaaggttttggtgagtatctcttgaacttttccacactcctttcttccacctcaaatcccaaactcattaatttcaagctttttcctgagtttgatattttctgggtctagactctccttgcagcttcgagattttgaagaacaatactatgaaaagaaaattagaaggtagaaaataattaaatttaatcaataatatttctcctatgaagaaagaaataaaaatttttatttgtaaataattttcaaatatcaaatgaagcaaaaaaaaatcatatagttctttcatataatttctttttttttttttcttttcttttttttttttgcatttctatatgtatttttcatttgtatatcttgtgaaggactaatgaataatttaaattgttttctacctttttaagctttccatatttttggtcaaaggtaaatcatggaaggaacttgacaaaaataattcatgaaagaaatttcctttcatgaaacatgtttgtaaaagttaagttcaaaaggcaataatgatcattctggtttgaaacctaagcaagtaatcacactggcaaagtctcttcaaaagacagattactttcaagatgggaatgaaaaaaagggcgatgtctgtagtcatcaattgccagtcatgacatatgggccgctcaaaaacaaaataacatcacatgatccaccaattctaagccattggttacgctaatttttgcctttttgctgggcattcgaattggatgccttggatcaggatcaatggaatacccagtatgctaccaaggcccattgtcttaatctgatttgcagaaaaaataatagcttcttcattataattttttttttttctgtgttgggatagaacaattctcttccattcaacaaat

SEQ ID NO: 100419 - DNA, 670 bp, Vitis vinifera
  Intron number 1 from transcript GSVIVT01036780001 (locus G SVIVG01036780001) derived from phytozome v7.0 (chr-ID chr1 9; pos 22669232 to 22669901 reverse strand)
tttctctctccaataattctactttttcaggtatacattttgtttttgttttgttttgttttttttgttttccctccaaatccatgccaatctaaccacatatgtgcatagtatagctgtgttctggagagttatttatgaagagtaatgttattccttttgtgaattgcttctcagcagagacacagcacttaagtgccttcaatttagtaaaatatttgtccgaaacgtaattcctgaaactcgttggcgattaatagtaattttcatatccgcatggaaaatcaaagggataatattttgagcaaaatcaatggcaactgtgttattcaggaaagtaccttggagaggcatcactctgcatgaagtgatagattatgctcttcttgaatttaagagtatgagtcacagccaggattatctcatgaaaaggtgtccttttgaacagtctttgatgtgttttggctcaaaacccgtaaatttggactgtatctgtatttagcttgttaagaagacatgagatggctcaaaaaaataaaaaatgaaaaagaataagttttatatatatatctatatatatatatatatataaattttaatgttatgttgaataatggtatgtaattgtgctgttttttatatgttatgatgttaatgccttaattcaggg

SEQ ID NO: 100420 - DNA, 695 bp, Vitis vinifera
  Intron number 1 from transcript GSVIVT01032193001 (locus G SVIVG01032193001) derived from phytozome v7.0 (chr-ID chr1 3; pos 21694180 to 21694874)
ccagagaagaggctgagttttgtctgtgcctcaaggtattatatccactctgtaatatgatggagtttctatttcttttggcatctaagaacaactctaatctaaattgttaataaatactgttaacacaaagcctgatgagttgaacttttgggtttgatattaatttttcatgatattttgagctcctctacacatggatataacaaatgggggaacatagagatgatgaattcgagaccaagattgttaaaaatcagaattggaaagggacgattttctgtctgtaatgtttgatttccttcaatttgaaccatctgggatctgctgtgctaattttcatgttgataatcgccggattagcatcagtgccacattcacctctgtttctgttctgcaactttctttgtcagttcatccatttccatgttcttattcaagcttttctcagttatgaacatattttgcaatgccataggagaaggggacatgacactcttgaaacaaccctttgtttcattcttcctaatctcaatctatgggcaatgccctcgtcaatccatccaacttagttttgttctgtttttgaaagcaagttgttcttttgctctattccaagtctatattttgttttattatggggtttctgcaaatgaacaggaagaagcagggctggaggcagctagaaggagaat

SEQ ID NO: 100421 - DNA, 564 bp, Vitis vinifera
  Intron number 3 from transcript GSVIVT01033168001 (locus G SVIVG01033168001) derived from phytozome v7.0 (chr-ID chr4 ; pos 8879567 to 8880130)
agagggaggtaacaaactgaactttacctttcgtcattttttttcccctttccccctttctttcatagattcgggcacatggctcctaccgttgtcaggctctgcattttggaattatttggtgctaggaataatttagaattgaattggaaaagagaagtaccattcaacagagctttgagaattaatctggaaaataaaaattcaaggatgactttctcagtggattggagaaagatgcatgctagaaaaggagaaaaatacgtcaaaagatttagtattttgtgagtgatgtaggaagcattgcagtattcataatataagtgcattgctcagttattatcaaattttagatagcaaggtagattacgtaatttcatagaaaatttgaagaaataagtcaagattttcagatctgtcaatttagcacaccattgaaaataaagcccccaattcaaatacagcgtaatatggacgtcacaattttttagatacttatatgtcaattgttgttggtttttttcaaccctgataaggtttgctgcaatggtttcatgcaggtgt

SEQ ID NO: 100422 - DNA, 934 bp, Vitis vinifera
  Intron number 3 from transcript GSVIVT01031312001 (locus G SVIVG01031312001) derived from phytozome v7.0 (chr-ID chr1 4; pos 464339 to 465272 reverse strand)
gtcccccgccatcaaacacaggcagtgatccaacagtgccacttgagattcagacaccaaataagctggacaataagtactataaagatttgaagaacacaggggcttattggcatcagatcagactcttttctacagcccttcaacagcgaggatggtgaagaataatgcaaggtatggtgaaaattggggtaataagtttgcagcagcaatggttagaatgggcgccattgatgttctcacagggacccaaggcgagatcaggaagaactgcagggttgtgaactagatattaatacaaagttcattagcattcgtggaaaaattggaatttgtttgtgttctttaattgcagacattattttttttgctcatgactcgagtgtaaatctccttttgagtataagttcttgtatttgatcatcttttgatggaatatatttggaaaacaaaaagcggaatcattacatatttgttgagacagcttgcttaatatctcttcttaattttaccagtgaatgttttcctgctgtaaatggtctggatgctaactcataaagtgtgtgacattcttttgtcaattagccacgttacagtttctggcacgagttgacaatggagctagtaggcataaaaacaaagatatgacttttatcattaggtatctgtgttcccagttgtcccacatagaaatgccacttatccaagaagctgcttaccatgagcagtgactcggtcacacttgcttttctggatggttcaccaacattagaaatcatatatgcaatagtttctaactgggccaaatgattgatatagctgtgatttgtcacactcgcatgattttttttcaacttcatttcacatatggttcactcggttgacaggtcattcctaagaaatattcagataaacgcaaagaaaattgtataga

SEQ ID NO: 100423 - DNA, 992 bp, Vitis vinifera
  Intron number 4 from transcript GSVIVT01021927001 (locus G SVIVG01021927001) derived from phytozome v7.0 (chr-ID chr1 4; pos 5496950 to 5497941 reverse strand)
gcttaagaagtatgtattaaggcctcttatttgtattatgaattaatcaaaatatatttgcatctgttattctattgttcttatgttaatcttggggaatagtgttatctatttcatcacacttgcttaaaatgtatgtatttatgcacatattttgacttgttaggttttggaaatttttatttcctctttggtgggtcttaagttaaacataaacttttggttgctttatgggatgataaattattaaaactggtgcttaagcaacacatgacttcaatgagacagttcctcggttatgatgaattgagaattagatgggttgatttgggagtaatgcattcatcttataaattatgatgacaatgcatttaaatgaaaagaaaatgttctaggataatgtaaagatatgtatttaaatgattttaatcattaatacttgatccaaatgagtttattaagtgtggtttctgctgagttgcccaatgctctctttagacctgttcctgcatatgatgttatctgtccatatgatggaaaaataaaataaaataaaataaaacacccccttctgcacttctagtgaatatttcattattcatagttatggtgagtagctctcttgtatccatttttcttttgtcgatgctttctcctttagtaatttggtcatttggtgagcttttgttcctcaaaatatgtggattctcacataacgtggccttttttttttttttttgcatgtgtatatagatacttgtaatgaaacaactactaattgaattgttctaataatgaaagtagctacatgtcccttgaatatgctttggaagtctctttttatgactttgttgtgagtattaccttgacacttgcctgtttttgtcagaatccagggtcttttttgttagtcacattgtatattgcctctctttttttatctcctgtagctaaagatgtccaatttcacaaggttgtgcagcacaaagagc

SEQ ID NO: 100424 - DNA, 705 bp, Vitis vinifera
  Intron number 3 from transcript GSVIVT01038570001 (locus G SVIVG01038570001) derived from phytozome v7.0 (chr-ID chr1 6; pos 21786979 to 21787683)
agaagtttgcttatctcatcagcgagcagcgcaaggttattgtctctgaatatgtctcatcaacaactcaatttttgtagttcattaccttttttttttttttctggtgtgtgtggggtatccatttctttatgagtgcattcagctgtactggggaactccctttacttgtgtttcactactgctgtacttatccaactcaaatatagttattgacatggaaaaagggctaaaacaaacatggggtttactcattattttggtgataactgctaatttttttagagaaggcaaaagtggttactagcaatacccgaccctacttggaaccttaatttatttgctcgtatatgcagtttattatccagattctgctgcttttgaattaagatacagttcttggaaccttagtgaattcatgtctagtgcattttacctatgcatttgtgttgtgcatcagcagcatcacttcatatcattcatattgcttggttttaatggaatgctagctgaggtgttatcttctgaacttgtaaacctgggttgcttttccaagtttgccaatttaacttttgccatcttatcttgatttacgttcattaaaaaatatgttctgttcctctgtttgatactaacttatcgattccattcttctacttgttttaatcagctttaccaacctgaggaagtggaagaggttaaaga

SEQ ID NO: 100425 - DNA, 331 bp, Vitis vinifera
  Intron number 2 from transcript GSVIVT01001814001 (locus G SVIVG01001814001) derived from phytozome v7.0 (chr-ID chr1 4; pos 26027619 to 26027949 reverse strand)
aaaaggtatttgtacttgtttaattcattctgttttcttattgatttgaaatattcactctgatcctattttgactgaagtctggactggttttgttatgtgcaacccttttctggtaccttgagcagtttattatgttctgagaaatttgatgtatgcataagtcgcttgcctcccagttagggaaatcaaagttggagtgtcttgcctaaatggagtccattatctgatctaaacgttcgggaagaattattcatgaatctagtttttatcttgttaaattagtatacaaagttcttgttaaatggcaaactggcatttgaatttcaga

SEQ ID NO: 100426 - DNA, 841 bp, Vitis vinifera
  Intron number 2 from transcript GSVIVT01014221001 (locus G SVIVG01014221001) derived from phytozome v7.0 (chr-ID chr1 9; pos 1631543 to 1632383)
acggtacataaccaaacagttttattctttactctttttcctaatcatcgtgagtattattttggtgtttccatcatagaactgaaattcattagctaaggtcggtataggcatggtaaattactattcagacatgttataccaactattatggctgatttagaatattgacagtaggttaactcccctatgtgtttctaaactggaatgtaagtagtttgtacagaagtggaatttacaaattccaaggaggatttgtggtctggaagaggctaataatatcttatgaaccttttgtttcaaatctgcgatatgaagccataagatgcttgaagctctactaagtggtctgcaggttagaaactccacttgttgctatattgtcatagatggacaatcaaacctgccattaggcttctttggttaacttgacagttaaggaacactctgaaaatgttgtgtttccgttagaagtttagttccatatggaatttgtgggaaattatttgatgcaggacttccataatcttgcacttccttagcaaagttgtgcctcttgtgccacttgtaatgtagggaaattgtcacattacaggaaagttgctatttcactttccagcattatcatctaactaaacatagggtcacagactttgcatcttgggtgattcttgcttctgcttggttttatttgagacaacatctctgtcagcatctgatacaccggttttgttgtctcctttaattgcttcaaagttctgacaggttaaatggatcatatatacaaatgtataagcttctgaccgagttcaaattggtgcagtggtttcaggaatccaga

SEQ ID NO: 100427 - DNA, 544 bp, Vitis vinifera
  Intron number 2 from transcript GSVIVT01003423001 (locus G SVIVG01003423001) derived from phytozome v7.0 (chr-ID chr7 ; pos 14870893 to 14871436 reverse strand)
agagagaggaagaagctcgagagggagagagagaggtaagtaatttattattttaattttaaattttttttttttgtaatttagatttcaatatcaagttttgatttcttcccgccttagaaatctggtattagggtttaaaaaagtgtaatcatgttacgaaaattaggtttggggttgggctttgaattggatgattggatctattagggcttcacatatggttgactttaatttccttatatgctatgttcgtggcttgatgttttgtttgtttggtggatgagaaagtttacaattttctgcaacttcgaagaaacaataaatttatatagtataatttgaaaaacaagaatcaaattgggacttccatgtgtccttctgtcgaatcgttttgtttgtaagcgtttcaacggcattgcaagtaaggattggggccagggttagggttacgattatgattagaattttttctccctttcaaacaagaaaatcgatgcacacatatgttctttgtggttcatgttatttgaaattgttgcag

SEQ ID NO: 100428 - DNA, 400 bp, Vitis vinifera
  Intron number 1 from transcript GSVIVT01020652001 (locus G SVIVG01020652001) derived from phytozome v7.0 (chr-ID chr1 2; pos 3418567 to 3418966)
tcgagcgcgagcgcggcatcaccattgcttccaaggtcctattctcactaaccataaaaatccttcctttggtttccgaaagaatttgggaaaagaaagagttttggaaagttatgaaatttgatttagttttgtttctggtgtatttgatttagtgagaatgcgcaggtatagtatgtttgattgattcctagtctttgttttttcgtttcttactgtttctcggcaaccaggtagactatttgattatgatgatgtggtttgctttatgggctttcttgtatggttggattggatcaccaattgctttgattgttctttccatccccaaacgctttattctattccctatcaattatttgcaggttacggccattttgtggaaggaaaacgaactaaa

SEQ ID NO: 100429 - DNA, 685 bp, Vitis vinifera
  Intron number 2 from transcript GSVIVT01020652001 (locus G SVIVG01020652001) derived from phytozome v7.0 (chr-ID chr1 2; pos 3418990 to 3419674)
cggactttggtggtgaagtatgtttctgctgagatttcttcatagtaccaatattttgttaatggtttaaaagataaagagttggttgaaggctgaggaatatttagcagttaacccttgagctacttattatatcatggatttttttccctatgatcagtgatgttgatgctaaaacaaaagcccataacccaaatgatttgaccttttgagggaaaaaaatgtgtattattggtgaagaattgaatatgggatgtaattctaaggaagagtaatgaattaatgaaaaactaccttgcattatttccctttaccacctgctatagaaatgcttcatgtaaagcaaatccttaataacttgagaataattatcatgcagatactgtgagtttagtaaaaagatgggaacagtaaaaagaagggactaatttggagcatatggtcctaggtttcaaaatggtaaatatgcaggttacatgccctgaacataagatggtgttttaactgtgagcttctaatactcaaccataaggcttttctattgtgccttgctctgaggtgcttctaggtgtaagctttacttacacactggtttgcaagttttcttgtttttattttgctagatcactaagttgatccttgtataattactttttctgttggttaggttgagcgggttgttggc

SEQ ID NO: 100430 - DNA, 466 bp, Vitis vinifera
  Intron number 1 from transcript GSVIVT01019804001 (locus G SVIVG01019804001) derived from phytozome v7.0 (chr-ID chr2 ; pos 3474204 to 3474669 reverse strand)
aagagtccattcttagtcagaaaaggtagacaaattggcttactattgatttcattttatgtgaatttggttctgaattttcttgagaatgcagtggggatttgtgatatacacctgttgccatgttgagacaatttaagagaaatatcagggttttgaatttttttatttctcttcatttcggagcagaggaagtaaaatggccatcttttctatgtgtgatatgggttccatccttagttcatgctagctttttatttttgggaagcccagatacagatgtgctcagattgttgatctttcagcctatttgagcattttaatattatttatgacattgtgaaatgaatcaaagtgggatttgtgttttacttgcttctggatgtatgtgtaatttggttctagtttttgaagttggaatttctacttggcattaataactttgtggtctgttttttcagatttg

SEQ ID NO: 100431 - DNA, 375 bp, Vitis vinifera
  Intron number 1 from transcript GSVIVT01023275001 (locus G SVIVG01023275001) derived from phytozome v7.0 (chr-ID chr1 2; pos 20234030 to 20234404)
tgtttgataataattttaaaaaatgtttttaattattttaataattaaataataaaaaattttaagtattaaaaatattagaaacggatgtgttagatataaaaaagaataaaagtgttttctaaattcaaagctaaacattaggacagccgctttaaataaagaagtgtaaaagggcctaagtgagcccaatgggctctcatccaatagaagacccaaaacaagaaaaacagaaaatctgaaagaggtgagccgccattcttacaactgcggcggcggcctgtacattcacattcagctttacgcacattctctcaataaatttctcccccaaattccaaagagagaagtagggtacgatattctacactcacc

SEQ ID NO: 100432 - DNA, 567 bp, Vitis vinifera
  Intron number 3 from transcript GSVIVT01032184001 (locus G SVIVG01032184001) derived from phytozome v7.0 (chr-ID chr1 3; pos 21757550 to 21758116 reverse strand)
taaaagaggataaaatacaatctagcaaaattgtggtgcgtgactttcatttatatagttgattctatatattattgtgttctaaggactatttttgtaaaattttcttccttttatgacttgtgatagattcttcagtgctttacagaggtcctctgaatcaagatttcatttgcatctttaataaataagaacctcttcttgccctcctggggaagccgctcataaggttgtatgatcttttatttcctttgaaagttgggaaccattcagtgcatgaaacttgtctttcacaagaactggttttcaatttatcccaagtggtattttctctgtgactgcgatagcccagaactacctaatggaattattacatagcaacaacagcagcttgtatctattctaatatatcccacttggtttccaaaatgtgagctactgtcacatttacatatgcctagttgtacaaatttgagcagaaacaaaatggttttgctttagtttctcaaatttttgatttgatgaaaccatatctcttcttttggagtttgcaggtttaaaaggtgc

SEQ ID NO: 100433 - DNA, 931 bp, Vitis vinifera
  Intron number 1 from transcript GSVIVT01026268001 (locus G SVIVG01026268001) derived from phytozome v7.0 (chr-ID chr1 0; pos 15190921 to 15191851)
tgtcgagtcccggaggtctcctgatactgttccaggtattgaaatgggattttttttttcttgttttgtttatttatttgtttaggtcttggcttgattttaaccctcgtttggctgccgaagaggtggaggaaaatgaaaagaaagtgcattattggaccattttgtgttttcttttagatcggatactcatagattcaaaatacctgaattcttcaatgttttgtatttatttgaagttttggttttattttctgtcctctggttgcctatgaaatggaggataatgaaagaggataaacccttcatctatatttttgctaagaagccaaatgggcccttgttgggtgtcttcatcttcaataagccttcaaactggattatgatcacaatattagaccgcttttggtagtgattctagaaaatgttcctaatatttcaaacacttagaataataaaaaatttaaaaattaaaaatgttagaaacacttcctaaaatcactgtcaaactggctcttagtatacgtttgtttgttcaagtgtttatcgtacttaaaacatgtgggatatgtttcctcaaaatgatgggtgtgattcaagtgtttagtgggtttggtttagattaatatgattacgaaccataagtatttactatagtttgtacctcttgtggatgaatggttttgtaagattgagataagaatgttaaattctccgggaatgtgccccccttgattcatttcttaattgagtgggatggaagctgaaagctttttagtaggaagtcttcttccattatcattttttgtaagcaaatgattttgcatcgtaaacggagtgccctagaaattttatgatttatatacatacattgtctgatggccttggaagctttgtttttattacttatactgatccttctattccagaa

SEQ ID NO: 100434 - DNA, 451 bp, Vitis vinifera
  Intron number 1 from transcript GSVIVT01027335001 (locus G SVIVG01027335001) derived from phytozome v7.0 (chr-ID chr1 3; pos 16363374 to 16363824)
gtcaaacttttgattttaaaggtaaagaagaattttatcaataaacatttaatataaacttcgaagaaactactagcatacaataacatatgatagtgaatgaaaactaagaatttagaatagatagtcttaaatagttacacatgcaaccttttttttttttgggtaatttaatatgcttatgctaaggacttcacaaaagacctcaattcttttgtgaaaatgaaatataattctcattactagtcaaacacttgggtaagaatttggagtcattttagtaactgtctaacataataaaatcttactattctctaacatatagtaaaattatattatggttcaacacatgctttgctaattgctttttgatttctaaagttatttaatagtatattctcattaaatttccctttatagggataaggaagagcgttctgtgctggtggag

SEQ ID NO: 100435 - DNA, 569 bp, Vitis vinifera
  Intron number 1 from transcript GSVIVT01025266001 (locus G SVIVG01025266001) derived from phytozome v7.0 (chr-ID chr6 ; pos 2592443 to 2593011)
caaggtaatacttcaattttcagcgcattccaccaagtagttacacccattttcattttgaaaaatttcatctattgtatgtgttaatcccatatatcttgtcaaatccagaatcacacatctataatcccatatatcttgtcaaattcttcattcaactaaccttgaaattttttcaaagactacttatttcagcagccacatttaatacctcttacttagctttccatggggtggttattgattctctgaaaagtctcatgaaggatgtttgttcaaaagtatatttctgcctttctgttgatgccatggacttttctgctcaacttgaatacaacttttcaaagagggttatggagaagatgttttctgtaatttccatatagtgaattaacaataagaatgattaacaggataaaagaaaatttggttgaattacttgtctttacatcaagggtgtgttacatgccttattcctagaaattctgattgatttgatgctcaaatttgttgttttggtttcttttccacttggttccttaaaatgaatgggcagattcgccttcaaa

SEQ ID NO: 100436 - DNA, 373 bp, Vitis vinifera
  Intron number 2 from transcript GSVIVT01025503001 (locus G SVIVG01025503001) derived from phytozome v7.0 (chr-ID chr6 ; pos 274144 to 274516 reverse strand)
agcctggtctttcctctttttgaccttttcttttgctcaacttcgtatttattttattttccatcaagtgggtatttttgttgctttctgatattttgtttcggttatctgttatataatgggctatggtttgtttaatccagccaatactttgttaatagtactagcttttcctatttcctttagttccaaccataatgtcttaagattcttaatttggaaggtggggatggtctaattacattcctgcattataaagttggtttcttttgagttcatagtaacaggatttgcagttgttttgatctttgatcctacatagaattctcttcatatgttggcaaattaccttgtgggttgtaggaacttcggc

SEQ ID NO: 100437 - DNA, 588 bp, Vitis vinifera
  Intron number 1 from transcript GSVIVT01031167001 (locus G SVIVG01031167001) derived from phytozome v7.0 (chr-ID chr1 4; pos 1557561 to 1558148 reverse strand)
tgcagatttcaggtttctctatcttctccacccttttggtagatttagcttgtggggtttcttttttttttttttttgaattctttctctagaagcacaatctaacagtcatgataaaaggcttttttccattttgagaaacgattcctagaggtcattctcatgtcctgatcctgtgagccctctttcagataattatgacacacctgcctaagcacacaaatcattaattcctacttgaatttgaaatgaaaaaaaaaaaaagttgcagtctgctccatttgtgattctgatcaaggggtggttttgtttttctttacatgcaaggaggaatgagtcttaataatgaagcatatgtagtctaaatctttgataaatgagtgtaacatccacagattaatgagagaataattgggttttcaggatttttacagtccttgcaaatatcagaagattgtgtattcatttgccttttcaggattttggctctgatgcattatatgtatactgccctttgtttctcttacattggtttttgctgtttgtcctgtagaagcctggggagattgaagctgagattgcccgtct

SEQ ID NO: 100438 - DNA, 780 bp, Vitis vinifera
  Intron number 1 from transcript GSVIVT01038487001 (locus G SVIVG01038487001) derived from phytozome v7.0 (chr-ID chr3 ; pos 10231685 to 10232464 reverse strand)
tgataagagacaatttaaagaaatatttccccattgcttagattgtgtattcaggaaattcttcttagcaatagttaatttgaaacaaaatatgaatggtatgactagttccatttaatgtcaaaagcaactcattttttgaagaacccttttttatgtaagtccttccctaactacccaacacatcagtattgaatctattgatattcttatgagtcagcctgcaattcacttattaaggccaagaaatgacaaacttttgttgctaattatttaaaaacagacactcaacttgttgctttacttttatgaaagattgaagaacatgtttgtttattttgtttggttgcaattcaattcttttaaatacaaacaaatccattgactatcttttcacaatgggtttataagacttttattttgtactttttcttcaacaatcttgtttgattttttacttataaggggagaaaagggaaaggtataacagattatgttagggcatatagatggtaagtaaatatttcctatattttttacatctatacgccctaacataatctgttgttagaatttagggatcaatcaattcctttgcacctagaaagaatgtttctattgggcaaattgaccaattggcacacaccatctcagtaactcatttactgcttcaatctaaagcagctcattctctttttcaatgtaacttttaagttgcccaatatattcttgatctccattcaagtatcttttcattatacaggcacctagaacatccca

SEQ ID NO: 100439 - DNA, 574 bp, Vitis vinifera
  Intron number 1 from transcript GSVIVT01005677001 (locus G SVIVG01005677001) derived from phytozome v7.0 (chr-ID chrU n; pos 21145014 to 21145587)
tttgaaagcaggagtccttgggaacatcgatccaggtatcatgtgatctctggcattgttacgacttttactcgatcttatatcgtcgactttaccaatcaattctccccgatcctcattcttgtatgaaactcttatgtttccatcttcctcttttgtttttttagaaaatgtttctgttgttgttttagccggcaattgaattgatcatacagatcgaaggttggttataataagtgttaaatgatctattgatgcatgtgatggctttgctggatttgacggtcgttgctgttgtctcgttaattctgatgttagggatctgatcattaactttgttatcgaaactcctcaagatttgaatttttttttttttttttttttcatttttcctgttctgttctggtgccggattgtttgaattttatttttccaaattttaatggatcttcttatactatgctattggatcagcaacaaaatgtgttcaaagttcattctgtgcatcaaaacacaatatatattgcagtaagcagtggtttgtgacggatttttgcagatcttggttgtttaa

SEQ ID NO: 100440 - DNA, 544 bp, Vitis vinifera
  Intron number 1 from transcript GSVIVT01000053001 (locus G SVIVG01000053001) derived from phytozome v7.0 (chr-ID chr1 4; pos 3113137 to 3113680 reverse strand)
cagctcccgagcttaaggccgctttcagagccaaagtatgaaaaaaaattcaagaattgtttgatttattttgtttggctcccgggaaaatggaagaaaagaaaataaaattttgaattttatgcatgtttttttttgccttctaggccaaacggtggtattccacttttgggttggggtttgttcttttgttttttttcccattctttcattgggttccgaacggtgaatattatgtgattcgaagtttagtttattttcttttcctgcattttctcagataccaaacagagaattgataccttttgtgagcaaatgaaaaatcaactaagcaaaggagaagtaataggcacaacagagtgatgtttctgggataaagtaataaagaatctgcagtttccactataaattcttttcttttcctacattttctcaagaatcaaacaagaaattaatgtttctctggcattaaaattcgaacatgaaagaaatggggattgacgccttttttggtttttagtacaggtcaagcagtttcaccccg

SEQ ID NO: 100441 - DNA, 553 bp, Vitis vinifera
  Intron number 1 from transcript GSVIVT01014778001 (locus G SVIVG01014778001) derived from phytozome v7.0 (chr-ID chr1 9; pos 9556015 to 9556567 reverse strand)
ggcagtcgccgggtctttcctgttggcaagctccagtatgctcttcatgacccttccttcctcttcttcttccttgttttcatctcctgtgtttattaatttattctttgtgattctctgtttggttgttgagtatgctgaccaaaagagagagaaataggattttgagggtctgttgaggtgcaggtttggtttttgtgggtacccgaagaatgaatgaggagtttaaattttttgtttttcttctgtttcttacgttttcctcacaaccaaacggatcatagacgagtaaaaagaaggttttttgtgcttgtaggggggtttaaggcttttgatgtagctctagtatttcttaaaaaactgtgacctgataagctgatcttgagccactgacgatctagtactgttcttcgtttttagttgttatccattttgatttgtgtcttatagttggggttacgaaggtatctaccttgtgggtgagggttaaatcttggatgaatgcattgtaagggttgattttgtgttattgatttgcaggggtttgagattt

SEQ ID NO: 100442 - DNA, 841 bp, Vitis vinifera
  Intron number 2 from transcript GSVIVT01034944001 (locus G SVIVG01034944001) derived from phytozome v7.0 (chr-ID chr5 ; pos 340323 to 341163)
tgaagaattttctccttcatacattacagttacaggtgagttgtggtttttattttgatttttcttctggtttgatgttgatgttactgtttgtttcccttttatgttaagtgaatttctgctcagtgatgcacatgatttcattatttttgtgtgtaatacaataagggcattatcatgcatcttttgaaatttattcaattatcgggtttacctagcattgtaaactagaaatccatcattcaaatcaaaagaaattgagagtcatctccacagacaataatataggagaggtttaagggtttcttgaaattcaagtttaggattgttttttatttactttgtggtgatggctgctactttctgtaaaagcctattcttgtaatgatttttttttttttgcataaatcatatgtgaaagaaacatgagttaaaaattttctgtacaacacccacatgattattaaacaaattatggaaagaatcagtgaggccttatacagaaactaaatgggaaaaattttgaatccattatttggtcagatgtcctgacttataatgaaatttagcatcacaaaggccaaagaacaaggaatatcttttcctcatttacaagaaaaaaagaattcctagtttcatcatggaaaataatacccctttgacaaaatatgaagccacagtgaagggtaatctactggggaagcctattgaaggcctgtagttcaaatagctagcttgtgcaaatttgggatttctgtgagctttgacataaatttaaacatatcgttttggtgtttgttgcttagagttgggagaagactgtggactgctacagccctgg

SEQ ID NO: 100443 - DNA, 730 bp, Vitis vinifera
  Intron number 2 from transcript GSVIVT01008585001 (locus G SVIVG01008585001) derived from phytozome v7.0 (chr-ID chr1 7; pos 711740 to 712469)
cagaagtcggaaggagcactgcacactcagaagtaaatttgaaaatctcttcagatgaagctagttctcatagttgttgaggttcattaatttgaaatacaactttgttgtcgttgttggtttttgtgcgtgtatgtgttatttatttattattattattattatttactgttaataagaatgttcaggcgactgaagttcagatctgtggatgagatatttttcttgcgttcatattgtgtgaaaaaagtttatattgtggtttttaatgcaaatatatttatgtttttgtctgaactggaaattttaatctgaaaactaatattctcgagtcaaatgtctgtaaaattctaagatttctgtttggctagagggaaaatagtgagatgaacttttttattgtgtgctcaggaaatgattctatgtctgttcagtaaaaattttttcaaggcttgttaatatctttggatgtccacgtgattatgcttgaaaaacgagtcataagttgtgtttgggaaattaatttgtttttctaagaagaaatttctttgagatgttctctattcaagcaaacagagcagtttcgttccagccttttgaatctgatgtaatgcaagtgattatgatgcgtgcagttccacaggtgtgtttgttattgagtgctgcgttttatttgttgcttttttgctttgcaggctccaaagaaaggtggaaaagttttggcacagac

SEQ ID NO: 100444 - DNA, 1038 bp, Vitis vinifera
  Intron number 2 from transcript GSVIVT01020568001 (locus G SVIVG01020568001) derived from phytozome v7.0 (chr-ID chr1 2; pos 4232471 to 4233508 reverse strand)
acatgtgagtatattggttgtttgatccttcttttgagttttgtctgttttctttcctttgcttctttattattcttatctgtggacaatgttggtgtgttaatcatgtgtttgtgattatgtgttagttattcattttctggtggttgaattaggaactatctacagccttctagatttcagaatcttgacagtccatttatgggctcaaagctttaatttctaacttttgattttatttgatcctagttttatttttctgttaatatcataatggagggttttctgtcctttttttccttttgggtatccctgcatgatgaagctattatttaattgaacctgaacctacaagcttttagcttcaacatgtacattatgaaggaaatgcttgtgcggatagaacagctgatatttgcttgttttttctgctgaggcaattcgcatggttcttgttttgtaatccagattaggcaccttgtgagagttaataaaggagcacacacacacacacacacacacacacacacacacacatatatatatatatatatatatatggtgactcaattggacactcatctgtctgtgagacttgtcaaaagaatgaattctcgtggaatagattatgaaggcttgttgctacatgatccagaatgagcaatatccccgatctcttatgtcattacatgtgctaactagaaatgcattcttacaatcatgtcaatcaccattggacctaatctttcagtgtctcgttaatatgaggtgtggaatatttgggcacatcttctgtttgcattgttaaaaaataatcttgatgcagtctcagcatagaaatggaccagaatcagtgatttgtcagtttactttttgtgttgtattactattacattttttgagttgctgaaggatacagtttcttttttgcttcctctttcttttctttctaattctgtggcctaacaaggaattcatgcttgatttttttaaacttcaaaaggggactggggaagaccattcaaacaattgcattct

SEQ ID NO: 100445 - DNA, 855 bp, Vitis vinifera
  Intron number 1 from transcript GSVIVT01025450001 (locus G SVIVG01025450001) derived from phytozome v7.0 (chr-ID chr6 ; pos 754840 to 755694)
ctgaaaaacagcccagaacttggggttcagagctggtaatgcttttaattgatgttctctctctttcctttttatagttttgagggttttggattgatttgagatttgggttggtgtgtatctgagtgttttggataggtttttgtttggttggtgagaaaatggaggaaaggaaaattaaacagtaccatatgttagaattagattgaattttaagggcacatttaagctctatttggttgacaagaaaattgtagagaagataaggaaaattaacttggaacttccacattttttagctctgtttgtggagaactgaaatattgcaaagttggatgttttctttcttttactctggtttcttagctgccaaacagattatgaggtttctcaaaaaacttgtaagttaattatgatactctttgatgaatttattgaacgtgatcatgtaagccaacttactgccaattggtatagcatatattttcctttcccctttgtgacttgggcttgtttcattgatagagtgcggacataatgtctcttttctctttctccttgatcagaaaatcttacttatcagttaaaaaaaaaaaatcatattatttctataaatgaggtttacttctttatagatctaagcaaaattgtaaatggtttcactgaacaaatgtagtaagaattgttgatgtggcacagttagggttggttgatcagtgaagtaggtctactgcatagagccttggttttatgttattcaacattttagtattgtaaaattttgattatgatggtaaagttatatcaatctcttttgctaaattttcaatgtgatttctgctgtttttatagcac

SEQ ID NO: 100446 - DNA, 412 bp, Vitis vinifera
  Intron number 2 from transcript GSVIVT01018756001 (locus G SVIVG01018756001) derived from phytozome v7.0 (chr-ID chr4 ; pos 20147999 to 20148410)
acgccgttaatcttatctgtggagctaagactcaggtctcgatgccttccgtttgattgtgaaaaaaaaaaaaaggaagaagataaaagagaagaaataaaggaaattttggaatatagtcgcaggagattttttttttttttttcattttctcatcaatcaattacagcttttgatttatgattattattattattattatttctgttgtggcaagattctaggttttcttcgattcttccgaacattttgttttgagattgttgttgttgcattgaggattttctttgaattttttttttccgtgaacggtgcttgcttgcgatttgagtgatttgtttctgattgaaactttttaattttttctttctgtacagtccaatccagaaaatactgtgggagttcttacaat

SEQ ID NO: 100447 - DNA, 993 bp, Vitis vinifera
  Intron number 1 from transcript GSVIVT01031163001 (locus G SVIVG01031163001) derived from phytozome v7.0 (chr-ID chr1 4; pos 1588707 to 1589699 reverse strand)
cgaatttgaagtttctcgatatttcctatcttcaggtttctgtttcgctcgtgtctcttctcctgtatctctactttgttgtgctctcgagtatagaatattttgactggtgttgcgtttggttactgagaaaatgtgggaaaggaaaggagtttgaattctgaatatgattcggtagaaaaggggaaaaaactagaattttgaatgttgtgttccttttggttgatgagaaagcctaggaaaataaaagaagtgctccatttggttgatgaggaaatgtgggaaaatgaaaagaaaattgaaaattttgaagtgtgatttttgttctccattcagttgagggaaatgtatgaaaatataagaaattatggggtatgtatggactcttcttaacctcgaagatgcattttaaagccatggaggctttttggcctagagcgagttgttacattataattttcattgttgacctgctttggctgttcagaaaatttgaagagaaattttgaacctgaaagcttgtgcttcattgggttgccgagaatattgtgtcattgcattataattttcattcttgtcctgctttgcttattcagaaaataattttgagcctgaaagctgtgcttcattgggttgctaagaatattgaggaaaaaagggagattagaattttgaatctccattcagtggctgagaaatgcttgtgggtagagaaaaagaaataagattttgtgtattgggttttacattgtttgggacctgaggaaagcaataaggaaaaaaagaggtttcaggatctgaacagcaacagaaaggaacctttgaaaattttgttctcttttcttttcttccgatttcttggcaacaaaacagagaatgacatactataacttatattacaaaccaagcatggttttatctgttttatgtgaaaattgacgtctatgctaattttcaggtgacaagtgagtctctacgttcaattgcttctct

SEQ ID NO: 100448 - DNA, 904 bp, Vitis vinifera
  Intron number 2 from transcript GSVIVT01026700001 (locus G SVIVG01026700001) derived from phytozome v7.0 (chr-ID chr1 5; pos 5023168 to 5024071 reverse strand)
tgccactgactgttgaaaattggagcagttagtaggtgattatattggtttattgggtaaatttgtgtgattcactggataatttcagtggtttagtgagtagagtctgagtattctagcgggtaattagagtgctttattgggtaaattcgagttctgcattgggtgattcgaattggtgtattgggtaaatttgagtgttttagtacataattttgggtggaatattattaaatctgtgtggtgtagtgggttatccgaatttattgggtagatttaagtgatttttcataaattggattgatatggggggtaaacccaagtgatgaagtgggtagtttcagtgatttattagcaaatctgagcgatttagtgggaaaaaattgtagttgtgtggttaataattcaggctgtttcttgggtcaattagaatagtagggtggataaatgataaatctaatcttgttagcatttttttttcttcattcagagtgtgtattcagataattgaaaaatcatggtgtaatgaaaagtgactgcatttttttctcctttttttttttctatatatatgatgagttgcatggatgcctttttatgactgattttgtgaagtagcttggtcaatttcgtgaattaaatagaacttatcatttcttatgcataatttgttcttgttttgttgtggtcattcttcttttaaggtttaattgggtgcttggttttttggattttgtttggttattgttgtatgatattttggcatttctcatttaatgctttttttatgtttgattattttctgatttgatttctgcatcttttgcaccaattctaaatgggttgttgccttattatctctcttccagggtttagaactgctcattgagcagtgagctgtttg

SEQ ID NO: 100449 - DNA, 623 bp, Vitis vinifera
  Intron number 4 from transcript GSVIVT01012096001 (locus G SVIVG01012096001) derived from phytozome v7.0 (chr-ID chr1 ; pos 1515780 to 1516402)
cttacagtctgcatttttcagcgggtgatcagaaggttgtgtcagcttgaatgaaatatctatgagatgttattccacggttatgttcatttgtataaagatctttgagatgtttatgagtgtctatgcatttatatgtaaattaacttggttctctctctcttgctctctcccctatccctgcctttcttattgttaaccatctttgttattgttgtccttcttcacccactgttggaatctttaattcacatttgctcatctcttctcaatgacacttaatcaataagcattcccttattttattgcccctcagtgctttttcttttgtgcaagtaactttatttgtttctagtcttttacacaagaagctcttgaaaactcatctttctttcattggttctgtttaattttcatcatggagcagacttgcatttttctttttattgagctttttttgcataagagcttgttttcctctactctaatgtgcatgtgaattattttgagtttttttttttctctctctctctttctgtggtgtatttgtttttcatagctggtgaagaacaatatgttttatttagatatgagtgttagactaatgggtttctgcaatacag

SEQ ID NO: 100450 - DNA, 726 bp, Vitis vinifera
  Intron number 1 from transcript GSVIVT01000721001 (locus G SVIVG01000721001) derived from phytozome v7.0 (chr-ID chr7 ; pos 180641 to 181366)
atccagccagacctccggccaagtgagtttcttaacagattttttttttttggcgatttatcatttgtttgtagtataattttgaaaatatgaaagaaataagcgaaattattgtagtgggggttgttaggtgggtgaggtttggagctggttcatgggatcaatcatgaatctctactgtaatttcttttcttttctttttttggcaaaatcaagaggtttttttttttttttttgaaaacgacataaaagccaagtttgcttccaaaaattttgagaatatatatgagaaaaaaaaacaataaaaaagaaaaatagaagaaatgaacaaacaaataaaatttaagctaatgatttttttttaatttattttatttgttttacagaaaaattaaataatttagcatttttatttttattttttataataaagaaaacgtaagaaaatatttctaggtatctttttaactttcccttaaaaccaaacctagccctatgatttttgcaagtcaccataccaaaatttcaacaattaaattgagggaaataagctagaatttatcaacctttttggctttgattttcttctcttttttcctgttaaaaacagttgttctcataataaagtcattaactaaaaccatacataaaaataaagcaggtgaataattcatggaaattggaattttagggcacaggttgtggggtggccaccggttcggtcct

SEQ ID NO: 100451 - DNA, 1021 bp, Vitis vinifera
  Intron number 3 from transcript GSVIVT01015392001 (locus G SVIVG01015392001) derived from phytozome v7.0 (chr-ID chr1 1; pos 3246442 to 3247462)
gaatctgcctcgacattctcaatctacctcctaaagtgagttactttgttgctggaattgatatctgaatagaaaaacttgggtgcaatttgcattttagaacttagagtctctagttattgcttaattaatttgcctttgacttaacccataaccttgatagtctatttggaacgaaattttcaagggaaaggaatgagaggaattgagcattggatttgattttctttcttttgtttggcaataagaaaatttaaatatgaagataatctacactgaccccattttcccagttattttctaccacaattcccttggctcagaaacagaatgaaaaaaaaaacctttccttcccaattttcccgtatgatctccatttcaaacttggtgagaaatcatgtgtgcaattatcaaaaggtttgtctaaaattctggatggattcaggtgtctgaaaaatctttgcatttcgtatgaagcttcttttccagaaagtctatgccaacaattttatcttttttatggagatatataattgagtgaagttattggacagtgttgctgggtgaagataaatcttaggtctgtgtgtcattgacagctgcggacttcatatctatagtccagccatcaatttctgcaagaatatacagtgtcatattatgattcttattgcatcatgtgtttgtaaaacccagtgcttcaagattctaaagggtagttcccataaggttgacatcaggtccaaaactcttgcagctgcaaagcaaagataggcctatactttctacaattttcagtaacaataatcttttggaattttgttatttccatcttctgattttgatgtgcaagatatggattgcttacatattttgtagggtcagtaacaataatgggtgagatgttgttgtgaagttgtgaaattcagttacaaattacattcatctattagttcataacaagggttagtttccaatccaagcagggtgcgtggcaaccatctctgaacatttcaactgt

SEQ ID NO: 100452 - DNA, 673 bp, Vitis vinifera
  Intron number 1 from transcript GSVIVT01013000001 (locus G SVIVG01013000001) derived from phytozome v7.0 (chr-ID chr2 ; pos 10373120 to 10373792 reverse strand)
gcagagctgcccatcgaagaacccaaagtgctcttgtaagcccctgttttttttttcccctcaaaagtttggttgttgatttgaattttttagtccatgttatgtgatgctgtggattttcctttttgtcttttggttgttgatttttttgggttgacctcttcatttttggtactaggttttgtgagattgggtttgatttagtcttggattgttcagtttgttaatgatctgatcctggaacttgatcaagctgtcctggttttgtatgaaatatggatttgagtcttttagctagagtacctgatcccttttgtcttggtttgtgattaattttaggaatttctagacgggtttttttctatttcactggtggatgcttttttggaacctcttattatatgtttgtatgatcatttagtgggtttatggtaaggtcagtgttagagtcatggatcttcttgataattgaatctgtgataatcaaataaggttgctaaaatcgattggtgttctttgactgaatacataagatggccatcattgtttgtattcagggaaagtcaattgatacttcagattagtgctttgcaggaagaatttcgtctgtcaatagagattagtattgacatgtagttattattgctcaaggagttgcttcatgtgttgcagg

SEQ ID NO: 100453 - DNA, 491 bp, Vitis vinifera
  Intron number 1 from transcript GSVIVT01034017001 (locus G SVIVG01034017001) derived from phytozome v7.0 (chr-ID chr8 ; pos 15818974 to 15819464)
tagctcttctctttcgggatctcagctgctctccggtaatttctccaacagttgtccgcctctttctgagaccatctttgattgtgatttcttgcatgttgaatctgtatttttggcttctgatgatgatcgtttgctcgaacagctgaggaaaaaggaggaaaaaaaaaaggaaatttaattttgaatctcgttttttttttttttttccttgccttgaagaaaagcctaaatgttagtgttcggccgcgccgactggtggtttctgttttcttaggttgtaaatagtgaaaaatacgagattccaaagctttttcagtgcctctgtttcctgtattttctaagtatccaaaggaggcattgctgtttaagcaatttcgggaatcgttattatctttttattattattattgtttttggagctgtctctggtgggcaattgtctgaaattctgaagatctgttttgtggctccagttgaggatttggaga

SEQ ID NO: 100454 - DNA, 813 bp, Vitis vinifera
  Intron number 1 from transcript GSVIVT01024301001 (locus G SVIVG01024301001) derived from phytozome v7.0 (chr-ID chr1 6; pos 672408 to 673220)
ggattgtcataaacaacctccacatcaagggggatgtatgctaataaattttctcattaatgcttattcttttttatttaaaatttttttatgtaaattgaaggcaaccatcattctagtactcctgctcttgtgcagaagtttttcttgtataatttttaaaatcttttagttttgaaaagtttatcctcaccttctggctactattcttccatcatttttagtgacttcaattctatatatttcatgagatctttggtctttttttgccactgccatttctttgatttgtctgggtttattccaattctgaccaagtggaggactgattccagatacgaaatcagctctcttcaccctcctagtgaattaaaagctttagcacaactaccactatctttatttaaaccaaaagaaactacaagatacaagaattccctctagccataatccttgtagttttcctgaatacataaaaagaaaattttccatcctcgtagttttcctaaataactctctttcggttcacttaagttatatacacactagattctttccattttcattactgttaatgtaataaggatactaaaaagtacttgatactcactgtgatagtaagtactgtaaatttaaagttttatgctccaatttcaaaagtttcctgtttcagattttagccatttgttaagttcagaattatgttgtttgttaggcatgctttaccatataatatttttctagcaatgcttatgtgctatctttgcaagtttaattgatgttttcttatactgtcctacacagcttgtattg

SEQ ID NO: 100455 - DNA, 561 bp, Vitis vinifera
  Intron number 2 from transcript GSVIVT01028118001 (locus G SVIVG01028118001) derived from phytozome v7.0 (chr-ID chr7 ; pos 3963187 to 3963747 reverse strand)
cgtttggcgaagccaaatacataaaaatctttgtgagttcttcaactatttccccccttttttctctcctaaataacaaagacgcatcggaaacctatgacggaggaaatgaagattttgaatctcggttttttcgtattagacgtctgtttggctccatcaagatgagtttttcatgttttttaattctaaaggaacacggacttccttaggaaccgttttttcagcaggaaaatatttccgtgtgaaaattgttccgtaaatagaatcgcctcttccttttgatctaattataaaagatcgtttttctcgtaaaaatattgatggattgaaatggagcctaacagggttttttgttttttggttttcttttgcctgaattttttttttctggtagcatttttagtcaaaagaaacagccttagtaaaaaaaatggaaaggaaaaagaaaaagaaattaaagacaagaatgtgaccattttgatttacttgcgaagcatttccctaatttttctttttgttgcagcaagaagtcgccaaccgcaaaagtcgcgccatcca

SEQ ID NO: 100456 - DNA, 892 bp, Vitis vinifera
  Intron number 1 from transcript GSVIVT01019881001 (locus G SVIVG01019881001) derived from phytozome v7.0 (chr-ID chr2 ; pos 4189628 to 4190519 reverse strand)
gcccttgccctcttctcgctatctgtaatcgcccttctctgtcttgcatttctagggtttctgatttctatttctgtttgtgcaattcttgttttttcattgcttactttctcaattttggggatggttaatgaggaaatgcggggaagtgagggagatatggcctgtgtgcgcttttgattgtgagttgtttgggagatgagaatctgtgcacgactgtgcccgataaggtttcttggcctagttgagttgagttttccaacttctttggaaattagaagacgaggagaagataggtgtacgaggtttttgttttggcttctttttcgtctattttctcacttgcctaacggacaaggaaaattttatttcatttctagggtttctgaatcttttactttttcctctgtatcgtctatccgtgcttactcgttatgaatcatctcaagaatgcgaggaaatgcaagaaattataattttgatttttaggtacttgattatttgggaacctggataactagaacctccattcagcttagtctcatgccagtatttggcttggttggattttcaattttaggaaaccaaaacaacagagaacataagaataaataaaaaaattcttttgtttaatctttatacctagtttttctcagaaacaaaaggtaggaaatctttataaacttcttgtttttctgttcttattggaatcgcatgctgtgcatctagaaatgctcactccacaacatgtatgtatatatatacattatgcataaactttcaccttgtcaacactgtctaaagatttaacctattatgtgtcctctttttgttttctgggaattagaatcaatgctgttttgctgatgaatgattgagtttgcaataggta

SEQ ID NO: 100457 - DNA, 765 bp, Vitis vinifera
  Intron number 1 from transcript GSVIVT01034203001 (locus G SVIVG01034203001) derived from phytozome v7.0 (chr-ID chr8 ; pos 14452198 to 14452962 reverse strand)
tctctactggaaaaatatagattgttcaatccagggtatgctcttcaacgttttatgatcggtggtttgtacggttcgtatgtaaatttactgaattcgagcatatgaagtttagcaactgtgtgcttatgctgtttttgtagtttaattaattattttgagtgtttgtttctgtgtgatcttattgttgagctatcagtttggatttgcattgaaatggccataagccctaataatttgttgaagtttattttagggtgttcttcatttgttgtaggggaagagttgattcttggacaaacgtttcggttcccatttcgtcattcttgtggatattgatttacttaggctgactccaggaccatcttttgatatgtattttttttttttttttaagaatgaatagtatttatgggcactgaggttgcacttgttttgatgggatttaggatctggaattgaaggcctccattttaattccactatttggtttatctgtaaaccaacggatttgaaattgtgtcaaatcccatacagcccaaatccacaaaaggaattcaatattttccaagtccgtaaaaatggaaattccaaataaaattcaattctgtacaaccaaatgctgacccactttctaccatggattgcatgccctatctatactaaatacacgatattgggtcattatgcccttagattatggaaattgattttttgtttctttgtccaggcctctagatctggatcacttcttaacaaaagcag

SEQ ID NO: 100458 - DNA, 264 bp, Vitis vinifera
  Intron number 1 from transcript GSVIVT01000006001 (locus G SVIVG01000006001) derived from phytozome v7.0 (chr-ID chr1 4; pos 2643874 to 2644137 reverse strand)
gccgtttgatcatagactttctcagtaaactacacatcattttggaagacttttaaattactgatagtttttttggtttgaaacagctatgttctgctatatccatctcatccacgttctctcactgtatatctccctgtttctctgtttttccacaacattgaagttggtcctcaatcctttatgtaccatttggtcacctagacagaacttcacagggttttttgaatcttaagtgtgtcttcttccattgtgtgacagtgg

SEQ ID NO: 100459 - DNA, 465 bp, Vitis vinifera
  Intron number 2 from transcript GSVIVT01017994001 (locus G SVIVG01017994001) derived from phytozome v7.0 (chr-ID chr5 ; pos 5336359 to 5336823 reverse strand)
ggagggtgccggcggcggtggtggggagctgagaggtggtgttggtggccgacttgtggtcgtactgtaatgattttcttgcccattactgtttaattcaaaatgcagttcagcttaagccttattgatggtattttagtttttttttttggtatgctttttccgggttgagaatcaatgaagaaatagcttgttgttggtgcatgacatgtttggctcctgccaaggcattgcttaattgattttgttcttcagtgatttctaggttttgagtagaataatttgtaggtagacaggggttttcattcacgtgttgcatttgattcttagactaataaagcgtttaaccaaatctataatgcttgttttccacttcttgagaagacccatctctggaaattggtcaaagtgtatcttaacatccaataagcagaattgggtccttaaccagaatttgtcctctaa

SEQ ID NO: 100460 - DNA, 421 bp, Vitis vinifera
  Intron number 1 from transcript GSVIVT01034104001 (locus G SVIVG01034104001) derived from phytozome v7.0 (chr-ID chr8 ; pos 15127991 to 15128411)
aagacttgcagctcgacttcattgatttgtatcttgtatgtattgccctagttgtttgttaaaagttactagaagaatgtgttatctaataaacattgcatgtctttggactcttaacaaatataaacgctatcaaagttttgtgaagtttgcaggaaagaaaaggtcaaaactaatgaaaggcatcactcagaagatggactctcgttaatgccatcttagatctttgagtgaaatttgaaatatggccaaatctttgagtctcttgattctgcaaccttgtctctatcttaggaacttaaaagcgaattgaactttgaataatggataatctgtattttaatttagattgtcttattcaggagattatctgattgtaactaaatgtggctgattcttgtagatccattggccggtccgt

SEQ ID NO: 100461 - DNA, 470 bp, Vitis vinifera
  Intron number 1 from transcript GSVIVT01024172001 (locus G SVIVG01024172001) derived from phytozome v7.0 (chr-ID chr3 ; pos 607716 to 608185)
ttcccaactgcatattcatttggtaaggaaacactttcctttctcccttcttcttgccaaatcttattatgggtttaatctaagttacattggtatcagtccttcagggtttggattgattcaaatcattttgtatgtacgcctcaaacaacttgttctggccaatgatgaaaattgagttcaaaagtatttttaggtggctttggatttcattgcaatcatcactttattattattactattattattttttgtgataaattattctgagtgagatatgctgagggcttttaacctatttcctattgtcttaagcaattttcataaacagatgctttttcagggttcatagtgatattagatttctgtttggattataaaaactgttatctgatttcctcatatctttacttttgattcatgttttggggatagacaaagtatttcgaggtgactgcaccacgaggcag

SEQ ID NO: 100462 - DNA, 792 bp, Vitis vinifera
  Intron number 1 from transcript GSVIVT01022418001 (locus G SVIVG01022418001) derived from phytozome v7.0 (chr-ID chr7 ; pos 19932345 to 19933136)
agaaaagatgtaatcacacaactaattagtttagatggttatggtaatatttttattatgaatattattttgtcattaattttcatattttcttcagtgatgaattatgatgatattggtatggttgaaccgttgttatatttatccctaattgagatcgccacaattgtaaatcgaaatcattctctttcttgttttgaagataaaattagggttataatttgataaaaataattgggattacgattttgttctctatttagaatataaatagatgaaaagacgtttaacacccaaatatgttcctcaaattcatttcaccataacacctatttctttaggagaaacgagggataatccccaacaagcctaaagtattttcctcaaaactcaaaacctcaggtattttcctaattactcaaacatctgggtcccatggcaaaaaaataaaattacgtatgcaaatattaatattctctaaattgcccaaattcgagtcattttgtaattacctaaacatttggggctccaattccaaaaccaaaactccaccgctcattataaatactctccccccagaacgagggagagaaaaactcaaaaaaacgaagcaaaaccgccttctctctcttcactcccttttgcctccacacattttctcgagaaaatttcccagaaaatcccatccttgtctttctttccacttcatccattttctgtacctctctctttaccactttgctcactctgctctcagtttctcgccgcatccacttgtggcgggaactcgga

SEQ ID NO: 100463 - DNA, 634 bp, Vitis vinifera
  Intron number 1 from transcript GSVIVT01021528001 (locus G SVIVG01021528001) derived from phytozome v7.0 (chr-ID chr1 0; pos 6667986 to 6668619 reverse strand)
cgcacgccaacttcgcttcccgaaatccgaagaaggtcttctttgtctcctcgttttgaaaccgctccgatccggctccatatcgttcgttgtttgtttggtttttttcctttttattttctttgcctttttttccttaaattttttttttctgaaatggagcttattcccacctgtcattcttcaaataatgtttgattctttgttttgctgcgtaggaactggaaatcgcaggttaaaacaaaattttttggttcaatttttttaagcttttgaaatggagctgttttgcgtattttgagttacgaatactcgaaattttgtttcggtttgtacagtaattgttcttcagagcgacagatccatgtggaggatgagcacagatccgtgttttctagttcgcattgaaaacaaagaaaaccataggaaaaacaaaagagtgttcagccatttttaccataatttaaaacctcaaaatcgcagtcaatattgctgaagatttggtgtctgtaatttagaaaacagaaacgatgtatattttatgattattgttttctttcctctgggcacagtagtaatgtaatgtgtgccatttttaggtcattgaaagccttaaattcgaaggagttgaaaa

SEQ ID NO: 100464 - DNA, 496 bp, Vitis vinifera
  Intron number 3 from transcript GSVIVT01009261001 (locus G SVIVG01009261001) derived from phytozome v7.0 (chr-ID chr1 8; pos 6785235 to 6785730 reverse strand)
aactggttcaggtaacttctgttgataattttattttctctttcaagatccctgagctcaaaaaatacatattgtctaaacctattataatatggagtcatgattttcatgacatggaatgttattttggcagtttgatcccactgctatttaatctgcaaatttgcacctatcctagcattcactctcttggtttgacacttgaaatttgttgaatgccttgcctcatcattggctcagtgcctagttcttaaaagacacctagttgttggtatatctctaacaaaactgatcattaattctatatttgataccagttacacctgtgagtttattttatttatttatttatttgtttcatgttcttcacaagtatcctttttttgcttaaattttttgaaatttttttcttcatgtttttcatacctttctttctgtgtaattttttatttaaccattctatttcaaaatcaatcacagatcaccggggaattgg

SEQ ID NO: 100465 - DNA, 875 bp, Vitis vinifera
  Intron number 2 from transcript GSVIVT01024066001 (locus G SVIVG01024066001) derived from phytozome v7.0 (chr-ID chr3 ; pos 1398137 to 1399011)
gctggtgtgccagagctggccaaggtcgggtaaattaggatccaaaactcgatttttctgatggttgttagcttacattttggttctcgtcctgcccagaaaagtcctgtaaacatgaacagatataggaggatggaaattatacccaattattttcaatcaaattctgagaagggacaaagcttttctgtatgcgtagaacttgtgtcctcctgggaaatttctgttgtcagggaagcacattttctctttgatatctagcacattaaattgaagaaaatggaatgtactcatttccagtttctcaatctagacagagtaagagtccccgtgaatttgaacacttgaatctgtacttatgtagctacacgccaaaaaggatgtaacattttagaatctgaccacgtgagtctgcactatgatgctgcatgccaaagaaggaaaaaaacaaatcttagacgtatttgccaaaggagaaggtgaaaaggaggtgtgaattgaaacccactttttagattaagaatggacccagcaagatagtggaaaatgcgtggagcatttggtcagggtcaccattagagaagcaataaagcttccttccagtgatcattcacagtaaggttttcaaataggtttcaatctgcaattgatttgtcctgcatcaataactcaccatcagtggaagaaccaagccactcgtcatatgaatcgtatctcttcttgatctgccccactcaaatgtgctcactgattctgtctaacaatctgttttacgatatatgtttcttgcataacaacatataacagttgtatcgtgttgcataaacggttttataactctgaaatatatgatttcaatggtgtgcagaaccctt

SEQ ID NO: 100466 - DNA, 808 bp, Vitis vinifera
  Intron number 2 from transcript GSVIVT01016408001 (locus G SVIVG01016408001) derived from phytozome v7.0 (chr-ID chr1 3; pos 4182441 to 4183248 reverse strand)
aattaaaagaatttgactctctctcttcttgggtggtttgtttcctttataaaaaaattttactaatacaatttttttttttaattcctttttagctttaactattttattttattttattttgtaatttctcaaatttcaacaaatattatcttttgaattatgtggctcatattgagggaaaaaaattaataaatatttttcatatattttttccctcaatatgagccacataattcaaaagataattttttttaatatatttatattcatttattttaaaaattaaaaactacttttattgaaacatattttatttattttaaataaaaattaaatcattttaaagatttatataacatattttatttgaaatttaatttctaaaattttatgataaatttgtaataacaactttttgctattgttcttaatttattcaaataattaaaattattaaaaatgtatcttatcaaattaattttaatatataaaatattacaacttcaataactttttttatattttactaatttttgaataaatttatatttttaatattttaaaataaaaatattcaaaattaaataaaattaagaagataaatataaaaaaataaaagtaaggtgatagtagttttttaacatagaattaatgagataaatgataatacatttaacattaaaactataatttattccattcaaatgtattcatatgtgtggtttgcaaaggcagaggcctcgcgagtgagggggggacgttggcgagaggggtggtgaagggaaatccttcaaagggatcccag

SEQ ID NO: 100467 - DNA, 686 bp, Vitis vinifera
  Intron number 1 from transcript GSVIVT01037962001 (locus G SVIVG01037962001) derived from phytozome v7.0 (chr-ID chr1 0; pos 11714884 to 11715569 reverse strand)
gcgttccccagaagcccagtaatcctttgtctctctccattgttggttttttctttaattttttttgtcgatccgcttggttgcagagaaaaattgtgaggaaaaagatgaggaattaaagcataaactcatcatagcttcattttgtcttttccattgaatttagtggtttggtgactctgggtatttttagaatgcttttctggatctatttggttgctgagaaaaactgagggagaatgagattaaaaaaattgcgtagaaaataatcataagctcactctttttgtttcaatcagttttggatttttttttcttttttcaaattgtagtgtatgtcatatttcttggtaactaattgtttgattaacgagaatcttggttgaaattaggatttgtttggttgttgaggcattttgagtaaataagggtgaaattttaaattatttttcattggcctgaacgaaacttagactaggcattataggaattttttttttcttttttctattggaaattgaaacagcaatgtaaaaaaaaaggattcaaattttcacttttttgtttgttcctttgattctcaacaagcaattggcattcccatgttcacacgactaccacaattactcatcgcccctcttcctttcataggcttccaccaacgcacctcagcacactgccaccaa

SEQ ID NO: 100468 - DNA, 890 bp, Vitis vinifera
  Intron number 1 from transcript GSVIVT01038219001 (locus G SVIVG01038219001) derived from phytozome v7.0 (chr-ID chr5 ; pos 24444707 to 24445596)
gttgccaaccctgcgccttctgcagccaggtccaagtatgattccgcgttttcatatgaagattgtgtttgggttaataatatgtgatggcatgtgtgagttatcaaatgggtttttgctaacttttgttatattgttcgttatcttgttttaattgggatgacttcttgtttgtgaattgtcatgtaaagactgttgtcttgagttcatcttcggggatttcaaactgggttgtgctaatttttgttatagtttgcgggttttgatttatcattgatgtagttgctttttagtttctatcaaggcgattttgttattaaactgcttaaatttgattggtgtgtatcttattctggtaatttacctatgttttttttggttgatcacgcagttttactcaacaatatttgttttgtcatatatgtgaaattaggcttgattttgcttatttttgttggattttttcattttggtttatcagctattgtaggtagttgattaagatggttttgttgccaccggttttactttaaatttttacatatgtttttggttcaggtcaggataattggttgcagtaatgatgaagttttccaatttcttttatgcgctagttgtacgtttttatgatataatttctggttttagttatgcttttgcgtttgcgtttatttgaattatcatattaaagttgccttcaatgacaccgggtttgatcagttcagcagtttaatttcaatattttctgttaatttattctggatgtttatgtgtgtctatgcaattttatactctacactacctagccttgaaatgcttattcttttaatctgttgatttcttttctaaatctagagtgcggcgccacacaatttcagtatttgttggag

SEQ ID NO: 100469 - DNA, 848 bp, Vitis vinifera
  Intron number 1 from transcript GSVIVT01016293001 (locus G SVIVG01016293001) derived from phytozome v7.0 (chr-ID chr1 3; pos 5457619 to 5458466 reverse strand)
acaacaacggaggacgaggtgcgcatcttttattccttttctttctctctttttctttttctttctttggttttggaaaaactccaggggattcccattttcttttccttctccttccccatcaaaattgatttgattgttcagagagaaaaccaaaagtgagctagttttaggctatgtttggttccagaaaatttgaaggaaaatgcaagaaaaaaaaaatacaaaggaaaagtagaaggaaagaaaaagtgaaggaaaataaaaaaatagattaaaaattgataaatttttttttttgttacttcaaacacattttatttattttaactcattaatataaagattaaataatttaaaaatatataagcttttaattagttttaattatatttgatttttttttatatttttcatatgataaccaaacataaaaaaatcatttttctttgcattttttttctttccttagtaattttttgggaaccaaacataatcttacagttcattgattggagaaacaaaaggtcagaaaaaagaaaagttcacttccatggaaaggataatgtaggtgtccaagagccatgttttctgggtccttcatcctaagaaaatgctgatgaaaggatttggtacccagtactccaatattgcatagtagtttacagaaatcttgcctttgaatttggtattgactgaaaatacacatacacttggcgcaccctcaaattgacaatttgcatattagatataagtataatggctctctcatcaattattaatttttgactgttggttggtttggctaactagtcataaaatcaggtctaccgacactccaaaacgct

SEQ ID NO: 100470 - DNA, 961 bp, Vitis vinifera
  Intron number 1 from transcript GSVIVT01010350001 (locus G SVIVG01010350001) derived from phytozome v7.0 (chr-ID chr1 ; pos 19711729 to 19712689 reverse strand)
gaaatattaaaaaagggtaataattcatattcacaacttaataacttaaaattaacgatgataaatatattaatttaataatttaaaataaattttaaattagttttgtcaaacaactttaatactttaaaaaaataatttccacaaaaattaactttccacaatttttaaatcatgtgataaaatgatttaaatgaaactttattctctttcttatttattctttgtaaaataatttagcaatcaaaataaaataagtaaataagtgaataaataaaatgattgtacgactattcaaggtgcttgagtggcatcagttttatttcacgttagatataatatcaagtttaaggtacaacgtgatgatacttacttttataaatgaatagacgataattcctttatgcaaaattaactagtaagacactaatataattcatttttacttatgttttttacaatagtatttatgaagtattttaactcttttattccattgtatgaccatgttttttagtgacttccatttttagtttttaaatacccatgtgtataatttgaaaacttttatgttttattttaaaaattttataatattttattttaaaatttaaatctgtaaaatttcttactttcaattaggtgtataatttgaaagttttgaatattgaaagaactgcaaattcgaaaattaagggtgtgaagagtagctgtggagtcccacatcggcaagagtcagagtaataaggtgatagagtggtataaatcaaacgagacggttcaccatcaacatacttacctggacggggtctatggccgatcaagaagagtcatggcctaggacagtgacctccattgcacttgggaggggcactgccctaagatctgcccaagtggcagagtctacgtcataatttgtggtagagggggttcgcgttcgcgcgacccctgccccaattca

SEQ ID NO: 100471 - DNA, 834 bp, Vitis vinifera
  Intron number 1 from transcript GSVIVT01010392001 (locus G SVIVG01010392001) derived from phytozome v7.0 (chr-ID chr1 ; pos 20100618 to 20101451)
actcccttgtaggtagcatttgacagatcaaatcagttatgtttaatggcttcattatagtattattgtcatataaatagaatgtgacgtttgtttttttggctttttatagaaagtaatttgctttcagaatttaagttatttgtttttttagtttttgatgacttattactgaatttttaaaatttttggttaaatagaaaaaaccaaaatatttgactttttctaattaagagaaaaagccagttttttaaacatccccaaatacgattgcaagccgacgcccaaccctagcccacccatcccttgtagctctgtacaaccggtgatcctttgtcaagaatcgggatcgcctcaagaaacccagaaaaaggcgttcttgtgtctccgatccagtcccgcagcaacctatagagcctcaacggtgttctgagtccaaatggtgcaattcaattcttataagacatgaaaacacggccataagatattggaaattgatttgaaggttcccttggtacatcccaggcactataaatcggcctgtttttgtgttgggacattaagcctgctacgattctttgattatgcaattcacagcatttgttactagcttcctacataaaaatggtttatcaagtattcaatatcttgactagacaatctaatggtctttctcactgttatataactccatagaattcaatatgttgatttgctcactcttctggtcatgttatttggaatttcatggcattttcttttattgaagtgcaccttttttttttttttttttttgtaggtagcaaagaggaggtattttttgattcgcaaccc

SEQ ID NO: 100472 - DNA, 872 bp, Vitis vinifera
  Intron number 1 from transcript GSVIVT01014946001 (locus G SVIVG01014946001) derived from phytozome v7.0 (chr-ID chr1 9; pos 12608273 to 12609144)
tctaccatttcacgatcattccatccagaaatgtatgaaaataagctactctttatcattgcactaaaatatatttaattgtggaattttccccaaaagattgttggttttctggtcttttttttattagttatttttcctgtccttttttttcttcgctaagaagttatagtccaatggaatttcaatggtacttcaaatttcccttttctatattggagtgtaaattttaagatttgtttgattaacaagaataaaataatccaaatttgtaaaattatcccaatgataaaaaaaagactcattttttgataaaataaaataaaattacacattgcttttcttttcagcctaaaaaatgacttttttttttatataaaaatatccttactgtttttcttataaaaatatctttttttaaaaaaaaattaaataaaaatatcaaaatattaagagatgcttatataaaaaatgaactaatttttaagttgaaattcgagaggtgttagatttacaaatttaatatcatttcatccttttcaattgttaatccaattgttttataagctatatgtaggtatatatagatgtcaactttgataaagagctttatttactttgtaaattgcttaatcattgggaatttgtgaatagtatttaaattttcgtgttaattgtttcttatcttttcaaattttgaatgaactcgtgactcttcattattaatcacatcagtataattttctttagatatttgagcttcttcaattagagagccttgcattggcctccttgactacccaggtcctttagatcctttctaacacttatccaacaatgggcattaaaaatgcaggtaaaaataattttat

SEQ ID NO: 100473 - DNA, 981 bp, Vitis vinifera
  Intron number 1 from transcript GSVIVT01001210001 (locus G SVIVG01001210001) derived from phytozome v7.0 (chr-ID chr7 ; pos 769145 to 770125 reverse strand)
gattcatagtggtggctcctcaggtgctttctcaacctctcttccctgttaactatcctactccccctatttttctttttcttcttctactcgtttcccatttaattgtacttaatatatagttggagattataagaggatggtttcaggttcaggctgagttatgtttatccaaaatagtttccatctccatcctattaaaaaagttaaacgggtagggtgtacatacgaatttaccatactcgccttgcccaactatttaacttttttttgaaaaaaattatttattttaattatattaaaataaatatattttataaataataaaaataatataattttttataacttattttattttgaatgtgatggaacgagataagattagacaatacctaaatccattttgagcttgtctcgggttttaaaaaaattctaaatctatctcaaatccatttatttaaattttaaacatgttccactaagggggtggtgagattggtactaaaaaaaacctgtcatattgtcatctccatatataattataaaattaaaggtaatgatctttgtaattgaagtattgcaatccaaattagttcaatatatttatatattgacataataatagaggtgcaacctgtttaacaggttgacccgaaagaaatccaacctaacccaatgtttagatgagctttggtaatcattttgacatctaggttgatcttatattagggtttttcaatcttgaactcaatttgaactattctggaccaaagtttaggaaattgaacccaacccgaacttgatttaatatttttaatcaagttcatccgaaagattgcaaggcttttgggagaactttcaattaataaccgcatgcacaaacacattttctattaatctccaatctctgacatgcagtactgtgaaatggttttctatatagttatacggactattacctccttctggaattcaaga

SEQ ID NO: 100474 - DNA, 604 bp, Vitis vinifera
  Intron number 1 from transcript GSVIVT01037269001 (locus G SVIVG01037269001) derived from phytozome v7.0 (chr-ID chr6 ; pos 16686396 to 16686999 reverse strand)
tcgacacttttcaacatctgtccgttcaagatcaggtacttgttccagatctggaaaacctagcgaatctaaacatatgtttcattttccgttgcttgtattatagttaatttgagattcagttcgttttttaaagcattttttggctactggttattagattggggatgtttggatgtttggatgtcaggatgttaggagtttttgattgatggattctttttggttcttgagaaatgaagacgattttagaattttttttttcttgttgttgttatctgattgtgtattgaaatggcgattattttgatgtttatgaatgagaaaggctctggttaaagagaagaaacaaaatgaaaacgaaaatttaattttggtctatgctttgttagtgtgcgtgccgtgccctaggaatggggaaaaaacttaattcataggaaaaataggctaacaggttagtagtttgtgttatgaatagttgaagatcgataatttttttttctttgttgctttcaagattatgttctggttatctgatttgtggatgtttggattttgtgattatttcttgaaaattttcagagggaagtgaaagagagtagaa

SEQ ID NO: 100475 - DNA, 499 bp, Vitis vinifera
  Intron number 2 from transcript GSVIVT01012723001 (locus G SVIVG01012723001) derived from phytozome v7.0 (chr-ID chr1 0; pos 998335 to 998833 reverse strand)
gaagggcaactcaatcctcacaagtaaaaaacatatatttttttttccttcatgagttatatataacggttgcctttcctagtatttttctcctcattcttcttctctgtcttgttggattgtttggtgttctgattctggacacacacatgtgaatgtatacttgctttctgattaaattatttgggtatgttgtatctgaagtggggtatttgtgatttattgttgattgaatgaatgtccatttggaatgattaatgatggtttgcaaattatgttttcttgagttttgtgttggctgattgatttgggattttccagtaaaagtgaacttaattggttaagttcttactgtttctttgtggttatccatcatctggttgattcactgtacaatcagatttttattttttatttttggaaattcaaaaattttgaactagggttatattgagtttactggatatcatattgaattatctgttttcatgcagcattc

SEQ ID NO: 100476 - DNA, 182 bp, Vitis vinifera
  Intron number 1 from transcript GSVIVT01012723001 (locus G SVIVG01012723001) derived from phytozome v7.0 (chr-ID chr1 0; pos 999021 to 999202 reverse strand)
tgacagatcagcctccggtgcactggcaccacacagtaactcatactcccatggcttacacttctggactctttgtactgttatcaggattcaggattgatttgattttcttctgatttttttttcaattatttaaaaaaaatgttttttttttcagagacagagagaaaatcatcagagga

SEQ ID NO: 100477 - DNA, 804 bp, Vitis vinifera
  Intron number 3 from transcript GSVIVT01035427001 (locus G SVIVG01035427001) derived from phytozome v7.0 (chr-ID chr4 ; pos 1214340 to 1215143)
tgtatataatcacttacgatattctatttgggcaggtaattttgtccaatatctatggtagctttgatttattttcaaatttaatttgtttggaggaatcaaacaccttaagggttactctcggaagcaaaatggttagtggaaaaattacacagggagttatagctcaagaggcaaatttgtttgatgagtgaagcatataaaccattgcatatattataatgattattatttgggcatgattttatgagataggacttagtttttatagttgaatgggttgagttcaatacatgtggttcgaggttttcaaatggttccaaagtcctagaataacaaggacggtttcttggttaacagaggggcagtaacagtcttgaaatttaagtgacacttttgccaccctcgattttgttttccctagttttggttttatggagttatcatttctttgtttgtctatctgtgagcattgttttttcatcattttcttatctctctttgtatagaagaaattgtgaaaataaccctttggaggttattttgttaatgttgaagtatggtaactttttagaaggtgttccttgtttaggtgacattttagttgctttaaagtcctcgttaacgtggaatatcttgtaagaggccttggtattgaattttaaattatgatctttaaataaatggaattttatcgttgaagagtgatagtttcatctcttatttgtcgttgctcttcattttaatttatgtagtgatattttgacatgaactcttttctttaggaaatttcatcagttggtg

SEQ ID NO: 100478 - DNA, 894 bp, Vitis vinifera
  Intron number 1 from transcript GSVIVT01007818001 (locus G SVIVG01007818001) derived from phytozome v7.0 (chr-ID chr1 7; pos 8732944 to 8733837)
agagaaaaagttcgcaaaatgtgagtatatcgtcacccacccacttgatttccttgcttaatctgtgaaaatcaccatggcccgcttgattttctggggagattgtgagaaatcgtcaagacccagttggtttcccgggctgggattcgcgaattgctaatttttggtcatctgctgttctgggtgtcttgaaattgttgattgagttaatcctttcgttgggaattttgtggaatacttgctcaattttaatgagactagtattggatcatcatgcgcttctgtttagtggtgtctgattgaagtttgatgcgaagtcagatgattaatctctatttgttgtctgagtttcaatgttttgtttattttgtttacaattgatggagtgtcctgatgcccgtttggttgctgagaaaatgtagtcaaagaacataagttctaaatcgtatctaaccttttcctaatatttggggcctgaaacacaaccaactccctctctgctgagcattaagcagtcagctatctagctggtttatttgagttcagcttttgagtttaaagaaacagattaaagggcgggcaatgtaggaatcaaattttttgtgttattttcttttacacttttttccttgaaaaccaaaatgagggaaagggttttaattgaaatcaagattcctatcagagtctgcagttgaggcacagactaatgcatttcaatctgggaatggcatatgaactggccgaggctagagggaaaaaaaaaaagtagtctgaacaggtctttcttttttttaacgatttcctatattgtttggatcttctatctatttgctaataaagagagaagattacttttgaaaattaatgcctctctgtccattttcaggttttacc

SEQ ID NO: 100479 - DNA, 771 bp, Vitis vinifera
  Intron number 1 from transcript GSVIVT01027515001 (locus G SVIVG01027515001) derived from phytozome v7.0 (chr-ID chr1 5; pos 16035982 to 16036752 reverse strand)
gcgcctgaggctttcacctttggcggacaacaaaggtaagattccctgatttattgtgtcctgtacagcttttgcgagaattttctctttaaagctttctgcactaccaaaaaaaaaagaaaagattgttgattagattttttcctcttcatttcgactagtttttcaatggtttgaattcgtttattagaattttttgaattttttttagtcgcatttcttgattattcttatcaataatttattttattttatttttatctatccgtcatgcaatttgtttgatttttctttttcctagaaagtatttgtttctgtgatatctgtgcttcattgtttgaatctccctttttcttttcttttctttttttagcagtaaaatcggttgtatttttttttttcttttgttaagtggattttgacactagattcaatattttcagtcattttatatatgattttagttatatatactgtgcgtgtcgtgtgtttcacaggcgagataccctgtgttccctgttcatacattcgtatgctcgtatgtgtgtgaaattttacttacaccaatgtctctttcactagaatttatgcatgcttctagctttggtgatttttccttttgttcatgcattagggtttcgatgaaggcccatgactataattcgtgttttgtttggcggtcatttttgttaaaatttttgcataccattagcttcggtgattttgatgattttgatttttgcatatattcgcatgtaggaaggttttggc

SEQ ID NO: 100480 - DNA, 587 bp, Vitis vinifera
  Intron number 1 from transcript GSVIVT01031257001 (locus G SVIVG01031257001) derived from phytozome v7.0 (chr-ID chr1 4; pos 743141 to 743727)
gcctagattcttctccaaatccactccttatataggtactgataacatcatctgtttggttgctgagaaaacaattttttttattcttcttcttcttattattaatttaacggttaggccgaaatgcgcaagatggaaaattacgtttggttggtaagaaaaacgaggagaagtgtatagaaattgagtatgtcaagttaagcctaattattttagtgggttcatgccccaagtgattatcaatctagggtttaaaaaatttaaattcctcttgttttcctgcatttcttcaaccatcaaaagtgggggtttgggcttttgatgagtttgaaaaatgggttggtctgatttctggcgttgaaggttagaatactggaatttgtagagacccaagtggccaagcttgaaactgagatgagataattgtattaggttcatgcctcagattctagggtttaaaattttaaattcctgttattttcttacattttctcaacaatcaaaagtggggtttagggttttgctgagtttgaaaaaggggtctgtttgatttgtggcagtgaaggttggaataccagagtttctta

SEQ ID NO: 100481 - DNA, 433 bp, Vitis vinifera
  Intron number 1 from transcript GSVIVT01028813001 (locus G SVIVG01028813001) derived from phytozome v7.0 (chr-ID chr1 6; pos 18484135 to 18484567)
attcggtggcttttgcggtctctctctagctctaggtatcagatctcttcgtttattaaaatttttctttgtttgtttgatgagaaactaaaagaaaatgagatagattaaagttccgaatcttaaaattttcatcatttacacctggtggaaacagaatcttcccctaaattagcgttgtataagtatttggctgaatttagaattttcaatttcttttcttttccttaattgtatcagcacccaagcagtcatttagggtttttctggcttgagatattggcatttgatctatttgattttattcttattcagaaaaatgtaaatatatttgttaaagaattagaataaccaaaaattgatcgtggaattgacctaaaatttttcctatgctgcagaaacttcaaaaacaaaaaagtttgtgtctcatctt

SEQ ID NO: 100482 - DNA, 952 bp, Vitis vinifera
  Intron number 2 from transcript GSVIVT01028813001 (locus G SVIVG01028813001) derived from phytozome v7.0 (chr-ID chr1 6; pos 18484832 to 18485783)
gatcccactaggtatatcttcttcctagtctttgattcgaattggaactgttttcggggtgtttaggtgttttgtggaaatggaattacttagattttgtatttggataacttttgaaagcataaattcattgtttggaatataattataacacatatgtaaatttatgcatgtgtaccctgctcaagtcaataaatccctattccctactacctggtttgggttatttccttttcatcattcacattgggacactgtccataaggtgtgactacacatatacaaacaatcagaagatcacataatgaattatacactcaatccttgttcaaccctgagatgggtggcttgaaatccttatctgtagcttctgaggttgcaagctaggactactttccatgaaatgcgtgagatatagctttgcagtatttctaggcatgatgtgtaaaggtgtacataatttcattttttgaatctttgaagtggttctacaccaaaggggcttagtttaaaatttaaatgtgaggaagaacatgataaagtcagtttaggtgctatttgtgtaaatttgaatatttcttctttactggaacaggaagtataagggcttccttaattaataaactgctgattagtaatgcaaattttagttactcttctagattgaacaatattgatcaattgacttcagtatatagtttctatttgtagataggttaattattacagtacccaaactcttgtagaggtgaacattcttctgattttaagcatactaaacctcaggttttaggcacaggcacttcacttttcggcacaaaaaattattccattgttgttgatgtataaattactgatgcatatataatgttgtgatatgcttctaattttagtttctttatcatcatttctggcagtgtggagaagggaaaccttggggtacctcagttac

SEQ ID NO: 100483 - DNA, 345 bp, Vitis vinifera
  Intron number 1 from transcript GSVIVT01000568001 (locus G SVIVG01000568001) derived from phytozome v7.0 (chr-ID chr1 ; pos 6988932 to 6989276)
cgcaagaagcagcaattatttttatcaaatttcatgttttaggccgtttcaattatcactaaatcatacttctagcttcgacttcccaatcatctttctattttctttactcgattgcaagtaatcactatttttgaattctagggttttgtttttttttttatattttctataataagagaagaggatagagatcaaaattaattatcagaacgattaggtttggtttttcttgttttcaattgtgaaattaccaatggtggaccgcgaaatggaggtgtgcttaatctcttggtagtagtgattggtggtgagaaatgacgagcgccggtgaggaagacgccg

SEQ ID NO: 100484 - DNA, 493 bp, Vitis vinifera
  Intron number 1 from transcript GSVIVT01025056001 (locus G SVIVG01025056001) derived from phytozome v7.0 (chr-ID chr6 ; pos 4914307 to 4914799 reverse strand)
tccacaccgtctccggaaaagaatacatcactcctgtaacgctttccctctctattttctcttcattccctctgtttggttttcaacaaagaagtttttttttttggtttctctgtattttagtaattcaactaggataatctgaatggaaggtttagtttctcggcagaacagagtcataagtttgagattttgtatgcgtggttatgtttttttttttttttttaatggtcaataattattttctagttgttttcttggatgctgaacggtgaaaatgggaaatctggaatatgttttattctcactttgacttcctttttctcgttaacaaaacggagagttagggtttctgcttctctattaatttttcttcacagaaaattatttttgaatcatgattgatttttttagacttatttttctattcattgatttattattattgtttggaatgattgaatatgacaactaaaataggagcaattgaggc

SEQ ID NO: 100485 - DNA, 633 bp, Vitis vinifera
  Intron number 4 from transcript GSVIVT01028002001 (locus G SVIVG01028002001) derived from phytozome v7.0 (chr-ID chr7 ; pos 3118323 to 3118955)
gacccctagcatctgggatacctttactcgttagtttctagtttctgccccttcttcataacccccatcacttcattaccatgttgtgtcggtcgaggggtacatctaccctaccaccaccagtgacttacaacttcttcttcttcttcttcttcttcttcctttttcttcttcttttaagattggcgcagctgaaatttactgttcagggtagacacatgaaataaaagcttttaattttatgtcttgtcattgagttttgcagataagtgcgcaatgaaacagttcatgttgtggaacattttctttcttcttctttttctttttcagtaggatgctctataatcattaattatgtgactgaaaagaaaatctccaaaggacttactctgtatggcctttggttttagggaatatatttaaaatgaaaagatacggattacggaacctggttctgaaagatttcctatcaaagtatcttgcccccaacctttctgaaaatgcattttgactttcaacaagttgggtaaagcatatgagtttagtagcagctgccgcgagataactaactgcatcaccctgatatttgatttggagggctgattgtccaacctaaaatttcaggaattgtcc

SEQ ID NO: 100486 - DNA, 638 bp, Vitis vinifera
  Intron number 2 from transcript GSVIVT01032251001 (locus G SVIVG01032251001) derived from phytozome v7.0 (chr-ID chr1 1; pos 13985925 to 13986562)
tcgtcgtctattttccacaaggccacagtgaacaggtgagtgttgtctggctaacatgagcagggatcagtgaatctttaaaccatctctgtatctgtaaagatgttgtgggtttgcattcagtgttattatgtgcaccccccgttgagttcagcttggaccaggtgctgggtgggggtggttgaaaaaagaaaacaaacagggtggggttggttttggactaacttgcgccggttctggtgttggagaaattactcatttgccgtagattgaggttatgattggctattataaatcattatgtgaaagctaggtaattaagtaaaactacccaataatcattgcatattgttttggtggaaccatttgtcattagagtttttgggtgggaattagtaaaatatcattacagttttgtatatcatctgtgagattctttcttctactttgaatgaaaatttgtgtttggctgatcaagcttcaagattcatcaatgaaactattgttgcactcaaagcacacaaatcccagatgctaatgttttttttttttttttttttcttttaagttttctgctgttcagaaataaatctgtgttaacttgttgagaatatttctatttttaggttgcagcatct

SEQ ID NO: 100487 - DNA, 911 bp, Vitis vinifera
  Intron number 1 from transcript GSVIVT01013027001 (locus G SVIVG01013027001) derived from phytozome v7.0 (chr-ID chr2 ; pos 9994381 to 9995291 reverse strand)
tttccgactacagtttttctcgattaccggcaaaggtttgactctttccacgacccttttggctagatgaatccatgttggaaaagctctctcttctctcttgtctcccatttggctttggtttcttcatgctgttaccttctttctcattaaaaatgttgcttggcatcaagtatgaagtatcaactaaacacccatgttagatgattccttaatattgttgttctggtctggtgtgtgtgtgtgtgttttttttttcccagtaatattgattaatattttagggctttatgaggcatttcatcgaataccccttatggtgtcaaatattcctgaaaatttttgactagtgttgaattatttattttctaggggccaaagcagattaatctatttgacaacaatgctttcagatatataacttattgaacttgctatgggcattttgaaaatcaccataaagtttaaccaaattcacattttagttactctgtggagaatgcttttttcgctgtaggaatacctgctaatcaacaccatcttggaattttggctgtaattaagttatttatcctaggggctgaagaagattaatctaatccacaatcatgcttccagatgtataacttatttatgtgctatgggcatttagaaaatgctattaagtttggccaaattggaaattaattactccttttgtattcttattcttatgcatttactaacatttttggaatgcccattagtttcttttatctatttgttatagttttgtaacttttattattattattattatgatgatgttgatcatgatgatgacgatgtcaacaaattgctaaatccttttgtttttttaaccccatttacaaaaaggggattttaggttgcattgtcttggggaagtacta

SEQ ID NO: 100488 - DNA, 868 bp, Vitis vinifera
  Intron number 4 from transcript GSVIVT01021114001 (locus G SVIVG01021114001) derived from phytozome v7.0 (chr-ID chr1 0; pos 1591385 to 1592252 reverse strand)
tggtgagctggggcgtcggccttcccaagcgagctgtaagtccactctccaaccccaccatctcgttgtcttaattcattgtttattttctgtagtttattttaatcaatgcaaaaacattagaacaataaaataagccgttgctgttaatgtcacgtgagatggtgatgatgaatgtggcctgttggctgtcgaggacagctaccttgtgtactccatatgtatatgggttgggttgcactgcctcttttaattggtgtagttttaatatatctttgatttgcctattaagaaaaatccatggctgcatgagggaaaccacaggcattgcccaataatactaataagctaagtaggtagatagatataattacatggttaagctgattggttgatcaatgagcagtatgtgtgtgacatactgctgggagatcttactgttatcctaggcattttattatcttgaaaatttccaattttccgttggttcattagaagcatgaaggaaagggaagcaaaatgctgaaaaattactgaagaatggaagaggtctttaagccattggttttttatttggattttggaaagaatgacagaaagaggaagcctgttcttttctttccttacctttaatttaatcaatgttccttcttgtctttctttctttctttttgagaaccaaacgtggtttaagatctggaaatttatgtagttgtgatgttgcagggtcttttctgtagaaagccaatattgtttcttctatatatgatgatgatgacttgtagcccttattgattttgggaatgacatgcggcttgtggttttccttgtagcctatagactcaaacctcctgaaactgctcatccc

SEQ ID NO: 100489 - DNA, 485 bp, Vitis vinifera
  Intron number 1 from transcript GSVIVT01015313001 (locus G SVIVG01015313001) derived from phytozome v7.0 (chr-ID chr1 1; pos 2598636 to 2599120 reverse strand)
gtcggaaaggctgcccaaggttccacaatttgctttgtcttctttttctatcagcttttgcgagtaatggtggggttttcggcgctgtttggttgccgagaaaattagtaggaggaagacaaggaaataagtttgtgtgcgtgtgtggttactgttttcattcttttggtgtttcagttgagctgaataattgcacgccacttctttgctccctggcatcaaaggggtcagagacagggtgttcccgttacttgttctcctttgctttctcggaaattccctgtttgagaaatagcgtttgttttatgtactgatttttgtcgtgtttgcagttgatgttgtattcctggtggttgaaattaacttctctataaacgtctgttgtgtaattttttatcaatcaattttcctaaaagtttaagctaaggattttgtttttgactctcctctgattttgtattggttgctgtttgtgggcacaggtg

SEQ ID NO: 100490 - DNA, 345 bp, Vitis vinifera
  Intron number 1 from transcript GSVIVT01018147001 (locus G SVIVG01018147001) derived from phytozome v7.0 (chr-ID chr1 5; pos 13903895 to 13904239)
ctccattttaggaaaatcaggtaagtaaatcctaaatcatggcctcatccttcggtggtttctcctcttatttccgaacgggttaggggttgggttttttcttcttcgtcttctttgatcttctgggttaaaagctccaatttcagaattatgggtgtttgcttttgaaagggaatctctgttttttaattttatttttgaaaatattctgatattttattgtgataggaaagaaagaggaaatataccctagatctttgtttggttttcgaaattcttctgtttactgatcttctgtcttttttgtttaatggatttatataccctagattggtagaaattaaa

SEQ ID NO: 100491 - DNA, 764 bp, Vitis vinifera
  Intron number 1 from transcript GSVIVT01018724001 (locus G SVIVG01018724001) derived from phytozome v7.0 (chr-ID chr4 ; pos 20384436 to 20385199)
ttctttgccaggtttactgcagaacaaaattaatgttttaagatttcttggttttaattctttttcccaatgcttattttaaaattatgcaaaattcttagccatatacacgatgggttcattttatattagttggtcaaaccagtcggttttgcttattcttattgatcatcttgacaatttacttacttttatgttgaccttctgtcattgtcttttatgttgtagttctagcaactgaaagcttaaataaattaagggttaaacacattggattttcttatttgattcatgcagtcttaaaaaaacaattttttaaatgctataggttagccattaggtttgcagaaatttgagaactagaaaagattctcttcttgtttatcttttctttcagagtaagtttgggagccaagagctatatgacgtgaagcattagattctctcttctctggtggtgatggaggattttgtctgaatagcttatctgctaacatctataccattgttattattcattattttggattcctagtcaaatatatggcatttaattgttattttggagatgttaactcattattgggaagtattggtactttgtaacttatataccatcccaatttacaggctttcatagaatttaaactgggctggtgctgatatttgttttctccaaagaattccatgtttttaaaatcaaatattgagttattttatctaaactatgttatgttttatgatcatatttcagattggtttgg

SEQ ID NO: 100492 - DNA, 1014 bp, Vitis vinifera
  Intron number 1 from transcript GSVIVT01033781001 (locus G SVIVG01033781001) derived from phytozome v7.0 (chr-ID chr8 ; pos 17878424 to 17879437 reverse strand)
atttctccagttttgttcggcaactaaatacttatgtgggtattgctgtaacgcggccttcaaaggctgctgtgctctgtatgtagaaaattttctgtatttttcttgttttttctgtattgttttttatttctctattttgtattttatgttctttatgtaattggatttgaccatgatcgaatctatgtagatgctgctgaggcggatttggtagtaatcaaaatgtacaaaatatatgagctttcttggtgtctggagcattgctgatgtatcctcttctcttgctttgttgtgaatgaactcgagttggagagtggtgtccatgtggatataagtcttttgctttgaaatgctttagattttatttcgtggctttgggtctatagtagaaaaaacagaggataatacagatgcagatggagatgtgctatttcctttgtagtttatgtaatgtgactgttaatgggttctttgtgtcatctgttacctcgaggttttctgtgatttgtctatcaggtcctctgttaggcttagatttgtacattttcttttctttttcaaaaatagtggaatttaagaagatgaaataggtacttggttcgtcagttcatagttaggcctgagaagcaattatttccctcttcatatccatgaacaggagaacgccctacccctttgaatgtgtcttggagctggagttccaccctttgcaggtagaatttcaggttcaggtggaaaatttgttatgataagttaaccacattttctaaatctcacttcttcctgtggaaaccttattgacaatttactgtttgtttatatataatgcaattcgactactacacatgaaaatcaacaaatcagtttgctttgtgggatgaagtcactatatatgtatcatcatgactatctttttccttttggaacttcttttcttatccattcactcttgaatcactcggggtactgtattcagggtttccgcaagattgattctgataagtgggagtt

SEQ ID NO: 100493 - DNA, 377 bp, Vitis vinifera
  Intron number 2 from transcript GSVIVT01019833001 (locus G SVIVG01019833001) derived from phytozome v7.0 (chr-ID chr2 ; pos 3732044 to 3732420 reverse strand)
aaggcggatttggagaagcttttttctcaaaccaagtatgcggatttgaccccttcttttcgattttgataatttcaaagtgagcctattcacattttagtcgagaattacttgtggttccttttcttgttatggtcccacactgtaataggagtgacaaacagatcaaatatgtattattcctgttcttattctttctactaattctattgcaacttacagtttttcttatttaatggggatttatttatttatttcttaatgtttctggtcctcagacttatttcatcatttgtcgctttacattaattctttacgaaaattttgatttggtattttgggtcttgtgctttatgtttgacaatgtaacagatttg

SEQ ID NO: 100494 - DNA, 623 bp, Vitis vinifera
  Intron number 1 from transcript GSVIVT01009698001 (locus G SVIVG01009698001) derived from phytozome v7.0 (chr-ID chr1 8; pos 10587102 to 10587724 reverse strand)
cctcttcttcttcccatcatcactccggccgtgaggtccgtttttctcgctcctgtctattttctccaaatccattgccattgtttgtggtcttttttcggattaatcgtttcaaaacctgtttctaaattcagaaacgtgtggattggttcatcgatttttccctaattttttgtcgctaccaccagatatttgttttccttattatttaagccagaggaattcgaagggacggtgagcgtacagatcaaaccagttatgaaatttacccagtggattacaaagatgttgagaaattttcctttcttccacgccaattaaagtatttcgtgggaatttttatattttcgatgcttgttagtgtcaagccaagagaatccttgagacaaattactagaagatttttatttttttttcggtgattgttattaatgctaatttcaagatatatgaattttggatatataaccccttttatctcacaccgaattttgtgcatttattgtcagttacctttttcttacccatatttgatcccaacctcttatgcccacaacaagataaagctttgtttctatacctgtgtaggcattttccaaagtcatccgcagctgggcctcaaa

SEQ ID NO: 100495 - DNA, 440 bp, Vitis vinifera
  Intron number 3 from transcript GSVIVT01010068001 (locus G SVIVG01010068001) derived from phytozome v7.0 (chr-ID chr1 ; pos 14671077 to 14671516)
gtggagaggtagagaagcttgtctcatattatgaatgctttagtttttctgccaccaggtcaagatactctgtttttgatcgaatttatgaatatttatgatgagaagaactcaagagcagttacatatttcttttcgacacataaaaatcccactaagtcgtccattctcaaagaagtggggtaattggtaaaaatcaaatagactaaatatggtttgaagaggactgaaatgatgacaaatgaaccaaaacattcgaaataggcttaccttaggcatatatgcagcaggaactctatgttccatttgtttctgaaatgtgtaggagcaggccaaattacctgaagggaatatggacgctggaaatgaccattttatagacacaactgatagcttgttgtgtgtttgtgtttcaaaggtggacctggaccttggaaact

SEQ ID NO: 100496 - DNA, 493 bp, Vitis vinifera
  Intron number 2 from transcript GSVIVT01017843001 (locus G SVIVG01017843001) derived from phytozome v7.0 (chr-ID chr5 ; pos 3964379 to 3964871 reverse strand)
tctccaaggttgttttcttcgtatttacagttcatgataattataagttctctattcttggaaattttttttttattgaatattaagaatttggattcaatgaattgttcagcagttagaaaacagtccaaaattgatggaatgttcagggactcgaattcctgattttatatcatctaatcagtttactagtatttattctgaatctaacaaaccgtttttgcagtttcagttcggccaactttgatcgatgattttgaaattgtggtttttggactctgattgataatttacagcataaaagacataaatttctgtgcacatgtattcaatttcgtgctatcatgttgaatccttagtagctgaatgccataatttgataccatttgtttatcaatttaatatattgagaaagatcatttaacaatgaaagggatatttttttttttttggatgtttgtgtgttcagttggagagctttagaaagacactc

SEQ ID NO: 100497 - DNA, 854 bp, Vitis vinifera
  Intron number 1 from transcript GSVIVT01008867001 (locus G SVIVG01008867001) derived from phytozome v7.0 (chr-ID chr1 8; pos 2909488 to 2910341)
tcagttacaggtactctctctttctctttctctctccactgacctgactctatgaatgaattatcctcctggtttgctggaatttgtttccccattttaatattgaaaattttcggatggaatgcgcactggtaaacttcaaaatgtgatttttattaaggaatcgctttcatttattattgttttttctgctgcggaataattgctagaccactgctaagtgaatatttgccctttgtagttatatttggaattcgagaagtaaaaatcttgtggattttgctttgaattatctcccaaagaggaaagagaatcattaatatgtcccctttcgccaggcttttaacactcagttctgaatctgaattgtcttgaaaggaaagagaagaaactgtcaggcatgtatgatgactgacctagaaaacgattcaacccagaaaataggtttggcagaagaattgtcttgaaaaattttgagaattttttttttgaaaacattgctaaaaaatttcctttccttattttgttcatcaagactgaggagtccaaaaataacttctccatgattacgttgatttttgttttcccttttcttgttgttgtcaaaaaaccgaccataggttttgaaaaattgttttcttctagttttgggtttaccgctgaagaaagcagtctttggattttctataattacaaaccgatagcaaacccagaaccagtcaatttgatttgtcaagaagcgatatggtatagaaatgagtttatttatggaatatttataatttggaggtgtggcaataagatgtatgtttgatgcagctgtggttcttgtgggtacgaactaaagctttgct

SEQ ID NO: 100498 - DNA, 918 bp, Vitis vinifera
  Intron number 1 from transcript GSVIVT01011384001 (locus G SVIVG01011384001) derived from phytozome v7.0 (chr-ID chr1 4; pos 29225484 to 29226401 reverse strand)
gttcacgtcagtttctaccggaactgtaagatccacatctctctgatttcggtttattctgatctccattttgacattcgtctttgagcatatgatccctgaaacaacgttggtactgatagttttgttatatttctcttataaggggagcttgatctcctgaataatgtatatatgattttggtattgttatataagttgtgtaagttcttttgattgtatgttagtttgtttgctttactgtttggttgctgagaaacttaaagaaaagagagaaaaatttaaaatttgttgcttgttttgctttggtttaactttgctaaattcttgtgcttggcgcggtggagttgaggtttctgttttcttcggttctccgtgacgtggaatctagcattcaaaatttcaggacttgtttgtcagaggaaatgaaacccgcaagaatgctcatgttcagagagatcgtgtttaaaaaccctttgtttttggatcggttgcaattgtcaaagtgctcacattttagaaaatgttttgaagataccagtttgatagttctaaaagtaatccatgtttttaaaatgttttcagaattggtttccataatgtcttcagaagacagtcctccatgtcatttcatttttttaactcagttccactgcccacagttctcttttctaataggcgttattattttcctatgtcactcatcaagtggtgggggttggggttcacagaagctagtcattagacttgttgtatttgaaatatcttacaaatttaattgtctcaattatcttattctgtcatctttactcattgttttactaggatttatgacttagtttgcatagcttcatggtatcaagttgtttttcattataattttgcttactataaatgcttaattgtgggtgggtttag

SEQ ID NO: 100499 - DNA, 954 bp, Vitis vinifera
  Intron number 5 from transcript GSVIVT01033841001 (locus G SVIVG01033841001) derived from phytozome v7.0 (chr-ID chr8 ; pos 17308546 to 17309499 reverse strand)
ccctcgtcttttaggccctggtctcaacaaggcaggcaagtggtgttacttgccatgagttagttgcccatttcattattgttatgattgttaacctttagcagttatattaaatcttagagtggatgtattgttgtatacagtgggataagataatgatgttctcttaacaagagcagctagacttggtttggaagaacatctatcgataggatgcacattttggttgtgattggtgatggaaggctgtatgatgtaatgattaaaatgtgcattcattggattcatctaactattttttcccaatgattggtccctaagttgtgaaaactgaagcacatgaatgtcttattcacatgtatattcacatgattggaatatgttcatgtttttctggtagtaataaagagttggcctgataggtttttgtttccccccttttttgtttttttgtttttgtgtttattttctttgatatttttttatggggttgatttattttaaatgattttacaagtattcgtgttaggtggattgtccaacactgctaaagtgtgtctcactgggggatcggtgtgttaatatgactcaatatgatttttccagttgtgttccgtctgttatttagcttttgtgtaccacttgtgtacgttgggtgcacctcttttgctaggcactgctctcttaatatatttttgatttttctatccaaacatacaaaaatatgactcaaatctaattctcattttctgattgcttggtgtccctttaggaggcattatcatactaagtaccttagtaaatttatcatattgatcaatataatataatgatactaagtgcaatagcttaaaatctaggttcatttgttacatttcttccttgcatcatatttatacttgtcaggtggttactgcagggaagtttccaacactggtgactcatcaggaatcc

SEQ ID NO: 100500 - DNA, 731 bp, Vitis vinifera
  Intron number 3 from transcript GSVIVT01033841001 (locus G SVIVG01033841001) derived from phytozome v7.0 (chr-ID chr8 ; pos 17310157 to 17310887 reverse strand)
aacatatccatttacacgaggaatttctgtggtactttttattgaaatgcagctctacgtttattcttcattgtcaagctttacttagctttgtttaaacggagattgtttgacttttttctgcttgattgattgaatacacttcttataagtattccaagtcattcaatccattaggatttgattgactgtacctgctcacttccccttttacaaataatgcgtttcccaatattatttgcataataaaatgtgggtaaaaatttgtgcataacaagatatgaaccaaatgttataggtctgtatgttctttgaattcacctttgaacctacaattttctcccattttcatcatttaaggcattggatcaatgtggtgtctttgtattggaaaagcattttgtttcatgctatattggttgtctatttttttgcatcttgttaatgaaattcaagcatttgataggactcatggtatctttgaactttatgcctacttctatccaaagatgttacaactatgcttattgaatgttaagatgtatgctgtgttgaaatacatgatcactgtagtcctatattaaaaagaaaaaaagaaaaaaagaaatgggtactgcagttttttgtaacttttaaagatgatctaagtttatgaatatagaaccaatatgtttgccttctgttttctgttatcagcaagcttcagagtgaggcattgagagaggccatca

SEQ ID NO: 100501 - DNA, 864 bp, Vitis vinifera
  Intron number 1 from transcript GSVIVT01024219001 (locus G SVIVG01024219001) derived from phytozome v7.0 (chr-ID chr3 ; pos 136253 to 137116 reverse strand)
gccggaaggccgagtccggtgttcatcgccggaaggtatgcttcggattcgccatattgttatatttttgagagatctgctttgaaagggaaagttggaaagttaagagtgacttgagcaaattttgggagagaattggttattatgatcaaatacgaagtttttcttatgctgaatttatttggattcttgcattttgatggagatgtttagggatcataaacaagctgtaatgcatctgatgtgaagtgcctctagttgtaactttgaaaatatgttttctgtttttgaaagccaaaaaccagaaccgcagaatagatgttttaatgcgttcggcagtttggactttggagaaaagaatgaagttaagggccaaaaagaatcgaatttttaaacagaaagaaaagtggctttttaggaatagggaccgaaaacaggaaatgcaatcaaataagtgttattttctaaatgaatgtgattttaaaaacagttattgagataattgtcctaattttatatgatttgtttacacactgatcaaaatttaggatttaggttacttttttgtaaaccatttggattcatagtggggcaaaagttgtacttcaatttcttggcaaaagttgtacttcaatttcttataattaagaattttgtatgacaaatttttgaatggttggttcactctgtgaattgttgttcttttattttatttttttataggcaaaatagaagtacactttaataggcacctatagaaagatgggatgctggaagtatacaaagattttttggactttgatgtttgtaattttacttttcacaaacaatggcttatagcactggtttattgaaggattggag

SEQ ID NO: 100502 - DNA, 1048 bp, Vitis vinifera
  Intron number 1 from transcript GSVIVT01028434001 (locus G SVIVG01028434001) derived from phytozome v7.0 (chr-ID chr7 ; pos 7492267 to 7493314)
actgtctcactgttgcaagcaatctcctctctcgggtacaatcttctttcttctctcttctttccgtctgcttttggtttgtctgcccatttacttctttccatgttgtgcttcattattcagcctttcacatctgggtttgattcttgtttggctgtagatggtgtctctgcagaaaatttaatgtgttttgtagcttcatgtgaagacacattcaatggcatgaattgggttttttaattttcatgaattgcttggatgatttgttagtttttcagacatggcgtcatctctcctacattctatttctgaaaaaaggaaaaaataatagagaacattgcttcatcagatatggggttttccagatgttgccttgtgaggaatcaatatcttttggggtctatataccataaaatttaagtacttcttgatgtggaataggattctggttcttgtatgacttaaaaacaaagtagcatcttctaagaatgtatttaaatgacaatccattttcaggaaatgtgtttgaaaatggttgtatgtcaccaaatatatttgttcatttccattttttgtttgcaaagatagaaaatagttcctatttccattacaaagaggtccactgttttgcttgtttatgtgtttatactagtatattttggataaacaaacatatttttttcaattaatgaggtgttgtaagtctgtaaatgagacataagtacaaactaggagcaattttgtacagtgttgttgtgttattgaaatggaggtaatggcagaagtagttgaatcttctgcattctctaataattgtgcagaaatatatggattcggattcgggtgcatggtggctcattgccccatccaaaaagccatttagattgattgataatttggtaaggtcggataaccaatatggatgtcgagactagcagattcaaaatagtagaaaatgatcagttaacaatgttgaattcaataggtgtaatgttttgtgtcaaaatggacaggcttgagttcttgggctgttcacagaagtgcacat

SEQ ID NO: 100503 - DNA, 650 bp, Vitis vinifera
  Intron number 1 from transcript GSVIVT01038147001 (locus G SVIVG01038147001) derived from phytozome v7.0 (chr-ID chr5 ; pos 23888943 to 23889592)
gataggttggcaatacaaaatgtatgaaatggttgaatagttttcatttccaattgaaaatttgaaacctaaatttaaaattaaagaaaaaaaatcatccaaagaagttgccaagcaaaaggatccaaagtgcagtaaagaccacgctcttgttcatgtcccaaaagtatgaacacaaacaatcataacccacctcatattttcccaattttctcagcacatcaccatcctcctaacccaataatgatcccataacaacaataacaaaaccccacaaaaaatcaaactcagtttcatatatatatatatatatatatatatatttatcagtttgtttgtacaatacacatgtaaacacaaatacaaataagtcttcccattgaagtaaagtttggttgaagttggaggcatattgagtaggaaagtggccaacctccccccccctctctctctccctctctctctctctctctctcatcatcatcatcataccgaaagaaaagaaaattatatatcccacaaaaggtgcaaggtgggaaagaaagtgaaaattcttgaggagaaccatattcaaagtaaagggaaagatataagccaaaaaacaagaacatatagcttaaagtttataggaaggaagagaagggttggct

SEQ ID NO: 100504 - DNA, 970 bp, Vitis vinifera
  Intron number 2 from transcript GSVIVT01030668001 (locus G SVIVG01030668001) derived from phytozome v7.0 (chr-ID chr1 4; pos 13233668 to 13234637 reverse strand)
ggcatcaaaggcttcatcatccttcctgataactggtatacattccattctcttcttctctctatcacaattcccaattttctggtttacaagtttaaattaaattaaattaaattattattattggttttattattttatcatatataatattatttaatttgttttcactaataaaaaaatgataataataaaaataatgagctgtaacttgtaaggaagaagccgttaatgaccgtttgaatgaagaaacgtggcaatgggcgggctgtggtgattgaaggacgaaggggtaggtcactagaattgacttttgaagattatttttcaaatgaggggaagggtttctaataatcaaattgagtaaacttggcaacacagtctaatattgaaattgcccagatacatgacccctcctgtttctattcaaaatatggcattcttttaattaattaattaatttatttattttgtatttaattttttcaaattttgtcaagtggatataggtcaatctaagcagacaggatccacatcacatatctatcaaataaatgaaaacaaattaataataaaaaatttgaactgtctctagactaagataatttttgtattgaaagatctcggcatcgctatttgtacccatcagaagtcgtcatcaaaaaaatgtgccaatgatgcaggagaaagaagaaagaaataatgaaataatggcaatccttgaagtttgtttttatttctattttttagtaaataaaaatgaatttaatgattttttttttagtgttggaatgaagttaagaattcaaaattgaaatgattatttgtttttattcgaatatttagtaattataaaagtaagaatgaaaaataaataaattgataataatacttttatatatagtttaatattatattttttttattttaaaaaataaattttgaaagttttatttttgttactaaataa

SEQ ID NO: 100505 - DNA, 867 bp, Vitis vinifera
  Intron number 2 from transcript GSVIVT01035907001 (locus G SVIVG01035907001) derived from phytozome v7.0 (chr-ID chr4 ; pos 5653253 to 5654119)
gctaggtcttggaatttatcattctggtgttcaaggtttgtgtgtttgtgtttttttgtttttttgttttccttttttttaggtgttttcttggcagccaaacgttgatttaagggtttcagtttgattgttcttttttggtgggtttgaagtcagatccattgttatatgagctgtggtgtgtttggctgcagagaaaattgaagaaaaggaaattgaattggatattggggtttctgttgtttggtttccagggagagccaagcaaccacctcacgacttggcttttaataacaaaaaccgacaaatgttagggttcaatttctttttctcagttcgtttgggtactgtgggaaggtagggaatgaaagtgaaattaaaattcggaatcttggttctttcgttattttggagcccactcagctgagcctaaatactacgcttttttcagtttgttttggagaccaaaacaaatttgagagcatcggtttcggtatttggtttctcgattgctgttttggtcgctgagaaaaggttggaaatgagaaaattttagaattatcatttttgagactatagaaaacacaaatccatatccaactgagcctttggcttggttatgttgaattttttatgtttttggaaatttattacaatatgagacatgaagttttgaaaattttcatttcattttttttccaccatttttctccacaaccaaacagatggtaagaaaatccagccaggaaagaggttggttcagtagattttggtgtctgtttattctctttaatttccttggtaaattaatttttctgattcggaattcttgaaatatgctcttctgctttgattttgctgtagttc

SEQ ID NO: 100506 - DNA, 672 bp, Vitis vinifera
  Intron number 1 from transcript GSVIVT01006872001 (locus G SVIVG01006872001) derived from phytozome v7.0 (chr-ID chrU n; pos 28735784 to 28736455 reverse strand)
ccactgctggagacggtatgcacttgatacgtccatgctttcaaaatattactgactgcttttggattcaaacctgccatgtatgagtataagcttccctcatcatttctagtttgcagatatagaattcagagttttctttacatacacgcaaccagtagctaagaggaaaaataggtagagaaatcaacttaaacttacccactcaaaatacaaggtcaacttcctaacctgttttcctcaatagatttctagatatgatttacccccaaaaccacagcagcttgtacccaaaacagaaactcctctcctcttgagacactacagtcacaagagaaaccatgagcttcctcaaaggaagaaaaacagaagatgagtatattttggatacatggatgctcattctataaatagggtgacatgatatgaattaaaaatcattattaaggatcaaaatttattccactcttattcgcccatacgactcctaatttctttaattttaattaggaaataaagagacttgattgaattagtgtgacaaaattccatgatgcatgctaactcttcactagataaagcaattccaatattcagcatcgggaaatttgatgagaggaaatttgtgtttttgcaggaaaaagtaacagaacgcgaactgtagttatcatt

SEQ ID NO: 100507 - DNA, 1031 bp, Vitis vinifera
  Intron number 1 from transcript GSVIVT01034286001 (locus G SVIVG01034286001) derived from phytozome v7.0 (chr-ID chr9 ; pos 14073928 to 14074958 reverse strand)
aaggtatgttacctctcacttttaaaatttcttttcacttatactccaaacattctaaaggaactactagcatatgttcttaaaagtgttcaggtggagaccaaatggtcactaataactattgaatttaatatgagaacaactactaatcattaaaatttaaaatgtaaattaatatttaaaaattattgttttgaaatattatagattacattagacttatatatataagcatacttgttatttatgccatcatctcgtacccaacccacttagagtgagcaatttcgcagttattaattaataggaacacctaggctcccatatccttatcctttatgctaaattttctttctttatcttccattcctaaaaggcctaatttccattttccaaattgatagagattggttaaagaaaggtgataataaaatttgactattgctttcaaataaggaatcaccatattcagaatttcacattttcaccccaaaaaaaaaacttagccttgggtagggcctagaccttattgttttaagttgatgtcgggctagtttaacaatgaacaaagtaaagcccaacctatgaccatctacgcatttccaaattccacccatccacaacctattcatatgacattttcaaggacaaaatttattcaattaaacctattagatggattctacatacaatgttaaaatgaatataaaaaactttaatttagaaaataatttcccttatttagttaggattcatattataggggcacaaagaatgaaaaatttcatgtttaaattcacaaagatcacaaaagctctttgaagctctatggactttttttatttctaacatttaaacacaaaaatcacaaaattgaattagaaatttggatacatattcttatattaaagacatgtaagcttacaaatttaagtatgaagatctcaacttgtaattacatgcttctaattaaaattatattactctattttacaggatttaaagggttatcaagtttaaagaaattggag

SEQ ID NO: 100508 - DNA, 705 bp, Vitis vinifera
  Intron number 1 from transcript GSVIVT01013145001 (locus G SVIVG01013145001) derived from phytozome v7.0 (chr-ID chr2 ; pos 7633412 to 7634116)
aaccctctcctgcccttgctcttcttgccttccaagttctcatttcatccaatatccatctacttatacataattctggttcttagatgcttctaattatcgttaagagaaaaacctccatgccatccaatccaaatacagttctcaggtgaagtttttgttcagacccttttgttgtcacagttgtatagcatcatctttgcacaactcttatatatacattttttttctcttttggagcttctggtttagttatttgaaactctaatgcagatgatcttgattgtttgttccaccttgccaagttttcatttctgttcactgacaatcttctttcttggtgggaagaaagaaagaaatatcatgttataaagttttaagtaggattagtcccatagtctcttaaatttgccatggggtctcttggcagcccaaaaatttgggtgccatatattagcaccaaggactgttctcagggtttctgtagcttatactgcccacagtggtgctacatccccgcccctcctccaccttattttgaatttcctgacgaaaattcaggtccaaatttctcccctcttgttatcgcgatcatcggcattttggcaagtgcttttcttcttgttagttactataccataatttctaaatattgtgggaacatggagagggagagaagagaaaatcaggacataaacgaggaat

SEQ ID NO: 100509 - DNA, 575 bp, Vitis vinifera
  Intron number 1 from transcript GSVIVT01017061001 (locus G SVIVG01017061001) derived from phytozome v7.0 (chr-ID chr9 ; pos 3865205 to 3865779)
cttctgaaggtcatcatcctcggcgatagcgggtgagttttataatctccgatctggttggtttgtttacttgttctcggtttgattggtgagtatttagggagagaaagtggaaggaacttttgcgtcttttttattatgttggtttggtttggttttgtgaacaatgaggaggttaggtttcgaatagataggagttttttttttttctttttttttttggggctaaataatgctgaaacaaaaaatttaggattttgatcgccataacctaatcgtagggatataagttaccttcggtttggaaaatggggtaaacggaaagaaaagataggaaaattttgattttctatgatctcatgttgttttttatgctaaaaaatgaaaaattgttctaaataagccaaatgtttctcatagtgttgattgcaaccggactgaagaactgtgacagagaattttcgaacttttggctttgatgagtgctagtgttactgtttgtttagttaattatgtggatttgtatgctgacatgtccttgtttgatcttttgtagggttgggaagacatcgctt

SEQ ID NO: 100510 - DNA, 682 bp, Vitis vinifera
  Intron number 2 from transcript GSVIVT01005714001 (locus G SVIVG01005714001) derived from phytozome v7.0 (chr-ID chrU n; pos 21500635 to 21501316)
ctccttatcttggttggcaacgaagaagagaaaaggtaattaaaatactaaggtaaaactatggtgaaactttcttcctccgtttccttttttttttttgccctttttcctttaccataatcaaataaaatagaataattctaaaaactctaaacacttgaaaattgtctttatttgaaaaaaaaaattgataaactattttcttttcttttgaacaaaacaatgcttcaacttaaaagacatgtttggtcagtgagttttagactgaaaatagatatttaagaattcatggtaaaaatgtaatggttttttaaaacaaattcagcatgttttttaaaaaaatttgtagatcgtttttacaaatagctagagacatgaaaataagttgacaacttttatatggtacataaatgcttggtgtctttatgaagaataggttgaaaaaattgttcttcatattcaagttttcaaatagtactttgttcttaataacaacttagaactttttttttttttaaacatcatcaaacaatgttcttagtttctatttttaccataatcaaataatgtagaataattccacaaacctaagtacttaaaattttaacatgcatgaactatttgttactaattctcaacatatgcaggcaaaggaagacaacacaaagcgttgtttaattta

SEQ ID NO: 100511 - DNA, 563 bp, Vitis vinifera
  Intron number 1 from transcript GSVIVT01009096001 (locus G SVIVG01009096001) derived from phytozome v7.0 (chr-ID chr1 8; pos 5000084 to 5000646)
ataaaaacatatttgatttgtcacagaattagagtcaagtaaatcatagaagagtgagcacatacgagaaaaatattagatttgatataggctcagacaagattgcccattttcatggaggagaggaagcttagaaagaagaatttcataagatgattattgctaaaaaatgaagaaaaaatcaaatgcatatccgggctgagaaggctaaagcctaaaatgagcaacctaaatcacagagtgcctcttcactccatctcgaggaccagagcagggcggggagtggttgaaaagcgaaagagaccacaaaccttctttactaggcatacaaaacaaacacatcaaatcccccaaccaaactcgaaagagaaatgattcttattgggatcaaccgaaacaaagaaaaacaagtacagaataatcaaccccttctccaatccccagcatggtctcttgtccaagggtaatgtcgatggacccaacgtctcccttgcttctcttctctttctctttctcttcacacaaaagttaacaaatctctctctgtgctttcttctctccat

SEQ ID NO: 100512 - DNA, 483 bp, Vitis vinifera
  Intron number 2 from transcript GSVIVT01036801001 (locus G SVIVG01036801001) derived from phytozome v7.0 (chr-ID chr1 9; pos 22382860 to 22383342 reverse strand)
ggtgccttttttccttggtgggttttactttaatttttatttatttattttagtgttttgtactcaatcaaagttcattgatgatccgtgattagtatttcttctttcttggtttgaatttaggaattgggaaagtagcaattggggtagatttagaaaattttaatatattttttttcatgaaattaattatattgatatataataattttaaaatagagataaatattaatcattaataaaaaaattaataatttaattatatgaatataaaaaataaatatataatattgatatatatttatttttaaatatttaatagttattaattatatttaataatttaagattatatgttaatataaaaaaagaagtttattttatgaattagaatatttagattatctatccgagatgccgagacggatgagttggatttgatttgtagagggttattgctggtcaagaactgccgagagacaa

SEQ ID NO: 100513 - DNA, 570 bp, Vitis vinifera
  Intron number 1 from transcript GSVIVT01017520001 (locus G SVIVG01017520001) derived from phytozome v7.0 (chr-ID chr9 ; pos 9858785 to 9859354)
tatgtgatataacttaatcatgttataaatatgagaatgtataaaatgggaacttgtgaatcgccatctatattgattcatattgatataaatattgacttctgaaaaaaaaaaaaatctaattaccaaaaataagataaggatatttatttactctatggaccatgatccttcctagaaatttcctgtaaaatcatcactttcaacattcctttattgtagcctaaaacatactaaatcagaaacaattttgaatttatttctttctttttttaagttttttttaaaaaaaaaatacttttagtggtaaacagaataggtttaaaaggagtggaattgcgattggattaggaaaggggaaaacacagtataaaaatagagtgggttttcagttttgttcacatctgatcaaccatgacttacaaagttgcgtcaccgacggagttgctggccgtcaccggatggggaatcagagacataaaactggtgaagaaagcatacgtttggccgtttcaaaaatgcacccgagtcgacctctcgccggtcaactataccttcgaggttcaggcc

SEQ ID NO: 100514 - DNA, 464 bp, Vitis vinifera
  Intron number 1 from transcript GSVIVT01025215001 (locus G SVIVG01025215001) derived from phytozome v7.0 (chr-ID chr6 ; pos 3221435 to 3221898)
cctccactgaaggtgctgaattgcccttaaatcaggtatctaactcttccatattagttatttatttctggtggatttgatttaatcaacaacttgttggtttctttatgtgatcatcaacaaatatgattttatgctttctctttatctaccctttctggactgtgtacttaatagtttctctatcattgttagatggtgtcagtattgagttgctgggatttattttggagatcctaaagtggtagtcccaggacaggtgtccattaatatgtttttctttgaatgtccaattatattgttttctctagatttgcttctcatatttttgggaggggattgtctggatgtctattgatgcaattatttcttgagaatttctgaaggaatgtggaaaatcaaatgctttgagctgcccagattgttcctgatgatttcctacttggccaggcacttcaagctga

SEQ ID NO: 100515 - DNA, 624 bp, Vitis vinifera
  Intron number 2 from transcript GSVIVT01036690001 (locus G SVIVG01036690001) derived from phytozome v7.0 (chr-ID chr1 9; pos 23830132 to 23830755)
caacccaacaagcatttttctgaagaagctgcccggttagtacctttccacttcattttgtttatcactttattccctttcttcccctttggaatgtctggttcagtttttgtacttgcatatgctttatacataccttttgatgagcactatgataaaggttatccagatcatttaggtataattcggaatctgacaaattagtttcagaaccaggagaggattagcaaaattgattactttaagatgcccaacttttcccatcaaaagcacacttcttatattcaccatttagaagcctatttatcatataccaattagccatataggagcataaattttatgtatttccttttcatattggtctactagtgttctatctcccttttcccaaccaccatcaccaccagttgacaaacataaacaaaaagaattgggctgcatttggcttcaaagaatttgatttcatctgatattccaactctatttggattcggcaattttggttttacagaggaaatgtcttgatgtctcttctatcagctaagttgagtttcttatgaagttccttgagattaacagatagaatcacttatgtttcttggttcaactttggtaggtttt

SEQ ID NO: 100516 - DNA, 973 bp, Vitis vinifera
  Intron number 1 from transcript GSVIVT01027072001 (locus G SVIVG01027072001) derived from phytozome v7.0 (chr-ID chr1 5; pos 18168959 to 18169931 reverse strand)
ccacttcaccacttcccttctccccccacttccaggttagggttttccctgtttacacctacttctggactctggattggcggttttggttttgtttttatttttatttttccattttttctttcattttcttgcaattgcttggttcctagagtgatttaggttcgctgtaggatttgtggggtttcatggaatagaaaccctaatctcaaaaccgcagttgctggaactgaatttgaatgatagtgggcctcaagtttacaaataagcaataattatggattacacaggattggggttccagttccagtccaattctggctgcccactgctgcttaggaccttctatgggggcaaagctgctgttttgtgtggttaatgttgttaggaagggaaataaggctattaggtcaatgctatttggagtgtatgctggctagttggattagggcttcttataatagagcttttctctgggggtcttggagtgcattagaagatgctctaaaagataagtcgagaagactaattgtaaccctttaggcaaatgactgaacagttatatttggcaaaccatttctaagtttctccaccaagtccacttggtgcttctatctgaataactcattgtaacttcgtggctgatttaaactattttgtataatcggccatgcaaaaaaaaaaaaagtgtgcataacatcctattagcttgattatgatccaagtgtatagctttgcattttggatcaagttttatgggtgctcttttgttcaaaggatctttgtgattgttgttgttacatatattgagatgagtttactgcttctatgtccctaaacctatatgttctttgttgggtttttggctattcaagactccttgtgaatgtggttggttttagtggagcttactgtatatagtttttcaatattgctagggaagagcttgtgaaggagtgtttacaaaagggca

SEQ ID NO: 100517 - DNA, 823 bp, Vitis vinifera
  Intron number 2 from transcript GSVIVT01022739001 (locus G SVIVG01022739001) derived from phytozome v7.0 (chr-ID chr2 ; pos 15864435 to 15865257 reverse strand)
ttgtattttcttaatctaataaacaacatcttattgtttatgcaatttgaaatacattaacaggcttacctttgcttagtattttgttttattgaaaccaaatgcaaaactaaactcccatagaactaatattttgagttaggatatttcattctttcgagcttaactgatgttaaatttggtccttttcctttttcttcaaaatcttcgtattacttgtttagggtttaaacaatttaaatttggattcaatacagatatccccggttccattatttttttttccacttatttaatgtttaaatgatgttcttagtgttgtaatgcttaaggtttaatgcacctgtcagggtgcccaattggttggggcgaatgcggggatgtgtgatagtggtgcacagtcccaggttcgattcctgcccctggttgaatgcactggattactaagtgctggttctgtgggcacagccaacacattgaggtttgggtgcccatggagagtcctaaggactcaaccatggaaggtttcttggttgtcaaataaaaaaaattaaaaaaattagaaaaagaagcttagagttgaatgcagtttagaattcaattttttatccaaagagtacatattcacatttgccttttatatttgcttcacaaattagagtttgtgaagttcaaattaaatctgttggctcaagagtatgtttttagggtttttttcttttcttttttttttttttcttttttttctgttatgcattctgatctatttatgttttattggttgatagtttgtctgaagttgaatcatcaagaggcaaaaagc

SEQ ID NO: 100518 - DNA, 829 bp, Vitis vinifera
  Intron number 1 from transcript GSVIVT01022739001 (locus G SVIVG01022739001) derived from phytozome v7.0 (chr-ID chr2 ; pos 15865274 to 15866102 reverse strand)
gacaaactcttcactgcccccaaattcaaatctacgttaaccaggttgcaacctgggacctcaaattccttggagaaataccgtcattttcttttctttccttttctcttgctttttctcagtaaccaatcatgggttgatatttttccccaaattttcgaatagtagagttggattttccattttttgttgggttaattgaatccaaatccaaactaagctaaaaactgatgtttttgaattggtatatttcgttttccttttattttcgttcatttttccggcaaccaaacggaggttaagattggtacttttcgtcgttgtacaaatctatcttgtttcttgtttagggtttatgcaatttgaattgaaataatagagttgtgtttgccttgtttgtttggttaatagatttttttttttttttatttgtttctgtatgatttcgcccattttctgagcagctaaatggagattgcgtttcgtcctttttaattgcaaatcttcttggttttttctttagggtttatgcaatttgaattggaacaaaaactaatacgttatctgttgtttggttaattggaattaaatcacaaccaaggtcccctagaactaaaattttcgaatcagaatattgcattttcttttatttcccattttctaaatcttcttgtttcttgtttagggtttatgcaatttgaattggattcaatatagacgctctgttttttccccttattttaatgtcttaattcattttaatgttctttgaattgtgatgcttagggtttatccaatttggacaatcatatttttagccaaacagctc

SEQ ID NO: 100519 - DNA, 565 bp, Vitis vinifera
  Intron number 2 from transcript GSVIVT01030042001 (locus G SVIVG01030042001) derived from phytozome v7.0 (chr-ID chr1 2; pos 9082300 to 9082864)
aaaaggtatttgttgttgggtatttgaatttatactgggtcgcttttctgttctgtttgaatatcagtacgaactgtgtactggatcactttaatcactaattcactaaatcttttctgtcataatgtttgtggatttatgggaaaaaagatttatcaacaacaaatactaagtctttaacccaattgtcaggacccaacattgggtatgaactttgaatgaagattcatttgataaggaagtagcttgggtaatgggtttattttctatacattttatatgtaaaatgttgggcccaaattttgcataatatgcacttggctttcatgtccagatccttgatttctgcagttcaatcagagggttatttgtggtatactgttcatgtacggtaatctaggagaacaatatgaagtactgcagagtatcttttggctgtgatttatggtttatcatattgttatagtaagtgttcatagtttgctgcacacagcgtttgtttttgtatattgtttgttaattatgattttcggaacatctttacagctggaggtgattggtattg

SEQ ID NO: 100520 - DNA, 479 bp, Vitis vinifera
  Intron number 1 from transcript GSVIVT01038619001 (locus G SVIVG01038619001) derived from phytozome v7.0 (chr-ID chr1 6; pos 21439973 to 21440451)
ccttgaaggaggagaaacagtctttactcacacaggtaaccttactgatccttggttaaattgtgaagcttaattcagtcttgttttgtacttcgaagaggatgtcaggttgaactcccgttgagctcaaagggtttaagggctcgcagtgatgatttaagggagcagcgacgctagaaatttttttattcgttgaactacgagtctgtttctattgtacttttaatccttttataatatagagttcattacaaagagaaaaattagagtgcgactataactgggaggaaaggaaaagcctaattcttctctttcatttgatttgtgaattcttgtgagttggtctactatgtggactagggatcacattgaccatccaaccgggttaaaaatcttgtccttttttattgtgtacttcttaaggtcataatcatcttcattggctttgaattcaacagttgcagaagctgggtgatctg

SEQ ID NO: 100521 - DNA, 786 bp, Vitis vinifera
  Intron number 1 from transcript GSVIVT01010248001 (locus G SVIVG01010248001) derived from phytozome v7.0 (chr-ID chr1 ; pos 18309000 to 18309785)
attctggtgctgttgtgagtgttaattccacttattgttcctggtttattgtgtgatggaactgaagtttgagtttctatttttgttcttgtgcggttagtatgtttcagttaagtgctttttggtgctgagttttatgtgccattggggatatttgaatttctatttttattgttgaatttgagtgccaagatatccgtaacccagttttcgagaagaaggaaataatgtgtgaaaaatgggtttatagttttgaatctgtctgttcaagcaatgtggatttcaattttgtcctcattatttgatgtatttgaatttaaagaaaaaatttctcgtaacttgctgaattatgacactagaaagttggtattggtttgatcatacttcctgataataatccaagtgcctgtgggttatacctggaacctcaggctggatggcaacctgccattggctgtcacagtgctagattgctagctaagtttctttttggaatcgccttgtacatgtgaagtaatctctgcagccatgaaaatgtgcaatgtgagagcttgtgcaatgttttgcacacatttttagaggctgtgttgtctatgtttccatagagaagatagtgacaccagcattggagccgataattatgactcataatttctttgtgtgtatgttttctttctatttgtttttccttgtttttcatgatgaagttctatttggaatgtattgtttgttttgcacttaaataaaataattggttccaaataatttttattcttccaggactgc

SEQ ID NO: 100522 - DNA, 903 bp, Vitis vinifera
  Intron number 1 from transcript GSVIVT01031186001 (locus G SVIVG01031186001) derived from phytozome v7.0 (chr-ID chr1 4; pos 1390171 to 1391073 reverse strand)
ctagaagaagagaaatttaaggagtccgtacacaagtgagtatcttcgtgtgtcagcttgaattttttggatggagattgtgtattgtggagctcgggctaattatattgttgattaattgattcttgattgtaagcagaggaattggaaggggaaatattaatgaaaattggaaatttcattttgttagctacaattttggtagtaaatgttttgattttgtgtaaatgttgggtttttcaaccaggccacagaaatgcccttatgctttgtgaaaaatcataggcatgccattgtatctgtttgggaagcccttcccgggaagtgatggcattgcttttcgacaagctacaatgcaaaaatgctcattttgtaaaaaataaataaataaataattacacatcatgtttttgttttataagcaatcgggagagtcagagggattatcatttgcttttgtatactcttggtcgtaattctagtatagtgggtcctactgggttcatgagacaattttaatttttgttattttatagggacattttatttatatttgtattgttttgttcagtggaggtttgtgagacatctatctagattcaaaatctcagcttaggctgttgttgagaaaatgtagaaaatgaaaagagatcaagatattgagacaaaggttattaggtttaaaaaaaaaaaaaaactgggatgaatacaacatttaagcttatttgagttgcatttttcaattttaagaagcaaaaaataagaaggcatctttttttttttttcttcttttccaatttacactttcttggaagtttggtgtagttaattaatcttaatttgaacggaaattattttttggtgttttgtaggcttgagaaagagtcagggtttttcttcaat

SEQ ID NO: 100523 - DNA, 1003 bp, Vitis vinifera
  Intron number 1 from transcript GSVIVT01005730001 (locus G SVIVG01005730001) derived from phytozome v7.0 (chr-ID chr7 ; pos 13892096 to 13893098 reverse strand)
agttcagctctacagcagcaccagactggacccaagtaagtttatttcaagccagtttctagtttgtagatactgtgtttatcaaagtcaaaaaacccttcctccatcaactaatgtggtaagcacattttaaaatcgatgaaacaacaatgatcattaacattaacaagagaaatgatgctacttcgtctaaagacaattgacgatttcaaatgaaacgatatggagaaagtcttatgatataggcatggaatcaaatgtacattattactctacatctttcccattttctcatgggtagcctagatttgaatgagttccatcttaatgtgttgaggctttgaaaattaagaccaatttttcttctgcctacttggacctaccatagtttcagggaaactttgctttcacataaagtatttatagaccacaactaatttcttgtagttctccaatttgaaatgttttatgattttaacatgattcttcttctaatcattttcaatttgttacactattgttttaagtcagtggctgtgtcaaccaacaggtgaaacaggaacaccttttatggttcaaattctagatttgatttagcaacacacatgaagtaggatcgaggactcaaacataggtgtaggattcaaactaccaacataaaaatcgtagtatgattgtattcttatcatgcacaaaatgatttcatattgagaagtttggagttcaaaagaaaggttttatcaactcggtctagactcatttccagagtcttatatgaaggctggcaggtttttatagttgcacttcatacaaaagcagtcgctggtaggtcatgtagcaaaactgcataaattgttctgtttgataccaacttgcttgaaaaacagatgagaaaaccttaaaacattattttcaatttgatacataacatcaaactgctgctgacaaccttttgtatttcatccaagatactggaaaagggaagctaagcgagaaagcatac

SEQ ID NO: 100524 - DNA, 1040 bp, Vitis vinifera
  Intron number 2 from transcript GSVIVT01025808001 (locus G SVIVG01025808001) derived from phytozome v7.0 (chr-ID chr8 ; pos 11641814 to 11642853)
ggacttgcccatctttcttcttgctgaccgaggaagtcagtttttgattattttcctgttttttcctagaatattatcatttttttttttcgcttgaaaatgatttggattttttttctttaattttgttttacatataattaatattccgtatcttagaaaaattacatggcattaaatctcaagaagaagcaattcatttaagttccatacccttcaatttgaattgcaatttagttgcttctcgtacagaaattactgccattagtctcaaaatttcaatgttttaagttgtatttgttccctattttcaaaaataatgttgaaaagtaatttttgaacataatttttgaaaactatctttatattttgtaaaataaatgtttgtttcacatttgaaatgtttttggtttattttctatatttctaaatataatttataaattttttttaccgaatttttttttaattgtgtttcatatttatataactgtctttttataataatagttacaaaataagtaaaatcaatcaaaaccagttaaaaaatattctttaaaaatatcatatttttaatttttaaaaacaaaaaaccattatgtcttcccattgttaatttttttttatatggattgaaaaattgtttttcaaaacaattaccaaatagtgctttaattgttaatcattatccgaaatacaaaaatttaagtatctcaatatatagcaaatttaataaaatacttttcaaaatgatcaagattttcattatgttgtataatttgaataattttactaagtcaactcaaggccttctatctatatcatgaaaaataaatcacaaactatcccttagattggagatccttttatccctttaattttcacaaatattttcttttcatatgtcttcttccctgtaatgaagaaaaataggagctcaatggacagttatgtcctcctctaatgtgtacccattaacatggacccagggtattaagggaaataaattattttgcagattgttactttgcgctgaaggt

SEQ ID NO: 100525 - DNA, 329 bp, Vitis vinifera
  Intron number 2 from transcript GSVIVT01035143001 (locus G SVIVG01035143001) derived from phytozome v7.0 (chr-ID chr5 ; pos 1836721 to 1837049 reverse strand)
gtgcagtaagaagatacggctgagccataaggtggtgaatatttcttttattttttttatttttttatttttaaagcagtgttaaggttgatgatttgatcggttctcgtgattttgttttctttgataaaaatttatattattgaaatttttgtagaagatgaaaactggcataaacagtgttcatttgaacctttagtttctctcgatgtgtatttgcctatgtcaaaatattgatagtgttattgtttagggctccattcatgaagcaattgtgtttttatcattttgattggaaatgcaattcaatttacagattcagctagaat

SEQ ID NO: 100526 - DNA, 624 bp, Vitis vinifera
  Intron number 1 from transcript GSVIVT01013134001 (locus G SVIVG01013134001) derived from phytozome v7.0 (chr-ID chr2 ; pos 7852757 to 7853380)
aattcatcttcaccagccccaaacccagagagaaggtaaaccaacgaatgaatacgattccatttttattgcaagatcgctcctcattctccctgtttgcttgctgacaaaacttaagtcagatggctataatgattgaattgcattaggctaaatgtgtggaacgtatggcaattcagttttcttttcatttctaaaggagaattttgatttcgttgcaaaatcattgatgactttgtgtttgtttaaattaaatgcgttaattaaattgcattaggcaaagtgaatggaattttttttttttttctcggggattaaaattcgggattttgatttcttttttcttttttccttgtttacttttctcggcaatcgaacagacctttgtaggaaaagaagtttgtaattcgattttccttttttggattgtaggtgacaagaatttaagcttcagaagtctttatttttatttttcctttttcctggatcatttggagctaaatggagtgtgattgtgcctttggtttggtgatgaggatgataatatttatttatttgttcttccttttttgggtttctgaaatttcagagtgaagaattgaaactacggttgaggaagcttgc

SEQ ID NO: 100527 - DNA, 419 bp, Vitis vinifera
  Intron number 1 from transcript GSVIVT01021485001 (locus G SVIVG01021485001) derived from phytozome v7.0 (chr-ID chr1 0; pos 6053011 to 6053429)
ctcttcgcctacatcttccacagacaaagttcaggtttcgtattttataaaattttctctttttttttttttttctctatatcgcttctttagaattctatgcaaaaactttctgggtagatttgtttttgaattataacatgcaggcttcctttttatttatttatttatttatttatttttattttttattttgtaacctggaaaaatcagttttatcccttctcctcccgtttcttcttctgcttctgcaattgtctgcatgccttctctgtaaaattggagttggtcttgttttaaactatgggaaacaatgatctcgatatttctatacttgatagtatatggttaatggataagaatgttactgcatgagctgaagtgatgatgatgtttatatatataaacaaaaatgcagt

SEQ ID NO: 100528 - DNA, 814 bp, Vitis vinifera
  Intron number 2 from transcript GSVIVT01037884001 (locus G SVIVG01037884001) derived from phytozome v7.0 (chr-ID chr3 ; pos 6773761 to 6774574)
ctttgcctcacctgagcatcaaggacactcccattgtgagtatccctccctctatttgcttgaggtttttctttatgatttttttatttattttcaactccagtgtgatcattgaagtgagacagcaattcgatgttttgatttaggagagcagagtgtttgtttatgagcgttctttatcttttctctttatttgtacacatggtttggaatgcttcaaattaatcttttctcttttggtagttgtgatttacatttaagattttccattttctaacgtttcttgatttttttctcgtttggttgatgatggagggggaggaaaagaaaaaggaaaagaaaaagaaaatgaaaatttagtcttgaattttacgtatgaaaaaaagatctttctatcgagcccgattgggcggagggtttttttttttttcccctgttttgactgtttcaaacacctaaaaaattatcataattttgttttatttttctacattttttatgattagctaaatcactaagatctttgcagcataaacttttataactttcatttagatccatgagcttgtatattttttgcttttagatttttttttttcaaatttaaatattttttttggctggatgtgtggggatgaaaatgggatgttggttgctgagattcagttgatccgagggcttgaaattattttcttcaattggcagcgttcaactttatattgtctgtagctgagtgaaattaccctgaatttttgtctgctttgtgggtgttattgtaggaaacttcttctgcccagtacatattgcagcaata

SEQ ID NO: 100529 - DNA, 433 bp, Vitis vinifera
  Intron number 2 from transcript GSVIVT01016699001 (locus G SVIVG01016699001) derived from phytozome v7.0 (chr-ID chr9 ; pos 453166 to 453598)
caacaaggaaaggtactttttgatttcagtttgttttcttagcgtagaaaaactagtgtcagtttattgataaaaaaatgataataggtttctgtttgcaaaaacagaaaaataaaattgatcgagaaaaggtgttttgtaatacaatttcacaaaattttctgaaaaaatctgtcaaaaatacttttttttttttttatgttttaaagaatgaagatgttgattgttttgattttgtctaaaccggaaacatttctaaaaacatagtcagagcctatcattttttgagaatttctggtcagtctgcgaaatcactcatcattaagaaaaagaatcatgacgggaagtggaattgcctttttgtttctttgtaaagttcatatgcatgactgttattcttgttcttttttattcttcaccatgtagctctcac

SEQ ID NO: 100530 - DNA, 786 bp, Vitis vinifera
  Intron number 1 from transcript GSVIVT01021909001 (locus G SVIVG01021909001) derived from phytozome v7.0 (chr-ID chr1 4; pos 5734839 to 5735624)
gagacagcaggtacaagctcaattttcttctcttcattacaacttctatctttgggagcttagaataatcaaggtactgtttttgtgttgttgagaagagaatgaataacttgtaaaaaggctccacagttgtatcgttcctttatcagttgattaacattggctagaccgtaaagattcatttttatgaataagattttttatcacatgattaactttggctagacagtaaaagaaaattgtggcaccctatattatttttatgtttgttttcatttgatgatactctcaacttgcaagctgttttgaatgttttggagttaattcaataacctctaattctgctgcatctcaacttggtcaaaccagttgcttcttaaatttgctttaagatgaatttcacggaggattatttgagatggcttaacttctgaatgtaatggtgaaattattgttggctatagcagcttgtttctcacagagtttctaggtttgctgcttgatttgtttggggttttgatagcagttcatagcctgctgattgactatgatctagaaacaggcccaatggatggacttagttgatcttaggtcactaatttaactttcactttgcttttacccatactagttcatggtatagtttgcttgcattcttagatttgaagagaacacacaagccagctaattcttgtatgtcaccctgtttttgcttaactatatatctaggactctcacttggcccctaggtcctgaagttttgaattctatctcatgtagggcagt

SEQ ID NO: 100531 - DNA, 650 bp, Vitis vinifera
  Intron number 1 from transcript GSVIVT01015292001 (locus G SVIVG01015292001) derived from phytozome v7.0 (chr-ID chr1 1; pos 2446734 to 2447383)
atttccatataagaagaagtttcgaattagagaaagtatgtgatcttctttttcggaattttatcgttgtcttttgtttgttattatcgttaaaataatgttattgatccgtaaattcataaatgtttttagaggaatgtgatcaaggttttttttttattatatttaatttgattttgatggtccaatcaaagttcaattattttttcgatcaaacttcttaattatatttttcaatcactttaaattattatttctagatttctataattctttatagattaacatagaaagaaagtaaggatgaaggtggtgtaaaaataggaaacaatgaggtaaaattgaatgaacattatgttatctttgtgtttgttttcatatttccatatttgtgtttattgctttaaattatgtttggtttctaagaaaacgaaagaaagaaaaaattttaaaatcaataaatcatttttatatattttttaaaacttattttatttattataaagattaaataattttaaaatatataaatttttaattagtttaaattatatttcattttctttcatatttttcttaatattttctagaagcaaaacattaatgggacgtttgggataattttcattttgcattgcaggtgttgtggg

SEQ ID NO: 100532 - DNA, 203 bp, Vitis vinifera
  Intron number 2 from transcript GSVIVT01015292001 (locus G SVIVG01015292001) derived from phytozome v7.0 (chr-ID chr1 1; pos 2447417 to 2447619)
ggaagagggaagagattattgaaaagctacgtgtggtgagttgcttagtttattaggctcattttaatttatttggaatttttttggttttgttcggaaattaatttgaagaaaagaaaatggatgtaaaattaattttttgtttttggttttttgatgatatgacaggttgtgaagagctgggtgaagcaagtaactcggtg

SEQ ID NO: 100533 - DNA, 408 bp, Vitis vinifera
  Intron number 1 from transcript GSVIVT01023490001 (locus G SVIVG01023490001) derived from phytozome v7.0 (chr-ID chr1 4; pos 11049783 to 11050190 reverse strand)
gacttgttgtttgcacagacagtgcggtatgaacatctactttagactattttggactactattctgataaaaaaaaataattggactactatgactttaaacttgctttgtttgtcttaaaaatattggttaatgcatagtaatcatctttattgctgaaagcaaggatgaaggacttgtatttaaaaaattctatgatatttagagcacaaaaattttcacataacttgacatcagtatcgagaagtacaaggttacagcagtggggcttttgagtcttttggtgcatgtactgggttgggtttagtcttatttgtgcatcaaaatatatctagatttaaatcttcttcatgtgttataagctagcaatgttctattccttactggaggtttcctttatcaggttt

SEQ ID NO: 100534 - DNA, 718 bp, Vitis vinifera
  Intron number 1 from transcript GSVIVT01013101001 (locus G SVIVG01013101001) derived from phytozome v7.0 (chr-ID chr2 ; pos 8280837 to 8281554)
ccgccgtcgacagtaaggtcagagttagggttgcattttttttttctctcctttgatttcgctctccacgagctgttttgggttacgagacatcattttttcttttaaatttatttatttattggtctagccatctcaatcacagaaacacctagaaggcttacgcctcaagctccggcgcgttgaaggcgcattggaagcatgcctcgcctttaattgctctttgattgttttgtgatgtttttcccattccagttatttgcactttgattgttttatgaacctcttgattttatttttttgagagtttaatggatcatggggacaactgtactctggctgaggttaatgcatgaatcctttgaagatatcactttctacgatttgtatttatacctaatgtttctatgttcttctgcctttagaaacatgcaacactgggtaatttgcaaattttattttctgtttacaaaagaggatcaaattttcttttttttccttttctattctctttatgtttgttgactaccaaacaagccctatgagcgcccaaattaattgagtgttaggcataaaacccgtccacattaatttcttgcaagcacttacttcggtcttcttcaaaatatatatatatatatatatatatatatatatatatatttttgctgcagttattgtctcattcttactttcttttcttggtttcagctaccat

SEQ ID NO: 100535 - DNA, 407 bp, Vitis vinifera
  Intron number 3 from transcript GSVIVT01025071001 (locus G SVIVG01025071001) derived from phytozome v7.0 (chr-ID chr6 ; pos 4785934 to 4786340 reverse strand)
ttcgataaggttttgtttgctatcttattttcttttccatctgtttggttgtgaaaaaagtgcaagaagaaaagaaaatgacgtggctgaatcttgggtatttgattgatttgttgtaaaagaaaataaaattaagaactgcttttgattaagccaaagggttgacttagactgagtttggaacccaaacgaaaaatggagctgactcaaaatttaaaattttctttctagcctacacttgcttagtaaccaaacagaatccaagctctactgatatctttgagtgaactggaactttatggataacataaaattattctaattgaattatctatcctcgtgatgacaacaatgttgaataattctgtgtaggtctttggtccaacatcccaacaaaaggacttgta

SEQ ID NO: 100536 - DNA, 574 bp, Vitis vinifera
  Intron number 2 from transcript GSVIVT01025739001 (locus G SVIVG01025739001) derived from phytozome v7.0 (chr-ID chr8 ; pos 12397950 to 12398523 reverse strand)
ccggatctcaaggggccgcgtgagtcttttattctcttcaccatttagtatcttttctttaattcatgtaaagctgaattgttcgtgggtgggagttttcagttttgagggctttgcctagtttggtaaaaccccttgaattgtgtttttttctcataattgtagaaactgctgaaattggtggtttatttagtattagtttgtttcttgaagttgtggggtccaaaaacgatgatattgcttctgcaaaacgtgaaaaatttatgtttttattgagtcggttttgattatgattgtgagtattgtgataatggggttttatattatatcctttgcacttcaattaggcatgctactgatagttgatactgccctagaagtcttagatatggaattcttaatattagtccttttggccatatttagtcttacaattttgttctgagtggttgagcttaaattgcttaatgttatgctaatggttatgcgtttctgcttgttgctctttatcaatttaagtgaccataagttctcaacagtaacaggaagaagaaaagaggtcaacgggcagttg

SEQ ID NO: 100537 - DNA, 683 bp, Vitis vinifera
  Intron number 1 from transcript GSVIVT01020389001 (locus G SVIVG01020389001) derived from phytozome v7.0 (chr-ID chr1 9; pos 20226161 to 20226843)
tacgatccctgggatcttccaagtaagtttttctagtttgatttttcttttccgttcatattttcttatgatttttaagacagttctttacaagcataggctctcttttgacttaggatttgggagatttagtaaagtctgaagcaactagctccttattcataaaaagttcaagggtttgttcttctaatttgcatgataaaacagttaagaatacagctaccactattgtatcattctaggccatgcatgttgtagaaagaaacccttgcttggttttgtaatccacttgtaaacagtccattttaggctttgagaggagttgattaagagttccattttaagagggcttcataagaagaggttactcttttgaatgatgaacaggaatgcatcgggtttgtcttatttagctttaaattatttgtcggtttttcccaaacaatattggtgattaacagatcagaactatgcggatatataccaattagatcctctttaatgagatttagaaagagaaaattacaattttggatcttgcaattggactcattttgtggtcaatcctctattttatgttcagttcttgtataccgatgataaatcatgtctcatatgaaacttttgtaaatatgcagcgaatagtagtgttacagacaaggagtggtatttcttttgcaaaa

SEQ ID NO: 100538 - DNA, 1049 bp, Vitis vinifera
  Intron number 2 from transcript GSVIVT01028453001 (locus G SVIVG01028453001) derived from phytozome v7.0 (chr-ID chr7 ; pos 7804780 to 7805828 reverse strand)
cttatacttggagtggcaaggtatatacatatatttgtgtagattttgattgataccattcttttttctttttttctgtgatgatggtttgtttgggttgttgtgatgaataggaactagggatttttgttttttttatttcgtgaatttgtggagtaatttttggtgtttttgattaggtgagattgagtttgtcgatgaattttggtggaaggcttggattttagggcattctggggaaatgcattttggatcaggggtttgtatggaaaggtgcttatctagaatcaaatacctgaagccattggagggcatttgtttttcactgtgaagatctgcagatttcttgcgttcttaaggttgaaattgttggaactaggatgttatcctagtggcccatttttgaaacgtgctttctgtttttaaaagtataaagaaagaaacaatgtgggagaatgcaggttgctttatgcttgttttggataacagaatctgagtaaagaaccaaaaaggaaatcattgaaaacctaaatttggaaatctaaccctcgatccttttttggcctctttttgataaaaatgcttcttgtaattcttttaaaacctacatataaataattgaaacggtaaaggacatttatgtcaaaaatgggttacttttcaaataaaaacatgagagatgcttgatttacaaattatgagattatttcattccttttaatcaattaattctatttattatgtggtaaattatgttgggccaatttcatgggacctgtgttgcaatatctgttccacatgaaaagaggcttcattaagtggagtgggtaaatagtctctgatggtgctgtaagaaattggcaatattgtgcatgacatgtgtctttctatctgcatttgcctgcagcactgatatccatattctgtctaatctggttttgtattttctgttcttcttttgtgatgtcttagcttctgtacagtgatataagattgacttcttttgctttgcaggatcctgagggtctctttccgtgtattcttgggca

SEQ ID NO: 100539 - DNA, 889 bp, Vitis vinifera
  Intron number 2 from transcript GSVIVT01020122001 (locus G SVIVG01020122001) derived from phytozome v7.0 (chr-ID chr1 ; pos 10141329 to 10142217)
gctctgtattaccggcggcaatttcccctcagttggtgtgtctccttttcttcactgctctcgcctttttttaaatttttttcctcatcacgcctagaatttcatgagaacggactcattatagtggttttttcttcatatttctggagaaatccatacttttgtacttattcgaggatgcatttgattgttgaacgcatatcaatacggtccatcttgttttccattgcacttaaggtgaaaattcatcttcttgccatatctattatcttctgtcaaagcctgaatttcatcatggattcctgcgttttgagtaccccgtaaaacatgacgggattgagaaaattcctaaaatctccaaaggcctttaagtacataggatcaacaaataaggactgaagaaacaagctgaagcaatattatgtaatacctgatttagagatttgggggtttttgtaattaattttaatggaattctttaaggcaattttggaaataatattgaggtcctctagatatatcttgtgtaatttatctcatccgatgcacttctgctacaggttttgtttctgtctgttcaggattctttggttgctaatttcatttttggctgggaggttaatttgacatcatgctagtttttgttatgcttctgtttgcttatgttgggttctgtataatgactcttttgaaccgtgcttcttgtatttggtttatgtggagaatctgttattttcctatcaaatatctctgttctgtcatattctacttcaaaatgttaccacaagttagttttggatgcctttttatcttcccaagtagcagctagttgttttctataaaccttttttcccccttgtctggggtttgcaggtgtcctttgcagttg

SEQ ID NO: 100540 - DNA, 794 bp, Vitis vinifera
  Intron number 1 from transcript GSVIVT01002945001 (locus G SVIVG01002945001) derived from phytozome v7.0 (chr-ID chrU n; pos 37297994 to 37298787)
attgcttcattttattagtagagacccatttagggacttagaggggtgctacggttcataccgtaccttcctgataagtaacctgacccccggacccgatccggtttttcacagaccaccttttccaaaacaaggagtcacacttagggtttttctttcttattttgtttaccctttaaaaataaaacaaaaataagtggcgactccaagtcattcttttaaccaataaaaatcatctttcaaatcaaaatcgagctcgccatcgagtgggaaacgcattgagccgaaatgcggggtccacagggatattaatggttttggaaacctaagtgtataaaatatgagatgtcactgttaattggtaaaataatatccaaaacatgcattatgtcctgtttacttttcttcttcccagattgcccctaaatttctccatgtcatcagcaaattatcccatgtcagcagagcacaaagaaacccgacccgagaaccaggaatctctctctcttcccgtcattttgccctaaccccatctcaggaaattcccaatttctaaatttctcatcttcttcccacaagcccctcgttgaatttgctagctacctcttcatgtcgcggcatttcgttcgacaacccttcaatcaaatctttctcatatttcagatatgtgggttttcaaagccatatatcttccatagcagcctgcaatcacaactttccctttttaatacgcctgcttcacttgctccaattttaaagtgcccaaaaaaattttcacttgcgtaatttcctca

SEQ ID NO: 100541 - DNA, 395 bp, Vitis vinifera
  Intron number 1 from transcript GSVIVT01006254001 (locus G SVIVG01006254001) derived from phytozome v7.0 (chr-ID chrU n; pos 24107059 to 24107453 reverse strand)
agtttcacagcccaaggaacctcctcttggctctggtaaagcatccttcacaccttaaataattccatttttttttccttctttggttattctgatttccgagattcccacccacatactttattttccttcatattctctctgttttctggttagatttattcttgtgcttgggaatctccattatgatcagtttctttccattttctcttcacatgctttgatataccacaaaaactgttttggaaaggcctaagtccgtaacacaaaactgttctgacagatcaaaagattaacaaaaatgttgggttttgttccattttgtgagattctgatgatgtgggatgaaatgaagcacaggtgggggaagtaggggagctgtcagagatatttca

SEQ ID NO: 100542 - DNA, 654 bp, Vitis vinifera
  Intron number 2 from transcript GSVIVT01003286001 (locus G SVIVG01003286001) derived from phytozome v7.0 (chr-ID chr7 ; pos 14140143 to 14140796)
aacttcaggtacccatccatactcataacaccaatatatctatattataaaagaaattatatacaaaatatatcccacatcaatagtttatttctgcagtatgaacaccacaaaatgcaacaaacagaccgggagtccacctgggagaatatccatgtggaaacttacagaagataaaatttctgcatctcttacatatttgtcttctgtatggattatggttgactcctttacaataatggtttttacatttactaatactgccagtttatttccaatcacattataccccatcatggcaagggtgttggtttcataatttatattgtaaaataaggtcattctagtgactaagatgatgtgactatgcaaatgtaccctgatgaggtgccatgattggtaacgagtccactatcacaatgattgagtgatggcagtcattgctgatatggtttggatatttgaatttttttttttcaattgttttccattagattctctgtggtattgaatgtctgtattttgtcttgtctgcagaagaaacatttcctttatccatgtgaagtttattcaattgcatctgtttttcctttttctcaagaaaatatttttcatacagactgatacatcaattgctatagaaacgaaatctat

SEQ ID NO: 100543 - DNA, 730 bp, Vitis vinifera
  Intron number 2 from transcript GSVIVT01029307001 (locus G SVIVG01029307001) derived from phytozome v7.0 (chr-ID chr1 1; pos 17158091 to 17158820 reverse strand)
aggaaaggcctgactttgttgcctttacaggtacttgttctgtttgttttgggagaaaacagtttcctggaaaattttcgccattatcgatgctttcaccatgcagttctcctattcatgaaattataatcgattaatttctgggtttaattctctttcttcgcttttctcatccattttcagaatacataaagtaaattttcagaaacaatttctattcaaaatttctaagtgactcacccatcctaaaactcttggaatgatcattgggaaagactttgatatgaatagaaccttgaaagatagtgtgttggatcatgtaggcatttcattgcatagacttcaatcaaaagtgtagatatgagctcttgttttgagccaggaatcataacaatctgtgtctttggcaatgtcgggacaaaacttactagaatttgtaatctaggaaacctcctgagaaaaatgtgcataagagtgaagtaaataagagtaaagagatcagcagaattagcagatagttctgaatctctatgagcttgtttgatgttaataagagtgactaagggaaacagtcacatgtctaaatctgttgaaacttaaccctctctctctggagtttttggttaatgagaccttcgtctgttaagattctttctgttcttctctgaaaagattaatctgtggtcatttcttgtactaggggataatatatttggaacgagtgctgctg

SEQ ID NO: 100544 - DNA, 643 bp, Vitis vinifera
  Intron number 1 from transcript GSVIVT01009204001 (locus G SVIVG01009204001) derived from phytozome v7.0 (chr-ID chr1 8; pos 6224197 to 6224839 reverse strand)
ggatttgaggatcatcactcaagcctcactacttggttcgactctttctctctttctctctttctctccttccttccttccttccttccttccctccttattcgtgcacttacatattcatgcatttatatcttttatctatcaaagccctagaagaatctacatcatgattccctgaatgattcctctgctgttactgtattagggttttgatttgtgttgatcctgtatttccatctcaattatttaattttgtttcttccctttttttccttaaaatttagggtttttgaatcagttgtttatgttccttcactgggttccgtttggtggcccaaaaaatctaggaaaacaaagggatcaggactttgtatcctgaagaatccccactcaactgagcgtaatggcactactgtatttggcagagtggttcaagaaacccgagagagagagagatccacacacacacaaaagataagactcaaaaccttgatttccgttattttccttcatttctctgctaccaaatggaagttttggctgattcctagttttcttgatgaaatgtttatgtactttccatgaggatgtacttggtttgaatgcagaaggaagcctttattttaagtcatcttcattgtca

SEQ ID NO: 100545 - DNA, 591 bp, Vitis vinifera
  Intron number 1 from transcript GSVIVT01017600001 (locus G SVIVG01017600001) derived from phytozome v7.0 (chr-ID chr5 ; pos 1924769 to 1925359)
tggcccatcagcagaatctgagattaagttgactggtcagtaccttactttccaagtctcataaaacttggagaaataccttagtctcttccctgacccataatatttgttggtactagctgtttgttgtgttgccaacttaccctgctgagatttggactcattggattccttctcatgaatagcttatgagccataaattttgtgcttccaatggggtttatccatctgatcctcaaatttggttgctggtacatcatttggaaaccgggtttctttgtgtaaaattatattcaggacacccaacttattgaattgaggccgttggtttgaaattccaaggcatgggcgttttacccatatgattgatggtattagctaatggccttggattctaacctatttttctgcaaatttgattttgaatggaatcaagggtttttaatcattcaacatgcatcaatttctggtgtcaaagctgaacatgtggttttctgtttggcactttccagtgttttgtttttttaggaaattctttgtcctctgtaattagcttaggcatcacttacggttgtataatgattttcagta

SEQ ID NO: 100546 - DNA, 682 bp, Vitis vinifera
  Intron number 1 from transcript GSVIVT01037179001 (locus G SVIVG01037179001) derived from phytozome v7.0 (chr-ID chr1 8; pos 28283248 to 28283929)
gtggtcaagtaagttgtctgagagtcctcgttttcgtgatatagaaataactcaagctttatttcatataactcaagctttaaattatctcatttaggagcctaaaaatgaatctaattttcggttctaattgcaattttcaggtgaaattgttactagcagaggaaaaatattggaagagtacaaaaactaataaatttgagaagtacaaagaaaaattgtaagagagaagaacttttgatgatcactagctaaaaccatggaccatgtaaggactaattcctataaacagggtaaattaaaccacgttctgcagcaaaccaaaaaagaaaataataataataaccttaaaactaggacaactcaacaaacctacaaagctacatcgactttttcaacgatccttcacgtaacttgatgttagctaatactcagtttagtgtatacaagctatgcaacaccctccctcccttaaacagggtcttcgaaagtgcacacactaagcaactttgacttggtgaatatatcaacaacctgatcttcacactagcagtaaattagatcagttaattgtttcaatatctacaagttcacacaagtgatagtaacattgacttttttaacaatgaaatatgtcgtagaactagctggacctttggcggagttatcgggtggaccttct

SEQ ID NO: 100547 - DNA, 1031 bp, Vitis vinifera
  Intron number 3 from transcript GSVIVT01017767001 (locus G SVIVG01017767001) derived from phytozome v7.0 (chr-ID chr5 ; pos 3280931 to 3281961)
aagttatctgtagcttaacacccggatatcaccaggtcactatatgatattgggttgtcaattgatgttttgatgtttttattaccacgtcctaattgctccaattaattatcatcattgtgaagggtgattaatctaagaaggccagaatttattgtatttttagttacttaaaaaatcattatcatcaaatatagcataggctcatagtgaccctcaaatctattattttctatggtatggatcgtcaatcacatggtttggagagatgatgcataatgggacaagtgctcaatggattctataaagacaagtacacacactaacacatatatacaattgtatgatgaactctgtctgtgtatgaaacggtataaagtatatctagcaatggttctccattgacgcagcctcttgtattctcttactcgtgatgtggaaatttatgttctctatctgcaattttaaggtattaatagttttggcctaaggatgatgcactaaggatttggtacttgaggaagaattaactatatgctgtgaggatagaattatgcattacacgcccctctgttgcatgtccttgagttctaagaataataagagtggatacttgcatgtttttatgtgtctagtttgagtaatgaacacccttctaatgcagaattgcttgctgggctttgtatggatttatgaaaattctaataataaaattttcactgcaggcatggaggagagatgttgagaaacatttttcacatgcagcctataaaaaagggaaaaaaaaaagaggaacatttttcacaggcaatacataataatgactattcttgaagtatgctttgaacctgcttatatttatccggatctatttaaactttagaaaaatttcattgaaataaagaattgtgctgtttagatgttttatctccatgttatacagaacaagtttgatttggacctttatttctatttgcaaaggctggcatgcttatgtttgctttcttcaatgcagtacaagttttttgttg

SEQ ID NO: 100548 - DNA, 474 bp, Vitis vinifera
  Intron number 1 from transcript GSVIVT01014070001 (locus G SVIVG01014070001) derived from phytozome v7.0 (chr-ID chr1 9; pos 87832 to 88305 reverse strand)
tctattttttcttcttttttaagattttctatctggtaagcaaaactagccatgtatctcctttgctttcatgtttctgttacagtggacttctgtttttcttttttcttttttgtagggaaatgtttgattggttggattaatcattaagatttagagttcaaagttttagaagacttagttgtgtttctatgtcatgttctagttctatagatttcaagcaattcctctgaaagtgacacaaaaaaaggaagatttgagctgaactttgaattaccttaaatgtgtttttttccccttgtcttttgctgaacccttacaatatcatcaaaagcaaaaaatgaaagggtttgttccgaaccatctcaaccaatcattataaatgattcttctaagaatttgattccaggaacacccttttgttcagtaatctgattcacattctctggatttcaatattccttttagcagtaa

SEQ ID NO: 100549 - DNA, 494 bp, Vitis vinifera
  Intron number 2 from transcript GSVIVT01028315001 (locus G SVIVG01028315001) derived from phytozome v7.0 (chr-ID chr7 ; pos 6042290 to 6042783)
agaagaaaatcaactggtcggaaaaataaaagcaaggaggtaaaggcacagaatgttgtggtattagaggatttaggagctgattatttggagcaactcttgtgttcatcatagagccgttgattcttctgggtcaatcatgaagatttccatatttcccaaatttttatatcttctttcttttcttggttcaatttttcttctaaaattgattcggccaggaatcatttttcccttatttatttattaagggaagttcatatctccgaaggagaaggaaatttctaaaactaatcttgtaagttgttttggtttctgaaaattacagtctgtgcctttgtttccctgggttccagtgatgaaaatagatagatcaaagaatcaaaatttgggtttctgttccttacctctgactttctgggcaaccaaacaattgaagcaagaaaatgaaaaaaacagaggcaaggaaggaggacataaccggcagagacggg

SEQ ID NO: 100550 - DNA, 189 bp, Vitis vinifera
  Intron number 1 from transcript GSVIVT01009373001 (locus G SVIVG01009373001) derived from phytozome v7.0 (chr-ID chr1 8; pos 7867359 to 7867547)
tctgcggcggaggaagtacaggaatctgcagacaggtaccgattgttgttcattttggtttcatttgttcattccctttgcagtttataatttctatcttcttgaagttttcatttgcggtataagattaaccggtgaaatgattttgggttttgggttttgggtttgattgttattggtttatgaagg

SEQ ID NO: 100551 - DNA, 791 bp, Vitis vinifera
  Intron number 2 from transcript GSVIVT01011202001 (locus G SVIVG01011202001) derived from phytozome v7.0 (chr-ID chr1 3; pos 9396820 to 9397610 reverse strand)
aacagtcacctcctgcggcagcctcaactggtaaagtgcctctcctcttcctcaagtaaaaaataataatacctctatatatgattatcacagactattatacacatgaatgggatgcttatggagaaaacttgggataagattgggtccggattagacactttggtggatgggtttcagtttacccagcatgaggccaggattgtttgtcacgaatagtggtcttattctcccaactgcttctgattcttaaagccatatgatctcccaattcggaggattctcaaacctatgaagcattatcctctatttaaagcatttgattagtgggataagatcgactccaccccttacagtaatatccacagggctactggatattcaaatagaattagaatttaacacaagatgtcattcaatgacctgggtgtgatattagaagtacttgtactatgtatattttacaaaaaaaaaaaaaaacctttactcaaatttattatttaggcatgaaaacttgaggcccgctaactctttgtcctagaaactcctaccatttggggttcatttccagtagccccagagcccaacacccaatctcaaggctgcccgctattcatccatagaggaaatgcaactgaggctgtaattaggcctgagcagttgtacctgacgaacaatagagtagattcttggctggattgttaattaattttttgcactacaatgctgaacagattgatagcaattaacaagaagaaaactgcctgcagggaacgctgacttctctcagt

SEQ ID NO: 100552 - DNA, 693 bp, Vitis vinifera
  Intron number 1 from transcript GSVIVT01011202001 (locus G SVIVG01011202001) derived from phytozome v7.0 (chr-ID chr1 3; pos 9398098 to 9398790 reverse strand)
agagggctgaagttattcagttaggcgaagggctggtatgtcccatgttccatgcaatttaggtgatgtttgcttttaagagttagagatttaatttgtttctagtttaaacctattttctttccctttcactgaaggcatacagacatgtaaaacatggtttcggcaatagaaatcaatcatcctctgccatcttttaagtcttttaagactaattttctcaggcctactattgtgtccaattgattcaatgattttctgtcccttcaaacatcttctttaatgtcataaaatagttaaaactcaccgaatttgtaatgtttaaatgatttgattagatgtttcccagacgcaacattcagtacctccactgcatttactctttgacgggttacataattaatttatgtactaaattttgaacatcaagaaccatacatttttccaccactgacaaagagtacccatctcacatttattgttatttattaagctttatgttctattatggagaccctttggcagctgttagtaagagaccaggcgatagagacaagtcctttggactgttaaagacgattgaagtcctgaatcaaattgtcatcacacattatttgtttctcttttctcatctaattatctctaaaatttagcatattttagttgattttaagcttatgctgcagagcaagc

SEQ ID NO: 100553 - DNA, 989 bp, Vitis vinifera
  Intron number 1 from transcript GSVIVT01008448001 (locus G SVIVG01008448001) derived from phytozome v7.0 (chr-ID chr1 7; pos 1919852 to 1920840)
gttcttgcctacacttactcgcgccaagatgtgagtgaaaccctagctctttaattttgtttgagtggattttggttctgtttggtcgctgaggtaatgggaatttgagtgtggtgatttatttatttatttattattataatttttgcagaaattctactcatagttaaaattccaaagcctgtggaaaccttatatatagttattatgggagagttttatcgatgctggaaacctagatctggaaatagttgaaaaatctataagtttctcatgttcggaaacctatctgttctatgcggtttctggtaaaatttatggaagcaaaatatagaaggcttcaattttaggtttttggtcattttggtttggcctttattgtaaactagttaacttacttttccttgagcagtctgaaatctaatttcaaatgaaagtcctagaccaactttcaaccatgtagagtctcaacaattccaactcaaacataggtagttttcctatccaatatcaaattgagggaataataaaaatttatacaattaagcataatacaaaatgcatccaaaggttctccgaatagtaacaacgtaaagcttcaattacaaacaaccgtattgaaatataatatttttctcatatttggaagttcaaagatttgccaattttctgatgtatggaaatacttgttgaaattatgacccatttgactgccaagaaagatgggaaagtgtagaagatagattgatgcttagagttttaatcatctcatcaagcataagtttctgtcttttctttttcttccctcagttttctcagaatgcagactgaggtttttgaaaaaaaatttatttccaaatgtactatggaaaacaatttaagtgtttgaaacttttgtatggaaacacaagctctacaaaatcattatagaagtttttattttcttcttaatagtcttgtttatgagtttggtgattgtttgttttcag

SEQ ID NO: 100554 - DNA, 601 bp, Vitis vinifera
  Intron number 3 from transcript GSVIVT01007348001 (locus G SVIVG01007348001) derived from phytozome v7.0 (chr-ID chrU n; pos 31473424 to 31474024)
aactggtatgtaacagagtaggatattggatcatctttcagtttgaatcttgtttatttggaattttttgccgttatacttttttaagtgagatttttagtgttttacttcatatcttgctatagatatggaattattctatgggttggtttaaatttgtgatagccagattaatagatatctatattttttaaacaaaaataaatttattaaagaatatatgattcatttttgccatttaatgtttttcatggatctgattttactctattcagattgaatgtattgttcctgtattcagaatttctcatttacatattagccagtgctttggatgtactcaaagtgagctgcatatttcatgaacaacctaaaataacactggacccacatcaccttgcaaaatttctcttctttttattttttatttttttattgcttcgtgttttggtccttaatatcagtgacatcataaagcaatgccataaacataatgcttgatgtttttgtttttaagatattatcttgtgctgatgtaggatcaagttctaatccttggattttatgtttttaggctgagcgcttgagatcagaaaacaac

SEQ ID NO: 100555 - DNA, 366 bp, Vitis vinifera
  Intron number 1 from transcript GSVIVT01024820001 (locus G SVIVG01024820001) derived from phytozome v7.0 (chr-ID chr6 ; pos 6639230 to 6639595)
tctctcttcaagctgcgttcagattatctcttcttgtgagtctgatatcttcactacaatttttcagtttcttgttttgatcattcatttatgccgtgtctggttgcgcagaatcgggaggaaattgagcacctaatttttggccaatcattttatgccgtataccaatttgaaaattttgatctaagctgtttcggttaaaaatgaaagtttcgctttaacgagttcagttgacttgttttttggtttgcttgttagaaaataattgagaatcaaactcttagatttttgaattttttttcttcgtttcagtggccaagcggcgaggggttagggtttttgagattttgatgattgagtgaatct

SEQ ID NO: 100556 - DNA, 580 bp, Vitis vinifera
  Intron number 1 from transcript GSVIVT01006275001 (locus G SVIVG01006275001) derived from phytozome v7.0 (chr-ID chrU n; pos 24430006 to 24430585 reverse strand)
caggtaaattatcctcttcctctgattcctctgtttttcctatttcaatttaattttgtgagaggaaaaactacaatttaggccccttctggggactgtgcttctaacttgatcatatttctaaagcatacagcataatacactttcaagaggcaatcaaaatattaacaacttcattgtcattctgaaccaaatattaacttccatttgtactcaacccagttcaacaaagcgtgtataactgtgcctacttgctgccttggttgggttttgtcattcaaatctgttcttttcttgtctttccaacagtttcaacttgaattagatattcctctgtccttcctactatgtacaggaacacattcatatgttttttgtctacgtggatgagacatcctggatgactttacccttgtcttggatccaattgatgccacctctaccttcttatatactcatatgttgagttaatcttttagtctggcattttctatgatggttcctattgttaatgattgtatctaattgtctaactagtctgtgttgtttcttttattatgttgatattaggattgggagg

SEQ ID NO: 100557 - DNA, 635 bp, Vitis vinifera
  Intron number 2 from transcript GSVIVT01002630001 (locus G SVIVG01002630001) derived from phytozome v7.0 (chr-ID chrU n; pos 35504306 to 35504940 reverse strand)
cccaagaacgaaaccggcggtttcctcgaagggtattcacagaatcactatttgctttctcattgctttaccttgtttctgaatttctgtgttcttagccatcatttatttatcaccttgcatgaaatatatgaagttacatatttggaaccaaaggggctagtcgagttcaccccttcagtattactaatggaaagcttcttaccatggagtatgacattgatcaataccagtttaaacttccaatgataatacattgtaggggtagtctttttccaagaacagaaggggttagaaggagagtttttttcgataggagaatagctatttccattaataaaactttaatggtggtttgacaaggatttttatgcgaagctgaaacttaaaataaggggttgtgaaagaagggaatgaaaggtagattttatgccaaggataacgagatgtaaacaaattaaaccattaaattttgtgtttgagaaaggtgttctctccttgtagtttgaactgcaaaatttagtagtgaaaataagtaaatgtataggacaatgttgtatcttgtatatgggagatttgacttattttctcttttatgtgcagtttggcggcgctgtgctgttgctgtcttctag

SEQ ID NO: 100558 - DNA, 971 bp, Vitis vinifera
  Intron number 1 from transcript GSVIVT01018648001 (locus G SVIVG01018648001) derived from phytozome v7.0 (chr-ID chr1 6; pos 11683801 to 11684771)
ctccacatacggtgtttgattcagttcaaagagaggtctgattctcagtcttcgtcttcatgaatcttgcatttagtctctttcattcgtcaattttgttttttatttttaaattttttttgaagtttatttgtttatttttttgggtaaaagaacttatggttgagaacattggctgaagatcgttcagaggaaatttttttttggtgggtgttcgttgaaatttcaattatggggttaaaaatactgggtttgtctcagattgttcaaacttttagcttttccgtagttctttgatgaagcaggaacttcttgtttatatatatatatatatatatgtatatatatattttaatttttccgatgatagatgattctgtatttttgtgtttttgtcgaatgaattgaagtttcgaacttttatgggagattctgcggctgtttgggcggtctgatcatatttatgtgttgtgctgttctgtgtttgacaaacgcagttagagcattggataatttttcctggaaaactggaagattttcctgggaatagtggcatctcttttactgttttcaagcacttattctattttgctttctctaaaccattggaatctgattcgatttatcagactttcgattcgatcttccaaaactgatttggcgaacaatttaggaggtggaaaattgttgggcaagctaatgaattgttaaataagtaatttgaattaaacgtgttccgtcaattccttcaaatttacagtttttgactcaatgatcaaagcttattatattgaagattatccttatacgaaacaatatatgattcctccattggaatctattgcttgtagtagtataaatctgagtagacttccttgcctaattgcaatctcatgtcttctttctcacttttccccccctctcttctgtttgcagttatcagttttggaggaggaaattgaagcttttcg

SEQ ID NO: 100559 - DNA, 576 bp, Vitis vinifera
  Intron number 4 from transcript GSVIVT01018648001 (locus G SVIVG01018648001) derived from phytozome v7.0 (chr-ID chr1 6; pos 11685762 to 11686337)
tctttattggcttcctttctacattagccacacaggtaccttaacttcatcacttatgatttttcttaaattggataaattaaaatctttctttgatgtatttacgagaaaccaactaaaaagatattcaagctttgagtttctatatacatgtgtccaattcctctcatgattgaccttttgaagagtcttggcttcatctacttcttatgaagtctttcatggtcaaacaacagaagcttttcaaaatggataattctgattttatgttcatataatgttttatccttcaatcccatcacattggaagtgagaatgcatcattagtcttgaataaaattttcaagttgcttttcatactagtggatcatgtatttccaaaggtcctctgtgaacttttaaataaaatatttcattgtatcacattgatatcggtttttatatcacttcgttcttcgcctgttaccttcagtacatacatgcctttgaattatgaaatgtgtagttgaatccttctgtaaagcagtccctagattctgattggttccattgccattcattttcttccagatatag

SEQ ID NO: 100560 - DNA, 723 bp, Vitis vinifera
  Intron number 3 from transcript GSVIVT01010636001 (locus G SVIVG01010636001) derived from phytozome v7.0 (chr-ID chr1 6; pos 15730025 to 15730747 reverse strand)
tccttctcaaaggctcacagctcaggaggttctaggtaggttttttttttttttttgatagacactaggtaggttggatgccactatttacagtaatattttttgtagtttctataaccgttcagatgtcctatcttggatactggtggggcatattgggaatgagagcaatctgatgaaaaggtttacaaagttttaattacttttgtacatactataagcatcaaaggatgggtgcaaagccatctacatagatgcacaaagtacaaaaccaaacagaaatactagaagaggttcacaattcatgaagtggctgagttgtcaaatcaagagaaggcctgggaatttgtcttaacagggtgataatcctatttaaaactgttgtttgcattgtaataattttgatcatgttaatcctttacaatttctttgctgttttaagaacaacagtgagcagccctggttagtcttcataatgttgcatgggatcatgtgtttactgcaataatctatgttctgtatgaattgaggcaagtcatttttgcagttaattagtgttggtatgccccagaattaagttatttaacctaaaatttcttgtaatttgacctagtttaattttaaatttcttaaaatcagattttcctgttcaccactgttttgagtaacccctatccgtctacctcatacttgcttttgattctctccttttgtagatcactc

SEQ ID NO: 100561 - DNA, 479 bp, Vitis vinifera
  Intron number 3 from transcript GSVIVT01007281001 (locus G SVIVG01007281001) derived from phytozome v7.0 (chr-ID chrU n; pos 31243878 to 31244356 reverse strand)
ttatttctgtaaccttgatactactcttcggtgaggtcagttttttttttaggtgtaataaacagtaacaaacatacataattttgaattcaagacaaaagggttgcattctgtttgtgccacattggttgaatgttctttgccttggagctcctctattctgtttctgtcattcataatctggcagttgaagaaaatggatcatcaccataaataacaattatagaataagttttaagatttcattcaatgacccgtaaagaagacaaccattctgcagtgatgagcctattcatgacaatggaattgtaccaatggggcactgctatttaagtttggcttctccatttttctcaagtttccttgagtaactgcaatttttttgggtaatcatgaagctgatttctctattttaatgtgctctaattgttatatgcacttctatgtacagattataccacaagcagtttgttctcaac

SEQ ID NO: 100562 - DNA, 463 bp, Vitis vinifera
  Intron number 1 from transcript GSVIVT01007281001 (locus G SVIVG01007281001) derived from phytozome v7.0 (chr-ID chrU n; pos 31244558 to 31245020 reverse strand)
ctcgtaattgctcattcttgttctgcattcttagtttatgtcatattggagctctcatgccaaatgctctgcattgtcttcattgtttttcacacatctgaatcagcatgacaatgtttctccagggaagcatatgttttgggtaattgaattaatgcatatatgcttttgggcttgtctctagatgctctatctcaacaagctcgagagatgtatcagttagttcattttgcattcttttggggcaggtcctcaataaacataatttcatgacctctcattcccatgacaagattcacttactgatatagaaaatgattagtttaatactaaatcaaaggtaacgtgaaaggcataaaagaacataaaagtagtgccggaatcactactaggaagaaaagataatctatattactttatcatggcagtgaaaatccttccagttgtgagaagacaacattta

SEQ ID NO: 100563 - DNA, 988 bp, Vitis vinifera
  Intron number 2 from transcript GSVIVT01001543001 (locus G SVIVG01001543001) derived from phytozome v7.0 (chr-ID chr7 _random; pos 1346470 to 1347457 reverse strand)
ttggatttactgccagtggcgttttgggtgagtgaatgttctggtgttacatttttaatgagtgattgactccaaaacttgcagtttgagaatgtccttgttgctttcatactgccatttgggttgtgtatttgttttaacatatataattgtggaaaattgttgaagcttctggcagtttcagatgattgttttaatactttggtagtgattcttgcttggtttgaagtttcatgtgatactacttccttttattttgctgttatcatgcatgtgataccacttccttttatgtgttgaaatttaatcattggattatttttctgtgctggcttttgtcttgcttgttattagttgcagagaaatagggtgctagttaagatttgtattttgtttttatcttttgccccttcattttttgtgactagcgccctattagaaaagtcgaagttcaattttccaaaagagctaaagttaggcttctgaaattgagtgttagcttgttgtatttcatgttatctggctctattctgaggcatttgttgttgggtttttagaagtgctgttgctgattatttgttcttttgttgtggattcaaatatcttttttagatttgaggctaggaaagactttgagttagtgaatgttctcttgctgcttcgaagatgaataagggggcttgatctctttgagggtaaaggtgttcctactaattttcgaggactttcatatactctctttggttgctgtggatagttggggattttggggaagagaaatgggatgctgtttgtttttctgaaagaaaatttgctagcttttgacagcttattgcattttgagattagaaagcatctttaccctctttgtccatcacctttgtgagaaaactatggttgtggaaaaattttcagtttaataattgtttgctagtatattttcttattgtgtttccttgctctacagatcattagttcaagcagtgac

SEQ ID NO: 100564 - DNA, 846 bp, Vitis vinifera
  Intron number 1 from transcript GSVIVT01011679001 (locus G SVIVG01011679001) derived from phytozome v7.0 (chr-ID chr1 ; pos 5287099 to 5287944 reverse strand)
cctggctgttgtgaaagaggagattattgaaggaggtaaagactcaggtagtgttattcatttatgtttatttatatatttgcttctttatcttttcaattttgactagtttgttttggttgaaattatggaattctggctctgaaatggttttttttttttttttttttggcattttaatttttaaaatttggcgtttttgtgctatttaatttaattcagaatatgagtgcagcatggcaggtggtgcctagacaattgaatgaaataataaatagaaaaaattaaatggttttgtttggttaattaattctactattacgaattatttctttcccaatccacatgtgtttctctggaaacctaaaatcatacccatttattactattttgcagcctaaaatggtaataatagttggttgtggttagcagatgagcaatctcttatctgggtagctttaatttctttttcagcatgtagtgtccatgaaaaatgttaaaattccatctggaagtactttgttatgtaattgattattttcttcagttgtttttcggataattttagagtatgattcttgtttcctgtggaaaaaagggttgttatttgtttctgggtttcaattaatctcctcagcgtatggtttctcatgtagtcttgggcatggagttagaaaattttcttaaatttgaagtccctatggttgtgttatttatttgttcaatttttttggcagatgatttcttatcaaaataaaagcatatgctgtatctaaccgagatttgttgcttatactttctgaatttgtagcatttactaaaggttcgggaatacagtggcccttt

SEQ ID NO: 100565 - DNA, 873 bp, Vitis vinifera
  Intron number 1 from transcript GSVIVT01011257001 (locus G SVIVG01011257001) derived from phytozome v7.0 (chr-ID chr1 3; pos 10155982 to 10156854)
acctctttaaaattacaaaaattacaatctaacttgtttttccaaatgattatagacaaataaaaaacagaataatataaattattgataaaagttaccattttttttatactttaaaaatagacaagttgcaatcctttctaacatgacaccataattaaacagaacacaaacatagtgaaatcccattccaaacatgaccttttttttgggacaggtaaaaatgactgtattaaaagcaacccaaagtatacatgatgaaacacgacctatttaagacataggttaagtgggtacaagtcaacccaattttttaatttaatgtcatctttgagttgtgattgtaggctatgttgagagttacaactccagtaaatgcagataatccaatttattcttctaacatatagcttattgttaaacaatttggtttacctgttcaattgtttagttttaatttgtaaggtgtttcctagtgaaaacccaattaatttgttcaatacttttgttctaaattgggctttttattcattttggcttattgttgtcatatatatatatatatatatatatatatatatatatatatattcgaattattttttaattcatttaattttagtagttgttgcttatgtatttggatttgtagcttatttgagaacattcacgacttctcttatatattcatagattcaccatgttcattcggtttgctcaaaacattgtgccattactcctctttaactttttcattatgtattggatctaagattttaaaatcctgccctatctcttcttctcttcccattctctccttctcctttttggactacagatatatacggactttgcagaagccaagattccagc

SEQ ID NO: 100566 - DNA, 446 bp, Vitis vinifera
  Intron number 2 from transcript GSVIVT01014998001 (locus G SVIVG01014998001) derived from phytozome v7.0 (chr-ID chr1 1; pos 305159 to 305604 reverse strand)
aagcaggtggtgaaggttttctccatcattgaaaggtttcctcgtttactccccattttcacctttttccttggattttttttctttgaatttcaatccatctatatttatgattcattcttctgctgtttcgtttaattgaagacaacagttttccttgttgtaagtttgcagtttattcattcaaatggatgtgagacaagaaaaatggtcagaattaacgatctctagtgcacaaaacttgtgaaagatataaagcaacccaatcaagatttctctagattctgcatctttgcaaccctccattagtttcctcaagagacaaaatgcttaattggtcattcttttttcttttttttttttgttatcaaggcacaatcactggatttgattactaatatcctttttctctgtcacctctgctaatataaaaggtacagttaaga

SEQ ID NO: 100567 - DNA, 688 bp, Vitis vinifera
  Intron number 3 from transcript GSVIVT01020604001 (locus G SVIVG01020604001) derived from phytozome v7.0 (chr-ID chr1 2; pos 3880438 to 3881125)
gtctcactcgccacaacattgctagccaccttcaagtatgaaatcacatctcttcctaattctaccattcctgttattctgtacaaagtcatggatttgtttggtttctgtagaatttttgttgccagtagatctttcttttcaattttatgtatgatttcttgggttgttgagagaaaagggttacctgaaacacgaaagaacccactagggcttgagagagatgatggtttaatttctttcaaattcatggaaaagtttgttagcattaagttatgggtttagagtggggttgaaggcaaaggaggaaaatagggaaagaacattttgaatcttagtgtagatgattaacatgcatagaagtaacctattggattagagttagagtactaaatttgaaattcatacacatcaagacaaccaaaaatcgttaggcttccaagtttttttctgtcctcattgggacttaacctaaccttcaatcaacccttcagttcaacacttgagtttagtcaaaggccattccgtttctttgtttttctcacgaacaaaaaggaagaatctgagttgaagtaaattagaaagaaagaaagatgaagaaaatcatagaaggattggagttttgaagatggagaatttgtggatgtgtgcagaaatatcggtcccataggaagcatttgctggctcg

SEQ ID NO: 100568 - DNA, 872 bp, Mimulus guttatus
  Intron number 2 from transcript mgv1a022714m (locus mgv1a0 22714m.g) derived from phytozome v7.0 (chr-ID scaffold_64; pos 1262103 to 1262974)
tgtgaaactgtgagtaattatttcctcctaaatgaaatagaatgataggattttaaaatcttgaattgttccttctgaaccaatattagtccgattcatctttacttagctttgatgtcaaattatcatggtagtagggatgacggtaatcattaactatgatattgtcattttaggtattcgcagttctatctgaaaatatatttatttgttttattttcccttttttatgatcaaagctattgacttggattatgaatgccccaaatgtaggtcttctcgcttagcatgcaggatagggatattttgattctcaatttaatttgttattaggtccttctagttattcatagtgcaagtatctctgcttacctgaaagaagacgatcattctaggtgcctcggtattgtagcagcaaaaaaaaaaaaaaaaaaaaagtagaacgagtgtaaatgaactctatgtaaaccatattttcaatgttgggaaaatgataatgtatgttacttatgaagctctaccaccgaattatggaggcgagcacacatctctaccgacacatcggggattctataatttgatttgttacccttttcatctaacagtcatgatatagcaatgcacaaaacaaatactgctcttacttcctcattattgtagtattgcttttatgatttttatgtatagtgggggtttcacacttcatttgaatcactagcatcttttgaagagactattctcccatgttttataattgacgtcacattgtttctacagagagccacttttgcatgcttttgtgaattttgaagttctttactttttggttataatgagtttgcttaacaagaactaaatgtcacaggatttgg

SEQ ID NO: 100569 - DNA, 688 bp, Mimulus guttatus
  Intron number 1 from transcript mgv1a007385m (locus mgv1a0 07403m.g) derived from phytozome v7.0 (chr-ID scaffold_44; pos 1380386 to 1381073 reverse strand)
aacaaaggccctccagttactcctcttaaagagaggtcctattttctaccgattcatccattcttatatttaaatctctgcttccttacattattgggattgcatttttttttttttttttggttcagacatttctgcgattcaatttatgaccctaacatgaactccatcaagtacagacaaataccaccattaggtcctggaaatttatgatcatccgtcaaataggttgctaaagcaagtgtcgtgcctaattaattaagtgttttttcccagtgagaatttcaaatgcatagtatacatgtccagtttgatgataggtggagtctttaaagaagtttcctggtttgatgtggatatggaagacatgttgatttattttccggctttatttattatggaaatcattttttttttcttctgttagttttgaacaacggtattccaatttcgcctttcatattttgagttaagttcagtttggcactcgtgtcccttatatttccttagtggtttgctgagttgcttgtttcgttacatattgataatgcggtaacaggtattaatctctttcaatttgttccacagcggttattaatgaatttagctaggtcttttaccaaagattgaatttagatatttcaagccactaattaattcacttccttgctgttatttctgccatagg

SEQ ID NO: 100570 - DNA, 906 bp, Mimulus guttatus
  Intron number 1 from transcript mgv1a017518m (locus mgv1a0 17518m.g) derived from phytozome v7.0 (chr-ID scaffold_109 ; pos 668732 to 669637)
acgtctgtaagttttttcttcttcttttttcattttgcatcctaaattctcatttccatttccgatttatttttacagttatcttaattctttttgctaattgtcgtttgattatgattcaaaaacttttcgttgaaacagattaaaatatgccattttggtttatcccctccaaaccctctcaaaggataatatataattgtctgatgagatatccgttgcatatatttgttgacaataacaaaatcaaattgaaacaacaatgcaataatgccaacgactcaaaatgagaataatttcccttctaatttggaccctttctcccatttattattatatattatattttttttttcgagattttgattaggcattccagatgaaacagaggtcgtaaccatcatgaatatccgagttccatcatgaattattctagtacgcacagttttcatttatataggcaatagctaagatttaagctttgcttgccgcaagttcaatttgtatgcacaatcaaaccgaacgagggttattgtgtttctgaaattttcagaagattagtcgaattttgtaatacccaaagccccctgggggaggaagaatcttatttttcacttcaatcatactctttatctttcaacctgttcaccattctacatttttctcactaaacatggaacgaaatggtatacttcgttcgacttttatacaaacataattagcaagaattatttgatatatagactaatccagaaaaatgttaaaactaaagcaaatacataggtagatataagattttgttttatttcaacaataagttcgccattgaattttttctttttaaggatttaagataaattgttgtatgcagcacgagaaaggtcggccactgccgaaatttggtga

SEQ ID NO: 100571 - DNA, 834 bp, Mimulus guttatus
  Intron number 1 from transcript mgv1a003477m (locus mgv1a0 03477m.g) derived from phytozome v7.0 (chr-ID scaffold_4; pos 481389 to 482222)
tctccagcagcgaaggaagaacaccttagatctgagtacgatccggtttcatttttctctactgcatcctgttgtttttttttttttttgctgataaattgagaatgcttgtttagtattaagtgattacttactgtttctgcaactgctttctctgattcgagggaagtggttttattgagagatctaggtttttttgaagtggatttttacattttatgtgtgttgaatgtagtttgtggtggtgcttctggatttactgtacattactcgtatggaggatgttgtttttgtttttttttttttttttttttttttaatttctggaggaatctttttccgtagattctgtttttgccatattttgtggcggtgcctaggaaaagctgaccggcatttgtctcggtgtaattaagttccagagtgttgtttctggttcggtgaaatttggaattttcttcgaaatgcataccagtttgggattttttgctggatccttgactgttaggtgaaggaatttaaatcgaggatctgaagtgcgtgaaggtgttgctcgtgtttgaaaattcttataatttgtttaaaattaggtatagaagattagaacatattatagtaggctgtcttaggcttcctttaacggatactttacttaatgcgtccttgttgcttatgctgttcattaaccatatgcgattgagttctgtctggtaatgcgctttgatattacattgtcacacgataaaatggcatgccttgatcttcactaggactacaaattcatgtttgcgtagtaacatatattttctcaggtttgctttgactcatagtcaa

SEQ ID NO: 100572 - DNA, 560 bp, Mimulus guttatus
  Intron number 3 from transcript mgv1a021662m (locus mgv1a0 21662m.g) derived from phytozome v7.0 (chr-ID scaffold_2; pos 2014796 to 2015355)
taaacggataccttcaatcggtcaatctgaaacaggtatagatcacttgtaataattttttcagaagattttttctttcctcgttctgttcgttctttgggttcagatgtagaaggttcgattcttattcttagttatatcagtgctttgggagtaaatcaaggcactgatttttggcgcccgtttgttttataaatggagtatgccatcctatagctaatcataagatctggatgttactaatttgtatgagttcccgaagacacgagcccgcttgaaaattatcacgtgttataagaattactgttaaggttaactgaatgtatccgtaagtatcaaatctgataaatatatggatttcttatgattcttattgctgtacgagtttttggttatgccgtctaacaagggaagaattatcctgtcggtaattatacgtgtggtctaatgagttgtcgtatggttaaggcaattcagcgagtatctttttttatgccaaacaaatcatgggtgtggaacttgtaggttgcagttacgttagctgaactcctgtgggaaca

SEQ ID NO: 100573 - DNA, 976 bp, Mimulus guttatus
  Intron number 1 from transcript mgv1a001450m (locus mgv1a0 01450m.g) derived from phytozome v7.0 (chr-ID scaffold_165 ; pos 540706 to 541681 reverse strand)
ttcttcttgctcttgctgtgtgggctacaattcaggtactagttcttccaattttattttatttttatattttttttgggtaactttttggtgtgatttttagtgcagatcataggcaataagcatgatagttcttgcaatttttttgtaatttttgatgtgattcttagtggtgatcataggttttttcgaatatgtatgttattcgtaaaaatataatcttttatgtcttgaattattaaactaaaaagatgcatcttttagcattttgatccagaattgatgttaaaattatgtttcactacttcttgatggtaatgaatttgagaattcttcatcaaaatctttgtagtaatggaaataccgaggttataaatgtggtttatgtgtaagaaatgtcgttggaaaaatacgcgaaatattgaattaaaatgagcataaatgtgaattttttgccttttttagtacttaaactttgatttgcggttgagaatacgtagggcgtgttctaattatgttctgaatttaggactcagttacttagaagctgtaaaaataatttgtggtaaggattttttttcttttatttttttattttagtgctgttctcaagattatgtctatttgaagtatgatgtaagattgacagtgagaaaatattgaattattctttcacatttaggacaaaacatttttcttgtaagaagcatgtatatgttctcaagattggtacgaatcccatgtctatagacaagagaatggaccaacatctcgtaggaatgtatttttcgtgattattttctttatttagtaaatcggaagtgggaaattaaattggtgaaaataatgcaggaatattctctcgagtatcttataattctatttacatgttaaacaagattggccataacgtcctgacttgtgcttttgtctctttgaagtacgggagttatcagagacgaaatattgtcgaaga

SEQ ID NO: 100574 - DNA, 532 bp, Mimulus guttatus
  Intron number 1 from transcript mgv1a014343m (locus mgv1a0 14343m.g) derived from phytozome v7.0 (chr-ID scaffold_15; pos 1038501 to 1039032)
ctcaaagacgaggtttaatttctcttttttcgattcggattgaatgaatcttcgtaattatttgaaatttcttgtgcaaagtcggtgattttggtaattaattggaatggaatgggttatttcatctatgtgttatttgtgatgttaacctctggtgtttttttgatgttatttaaacctttttttttcttcttaaaaattgtctgttggtaaatctgaaccaaatgtgaagtttgatttgtatcgacgcccttatgatatttcactgcgattcacgtcaacaaataactgttacgaactcttcgaattatgtcgtgtttatgattgatcttgtaattggagtcgttggacataaatgctatcgttttttttttttggctttttgcgatgattctatattgaaatttccgaatccgcttgcatgatttaatcaaattgagagaattacgtcagtttagaagtgaaactgagtttgttaaggtgttggaaatgagcagagattggtgcagcaccagccgactcaacatccaac

SEQ ID NO: 100575 - DNA, 827 bp, Mimulus guttatus
  Intron number 2 from transcript mgv1a014343m (locus mgv1a0 14343m.g) derived from phytozome v7.0 (chr-ID scaffold_15; pos 1039125 to 1039951)
ccaaggtatcaacactagctattttctacgattttgattttatagatattcagcaattttctgtatattctattcctatatttcactatgggtttcgagtttaatgtttttcgtcgatctatccatacgacaaggcatatctttaatccggatatgtttctcttctagactatcattttttttctctttcctgtgctggaccagtagttaaaagctacatgttctaatattacactctgtgtaaccatatatagataatcatttagtggaaaagaagcttgtttatttatatggaccaaagtaccctgcataatctgtgaattgttgctctcaagggactcctgtgtaattatcataaaattagtttttctgatgtatgttaggggtatgctgcaaaaaccgagccttcataatcccaaataaactctcgcatgtttatttgattcatgggaggcctacaatgagaatgggagctcgctgaaagcaccttttatcctctgaggtgtttcaatagtatctcaccagacacgtcatattaaaaaaatatatatacaaaaattcaaaccctgttacaaatgctttacccatcattggctcattttatttttcaattattcttccaaaatgcttttcttagatatcactcgactgcgacattgtaaattgtcacctcttaaaatatgaataaacggggcctaacattgcgaaaagttcaagcaatgggtggttatagtttatttcagtgttaattatttcgttgatcaagttgtttttttttatgctatattatttaagtggttctaatgtctgtgcgattgtttaggttg

SEQ ID NO: 100576 - DNA, 710 bp, Mimulus guttatus
  Intron number 2 from transcript mgv1a014049m (locus mgv1a0 14049m.g) derived from phytozome v7.0 (chr-ID scaffold_353 ; pos 65133 to 65842)
ctccccaccattcccggaatctccgatagtccgctgttagtttccttttttaatttatatcaacttcgctttacatttttatatttttagtttattatacatgtatatgtgtgtgattgtgtgtgtaaattaaagtgggaataatctaatagcatctgcaatacgtttaatttgtttagaaaataattgaatttcttcaatttttttaataaagtttaaaaaataggaattttttgatatttgaaaattctgttgatttttctttttaatatgtgaaggttttcaatcaattttcttattgaatttatatttaataatttacaaatatcaacttttttttttttttgcttgagcttctcttatgtgttggctctttgagatgaaccgaagtagtaccataattacttgggtaaattactgtatttattcccctgagttaagctgaaattacgaagataccctatcttgtttgggtaattacaaccactcttcaattatgtattgttttatagaaaaagttcatcacttcgtagataaatttgatactaggtgaacttgtaaatcatttttcgtaatttgacattatatcaggggcgtctgtaatttgccctgagtaaagaaaagataaaattgagtactaataatgtgattgatttgacgaatcctggatggcaggatagctctgatcgcgggattgacggtgggattac

SEQ ID NO: 100577 - DNA, 704 bp, Mimulus guttatus
  Intron number 2 from transcript mgv1a013805m (locus mgv1a0 13805m.g) derived from phytozome v7.0 (chr-ID scaffold_54; pos 407189 to 407892)
acctcgtaagccttgataatataatataatttccttattatattggtcgttcattgttattctttacgactatttgttctttcttagttggagtagttggatatttgacatttttgttcattttatcgattttcttaagctacatgtatattgaagtttctgttgattctaaaacaggattttgtttacttgtttctcttaaatccacatattttatatatattagtgaatgttacttatttgaaatgtagaacatggtcacgagaagtaagtatcgtggtggcatttcggttgacagtttgtctgtagtgatgttgtatgacctggcatttacggcacctcgtaaagtttgagaaatgtgtaatttttagttgtcatttttcttgttccccttcttgcaatagttagcatctgttaagtatttttcttccttttactcaattttattattcttggattttttcataatatcttgaggtatttgaacgaagattctttcttttgctaatttgttttcttctcttggttctatggaattgtgattgcacggggcgagagtgatcctaggatgtttttgttactagcaccacttatttgttaacttagctacttgattaacacgttattcgcattactttttgttttatctttatattccgtgataatttgctttctttgccacgttccttcagattgacagtcac

SEQ ID NO: 100578 - DNA, 569 bp, Mimulus guttatus
  Intron number 1 from transcript mgv1a009296m (locus mgv1a0 06818m.g) derived from phytozome v7.0 (chr-ID scaffold_96; pos 681698 to 682266)
ttcttccccaagcccctaaggtattttccgatctggatctcaaaattcttggacaatttctttttttttttcttttgtttctctgtagatctgatgggaaaaattgatttttattggatcaggtatgaatagaatttgatctttgtgatgattttttatcttgataattatttctagatctgtgtttttttttattgttttgaatcgattattttttatttattaattcttctattttatgatatattatttggggcttataatcattaaattagatgaatttctgtgtgttaatgatctaaagctgggttatttatcttatatgattttgggagaagcattcacttgtatctcagatcatgttgaattttgtttccttggaattttgaaatcaagattcccttttttttattttatttaaatgtaaattattatatatttcaataatttatgaattgttttgttgttattcgatagttttgtttctcttttggattgatagatatactaggtgtaatttggtatggtgcacagggatatcgaggaggtaaccaaaattaaattattga

SEQ ID NO: 100579 - DNA, 330 bp, Mimulus guttatus
  Intron number 1 from transcript mgv1a011074m (locus mgv1a0 11074m.g) derived from phytozome v7.0 (chr-ID scaffold_7; pos 1609726 to 1610055 reverse strand)
acacgcagttctccggcaacgaactctgcgttccggtaattaattaattaattattaattatgcatcttctctgcatggaattccttgaaacgtgtgcgcctgtatgtgtgtgtgtgtgttaatttcatttaccccctttttttttccttaatttaaaaaaaaattaaacacgccgacagtttgcactcatcattgatgaacacaattaacagtgaatattaaaaaaaaaattgtttcagcaattgtgtgttgtttatttctctcaattttggtgaatttttgaaattgtgaaaattaatcaaatttacttttttcaccaacacaacagt

SEQ ID NO: 100580 - DNA, 847 bp, Mimulus guttatus
  Intron number 1 from transcript mgv1a012209m (locus mgv1a0 12209m.g) derived from phytozome v7.0 (chr-ID scaffold_18; pos 1618846 to 1619692 reverse strand)
ctccctgctccttctctcttcatcaattcttcaaggtatgcatctcagatccagatccttattctattcagatttctccacttttgatttctgctcttttttttcttttttggggaaaactgtgtgtttttttttaagttacagttgtaattaagcatccatgtctctgtgcatgtacatgcacggataatttcgaattgcagcgtgaatttttctagggtttagtgtttcatctgcatttggttttgcctgtagcgccgttaaaatcagatcgagactcattttcatgttttttgctgatttatatcgtttaattggcgtttatttatttatatattgatttttagtatttatgtgttgagatttgagattgtgttagttatggagttgataaagcttttaatgatcgagtattctgaatgcattcccttttcaattgtttgccttagtgcctgggagtcggtataaataatgagtgagagctgtcctatttgagggatactctgttaaaattgagtctgcattccgatgtgaaatggacttcactatttcgaaaatctcactgaatccagatttgaaggggttgatttaagctttttatttcatttgtttgaagaaacagtttgccgattttgtgttcctcaccagtccttataattcagtttcccctttatccacttatgtagtctgtactaatttcatgttttagattaaatcctgttttctaatttacttggatcctcgaactaatttttaaggtttctatgatccatacaaattatacttgagcacaactacatacactcaacagtatcttaactacactattttgcttggtagttgcaag

SEQ ID NO: 100581 - DNA, 583 bp, Mimulus guttatus
  Intron number 1 from transcript mgv1a002212m (locus mgv1a0 02212m.g) derived from phytozome v7.0 (chr-ID scaffold_240 ; pos 164318 to 164900)
tgccaaagcgcgtaacgagcaaggatcaagatgtaagcggcactttcttaatttgattcaaatgttttttttaagcaatttgatcagtatttgcaaaagcttatttaaaaacagaagttagtgactgtgagttcagttgaaaataagtgcttatttctgtaaggtgtgggtgtttgcaaactagctgtaaaattaactaaaatagaaaaaataggtacagttaaacctctataaattaatagagtcgaggctaacaaaattctatcaatttagcgaaatattaaattatcgaactaataattagtaggtttttaccgagtcgggatctgaagaaactattatttaagcgaggttatttatttatcgggtattaatttatcgaggttctcctgtacatgggtgcttttaaaattatagcttaactcaacttattttaagaaaagcaaaatcaaatgcttgttctgcaaacacctaaaaacagattatgtgccgaaaaaagctcataatctatttctaaaagcatttgcaaacaccaccttagttggacttgtcataatatttgcagggatttcgtaaatctaat

SEQ ID NO: 100582 - DNA, 724 bp, Mimulus guttatus
  Intron number 1 from transcript mgv11b016130m (locus mgv11 b016130m.g) derived from phytozome v7.0 (chr-ID scaffold_1 44; pos 142956 to 143679 reverse strand)
atcgcttttggaatccaattttgaccatgttcgagtccaaattgggaaatatgacattagaaaagaattgtagccagctaaaatagctttctaatgccgccggaaccagttgatttagagtccggatgagaaacttatgcccgacttcgtggacactaccgaagatgttgagggatcctctcttctaattcgattttctttcctaatagcaactcttttcttactctttgatccattttgcttcatggacacctaattatcaatttgtacctataagatagtaaatccaccaattaaaacaaaactataaattaatccataaaaaaatccacgtaaacgtaaactttgaatgttatttctacactccactgtatcttttgtatttagtgtttttgctattgtttggttatgcgtgttaaagtgctagtgttgtatttcgtgtttttaagaacgttgttgcgaatgtacttttgtgcatatttttttacatgtacgtttgtgcatatccatttgagcgagtgtgtttgtgcatgtttgttgatttgtattaatgccttgggattgtagtttgtgttttcttgatcctttttgcgaatgcacttttgcatgagtacttttgtgcatgcttttgtattttttcttatgtgtgtatcttttgttgcgagtgtttttgtgcacattttttgatgcgcattcgtgtcctcgtactgtagcacgtattttc

SEQ ID NO: 100583 - DNA, 1061 bp, Mimulus guttatus
  Intron number 2 from transcript mgv1a014499m (locus mgv1a0 14509m.g) derived from phytozome v7.0 (chr-ID scaffold_415 ; pos 7029 to 8089 reverse strand)
ggtcgagagttgcgcttctgccagcagtgcagcaggttagtaccgtaacttcactttttttttttttttttttacgatcttattcaattaattaattatttatcttgtggtttatgttatgctattccatgattggtcaaaagggagtagattgaatttggaagaaaaaaccgaagaatatgtttctttagattggttctaaatcattacactacaacttaggttaatatttgatatgtattaggggaccatatatatatatatggtggtccaacatgtagatagatcaatcttgtcacctatttcaccatattgtaggtatattgagtccaattggctttttgttcgaaagggaccgcttgacgtgtttgtggatttattacaatttttcgattatggttgctcgagacaattgtactcgatgttagttagttattaagtttactttccgaaaacaaactgaaaattgttgttatcacgaattcgctttttttcttttctgatctatatagattaatataatgaaatcaaataatcaaataataataatcttatatataaaagaaataagcactagggcaacctaagaaaccctaatgatatatttgtaaaaaaaaatatttatttatatatatatattaatctcctattttgcatccacttttttctaattactttcacaccaaatctcagctagcacaatcctaatccactgcttctatatctttttaattgttcttattatttttctctaatttttatgtgtttcatttattttataatcggttttatattatgagaactaagtttatatatattttttttcggaatcagtttgtattattaaatttgtataaatattgatgttgttaccaatatcgcaaataaattttattgtaattgttatttgtcatatattaaatcaataagtattttcacgcttgaaatgctatcccgtgcattgcacgtgaaaaaaatgctagtaataataatagtaataataataattaattgtgatatttacaggttccattcactggtagaattcgacgagggaaaac

SEQ ID NO: 100584 - DNA, 802 bp, Mimulus guttatus
  Intron number 3 from transcript mgv1a013525m (locus mgv1a0 13525m.g) derived from phytozome v7.0 (chr-ID scaffold_24; pos 658126 to 658927 reverse strand)
gcaagaagaaggctgctgtcaagaaggaaggagaggtaataataactttagttttgttttttggttgcttttttttttcttgtgtttaatcttctatattattattgacacaaatggtcttgttaaagttgtttggtttttgtgttttagctaggaaaattaaacatgacggtattgaaaaatgaaccaaaactaggggtgaaaattgaatgaattggataggaaatcggtacttcagaaaaaaaatcccatttttttcgaaatcgaaaattaattccttcataaaaaatgtttcaaattcgaaattttttggatccgtatcagtggacttcggaattccaatattttagtcatctataacataaagtttatgatggtactgatattgtaggtgtaatttttggaaaataattggaatgttttggaaataaaattggataggaaattgttatataatatgtattccaattcgaaaatgggaactttcggaattccgaatgaaaattattgcaccaaaatcaatttttttataccggaattggaaattctagttccaatttccacccgtaacgaaaacactatactgttttggactggaaaattgttttcactattgtccttgttccaaatatagtatttcgacaacatgtaattgcttaggaagttgccataattttgtaggttatataaccttgttatgatttacactattagttatcgactttctagattaatttgatttaactttttatttgacttcactgtaggaggctgaggctgctgccaccgaagaggcgaagaa

SEQ ID NO: 100585 - DNA, 671 bp, Mimulus guttatus
  Intron number 1 from transcript mgv1a023381m (locus mgv1a0 23381m.g) derived from phytozome v7.0 (chr-ID scaffold_704 ; pos 445 to 1115)
gctcctataaggtgatttattgatttctcacgaacctaataactacttgaagaaaaaaggaacacctcctggtttcagaacttaacctctgttttgattcattttcattttattgtgcttctgcttttatgcaatttctgaaaatttatattgtaaacatttcagaaactaaacagtcttttgagctctatttttcggaacctatatcatttaaaaaaatcacactttaccccaggtttggaaatgaggaagcccaacaagttttttttcttcttgtttttgcatgtcaaccaatctttaaattcaattaatcaacctttcaactcaactagtcctgattctcaaattttaaaagcaccaaacaataaaatgaagtgataaagctgaccttttttcttccagcaatgaatcaacaaagaattgctattctgtttcattttatcaccaggctctttaaaactcacctctctaaccggaggctactgcctgtataaagcttgtaaaaaataagatgctagcattgagaccctattaatccttcactgagtgaaaaaaatgaatttatataaagttaatattaaaattctattgcttctttccatacttgtattcaaaacttacatttaagttttcattttaatttttcagggataggaacactggcatctggg

SEQ ID NO: 100586 - DNA, 383 bp, Mimulus guttatus
  Intron number 1 from transcript mgv1a003234m (locus mgv1a0 03222m.g) derived from phytozome v7.0 (chr-ID scaffold_181 ; pos 487846 to 488228 reverse strand)
attctcgtagaacaaatcttcccttcacattggtaattgttacttacttactgtgattacactattgctgtgatgtttcacatgtccctttgctactttgtagtgtgatcgaagagcataacatttgtttgcttcttccctcttcgagtttcttgatctttatgtcatccgtttgatccatgaattatgagaatctgaagaatttatgatgattttttttttttcgtttttcttgttctgcgtttctaaactgtttcattttatctcaactctcaagtaattattgagagatgattattcttcaaacaatttcatttgttgaatggagtcgtttataacagtttcctgtatctacttgcagattgtagagaaatcttgacacc

SEQ ID NO: 100587 - DNA, 477 bp, Mimulus guttatus
  Intron number 2 from transcript mgv1a009912m (locus mgv1a0 09912m.g) derived from phytozome v7.0 (chr-ID scaffold_51; pos 967377 to 967853 reverse strand)
gacatgtgagttttcttcccatttcgttgtatatcttttctcttaattttatttttgttaaataaatacagcttctatatttgaggttttcgtggcatatcgggatattgtcttcaaaaccgaacggttaaaaacattttcatatcagagataattgaaagagtcccatgatttacattgttcgtggatcagtaacattggctttgcgactaatcctctacgattccgtcaacaatgatatcatgattattagtcttacattatgcaatttcttcagaaagcataatcaaaacttaaaaaaaaaaatgtaaattgcttactccgataggcacttccatatttttgttggtggttttacataggtcaatgctgtattcattttacttttcgactaatggcttacgcataaaattattcttttgtttcttatcttctattgcagtcatctgttcgaagagttgctcttgccacaggaaa

SEQ ID NO: 100588 - DNA, 546 bp, Mimulus guttatus
  Intron number 1 from transcript mgv1a009912m (locus mgv1a0 09912m.g) derived from phytozome v7.0 (chr-ID scaffold_51; pos 967896 to 968441 reverse strand)
atcagtatccccacgatccatctgctttcacccaggttagcttcaatttcataaattggtaattttttttgttgtaatttttagaaattaccgattgaaagaaacctatctttctgtaaaggttaaatgatcaattttactatattttgatgcacgatcatttttgttttctggatttgttattcctctctatttttagcttgtcgattgatattttatttgtgttagcctaaatcctgtaaaattcagaacatgatgctaattcatcatgtgaaattgtttataaaaataaattaggtagaatggataattgaggtatagaaaagaacctttgcttcagttttgttggttgccgttttttggttagcggtacctgatgtagatgattggtattgtttcgaaccatatttgtctacttatgcatttattatacgtaatttttttaatgcggttattgaggtcatatatgtaagaggtgaatggtgtaatatttttctctttgatggagattcggaatattggtttcgccttttcagggtcttctgt

SEQ ID NO: 100589 - DNA, 325 bp, Mimulus guttatus
  Intron number 2 from transcript mgv1a017055m (locus mgv1a0 17055m.g) derived from phytozome v7.0 (chr-ID scaffold_7; pos 1343043 to 1343367)
cgcctgcgcttaccccgccgcccgcaagaggacctgtatgcaattttcccctctttttttccccgattgttttttgaaagttttgatcttttttttaatacaaatgttatgaagttcgttatgctgcattttatgcattgtgattcttcttatttgattaattgcatccgcggattaattatttgataagtatttaactattttggattttaattgcggcatttacattgttatcgaaaccatattttgatttcattgcgtaattgtttctgttaaaacttggaatttagataactggagtgttaaagctatacgccgaaagacc

SEQ ID NO: 100590 - DNA, 603 bp, Mimulus guttatus
  Intron number 2 from transcript mgv1a007770m (locus mgv1a0 07770m.g) derived from phytozome v7.0 (chr-ID scaffold_16; pos 2070521 to 2071123 reverse strand)
ataggtacaatgtttgctgtaattccctattattgccttcaattgtaagcaaatgtataggaattttttttttaataatctggtgggttaggggtggaaattagaatgtaatttttccgatttctgtcgaattcgatccagtttttttttcaattttggaacaatatttttcatgctgagtctcaaaaattactatttcctgtgttttttttttgacatttgtggatttaattggaattatgtatgagattctgatttctgattcgattttaatttccgaaaacaataaaaaaaatatttactctgaaaattacacttataatatagtatttatatttttaggtgactaaaaattggaattttccggattccgttcagaaaatatccgattttggaacaaattattttttcatcccaatttccgatgttctttttcccactttcaaaattaaaatcgaaaattttccgaaagtgcaaattccgatctgatcagtgcgatttttcacccctaaattcttgattagtaatttttttggtattagtaaaagaagacgatgatgaaatgcaggtttgcttatagcaatagagattgttgctgtccac

SEQ ID NO: 100591 - DNA, 454 bp, Mimulus guttatus
  Intron number 1 from transcript mgv1a007770m (locus mgv1a0 07770m.g) derived from phytozome v7.0 (chr-ID scaffold_16; pos 2071493 to 2071946 reverse strand)
gcattcttgctcttcctcagaaaacttcacccgctgtaattactacttttttctttttcctttttttttgtgatttcaagaaaatgggttttgagaaagattaaagttttcatcttaaaaaacaataaaagcaggtaaattgattgattttagaccaattatttcttaatgaaaatgggatttgaaaaagattcaatttttcatcttaaaaaacaataaaggtttggtaaattggttgattttagaccaattgcttcttcaagaaaatgggatctgaatttttcatcttagaaactatgaaattcggaaaaatcaaatcaagaatcgatgggttcgacgaaattgagcttttcttttttcatcatttaccgtctcttatagtgatatttttgcattttcgacactcatgtacatattgttatatttgtagggactacttccaagttcagtatca

SEQ ID NO: 100592 - DNA, 588 bp, Mimulus guttatus
  Intron number 2 from transcript mgv1a005909m (locus mgv1a0 05909m.g) derived from phytozome v7.0 (chr-ID scaffold_123 ; pos 336654 to 337241 reverse strand)
tctttccctgaagtgttcatcaattttggtacgcagtaacttctttttactattttttttttaatttcgagtttatttaattgtcggtagtttattctgttttttttttggtgcacatgaaatctccagttcgtaaagtaacacgattggttggttgtgatttatttatttattaattaatttgttgaagattatatttataggacaatcaaagataatatttttatataatttatttaattgatgagaacaataattgacagagatggacacttatttaatatatatattgtacacatgtatgtaaaatctacatcacgggttccagaattttaggttgtgcccacaaatttgaaagcaacgtgcattgtttcttactcctacccatacagccagcctcacgacaaagacatatatatatatatatatatatattcacataaagatcaattaaatttataaatagcaaatattattttaatttattttattcaaatatgtcaattgctaaattagtttaaagttacttttttcttgttttaaaattaatgtaatattaaatcatttaaccattttgcaggctcggtt

SEQ ID NO: 100593 - DNA, 773 bp, Mimulus guttatus
  Intron number 2 from transcript mgv1a016853m (locus mgv1a0 16851m.g) derived from phytozome v7.0 (chr-ID scaffold_50; pos 605921 to 606693)
tcctcttgcttcttcttcgtcggctctgggcggtatgctggatttttaatatttttccattacttatttctactgtttctatttcaaataataattctcatccgatacttacgttctgttcaattgtcggagaagttatttgagttctttggttgttcgtgtgatcttttaagcgttcaaagctcttcttttacaccattttttgtttatatctttcatggttaaaaaggtgctgctactgcttgcagtctaccttcaaagcctgccaattttttttaaattacatggttatgcttttcggacgtggtaattgtaggggttatttgcttatctattttataattttattgtctttgtgattaggatgtggagtgttacacacaaggatatgtatttatttaatactttcgaagtttgaggggacagtgtatttgtttggttttcaatagcatgtgtgctccccctttttttttctccttttctgttcattttttctctttccgctggctcttgcaggtgtaccacaataagaaaatctcaaatcagtcctatcaattaaactagaaaaatttaggtacgaaaaaaaatttacagataaaaagacattgacatattagtaaagcaacaagattgataagaatgtagcatctgtagacttacttgtaatttgtgtgcattattttaggttggagcaattcaattcttgtaagttatacgcgccactgcattgcatggttttcttggtgttcatgttctatattatctcctcacag

SEQ ID NO: 100594 - DNA, 880 bp, Mimulus guttatus
  Intron number 1 from transcript mgv1a004901m (locus mgv1a0 04908m.g) derived from phytozome v7.0 (chr-ID scaffold_76; pos 768450 to 769329)
cacagcttcatcgtcgttgaattctacgctccttggtatatatacatatatgtttatatctatttatatatctgttgtcgcatgaattggctgtttaaattgaattgatttgatttgatttacaattttcttgtggtgtgggttctagatcgggtttttaagtatgtgtaatcacagagattggaaaaatagcattttgtttgtgcatttttcgtttgttccttatgcattaaatgttatacatagcccatccattgttgtaccttccttgtttggcgtttttctctgctggcactattctctcaatttgaaactgcaatttttttatacatgaatatatataaacaaaaattaattaattttttttaatgttttttatgtcttatcttttgagaaatataaaagttttttttgggtgccttagagaacaaaaactatattgatatcatcaatcaaaatgttgtttcatctctttcttcttgtatttcccccaattccccgcgtagcgaatcgactctcttgatgtgtgtttgccctaacatatgtgtggattttgtgtgatgatgatcgttgtttacaatgtgaaggcttatgtttacatttcaagtaaattttatgttttttcttccccattgacttttacgcctgtacgaagaataccaatttttcttatgtatgaaattgtgctgaaaattgccctaaatgcatttgttgttagtgctgttactactaaaggcattcagatcagcaatgaattctttatatttggcatcattttctatttatttcagaaatctctgttcttatgtgaagaaatcatttttattttttcattcttgtaacaggtgtggacactgtaaggctctagctccggaggtaa

SEQ ID NO: 100595 - DNA, 942 bp, Mimulus guttatus
  Intron number 1 from transcript mgv1a006223m (locus mgv1a0 06211m.g) derived from phytozome v7.0 (chr-ID scaffold_22; pos 141380 to 142321)
ctcgctgtagtcgcaaatcaaggtcctctaatcaggtaaacgatcaatttcactacattaatcagatcatgccaaggtcattttcatttgatttattttaattatttttatgtgcgtgatcaccgacgaaatgtgaagatttttttgtcgctgtttttacaccgatcgagaatgtgttgcgtttgtagatgaatttttgtacattccgcagttcattttcgctgttaccttttgcgtcgagggttttgttgttgatttctcgtcactgttagatctgctggttgaatcagtgaaacctccttgttttcagttagcttccgtgttcggttttccgattaataggaatgttgatgaataagcatttttgggggaagctgtgagggtttattgtaggcatataaactaggcgattacggtttttcggaaatgatttctatattatatttgtttaatcggtaaatgatatgtaaaatgttttgttacttcaggctcgtaaatgctacacatggtgaaatgcatgggtagttttttcaattttgatgtacacataatcacacacgtgtacgtgttgatgtgtgtataatatgtatggataatggattatacaggtgaagttcaccgagtgtaacattgaaaaaacctgttacttgtgtgcgtgcgtttttgttttttcgttgatagtattagattatgttctgccaatgattatgaaaatcgttaattgtggatatccgtgtttacggtttgctcggaggtttgtagggtttctgttgcttgtcaaattgtgtatcattattttttgaatctatttccctgtgaatggcttatttgatatttagacttgtaagagctcttatgtactatctctttcttgcattttgtatgaaaagatttccaaagtactattctaacatcggtttataatctcttctatgaatagcc

SEQ ID NO: 100596 - DNA, 916 bp, Mimulus guttatus
  Intron number 2 from transcript mgv11b020508m (locus mgv11 b020508m.g) derived from phytozome v7.0 (chr-ID scaffold_1 66; pos 473111 to 474026)
taacttttgtggaaagatagggagaggagggattagtagattcaagtatcatattgagggattgacatgacaagtgaaggcttgtccacgtgtgaccgaagaagctaggcttgattgtaaaacttttattgagatcaatctaagagtaaagcgaaaaagaatcaagaaagtgaaggaagagaagaagtgaatattgcgggggacgatgaagaagaagtttcaattttagagagtggaaacagaaaagctcgcacacgcttggctctattcataagtttgtaaagacgataaatcttgactcaaagatgaatgcaagataacaaaacatcaatgaagcactttccaaagaaagaaaacaaaaagtggatgaatacatcgcaagatgggtgtacgaggccggcattgctttcaatgtcatagataatgatagtttccgaagatttgtcgagaaggtcgggcaatttggtccaagatatatacctccaagtccatatcaacttcgagggccattgttgaaaaaataagttgaattaactaaaacatcactaaagaaacacgaagaataatggacttttacagggtgttcaattatgacgtatgcttgggccgatcgaaaaagaagaagcatcatgaatttgtgtgttaattgtagatctgatactactttcatttcttcgaaataagcttctagtgatgcacacaccagtgcctatattttttaatatgtagacaaatggattgaagatgttggggaagagaaagtaatttaagttgtaacggacaatgcttccaacaatatgaatgcggccatgaagctattagagaaaagaccatctttgttttgttcatgtgctactcatacattaatctaatgctctaaggaattggaaagctttccaaattcaagagtgtgatt

SEQ ID NO: 100597 - DNA, 718 bp, Mimulus guttatus
  Intron number 1 from transcript mgv1a003751m (locus mgv1a0 03751m.g) derived from phytozome v7.0 (chr-ID scaffold_111 ; pos 605681 to 606398)
ctacgttctggccaaacggctctgcaatatccgctgtaagttattcgtgcaacttctttcagatgtgaatgtgtgatactctgccgtctctgtagaatcggatttgtgtgatgcttgttgctttgggcttcggattcaaattgtttggttttgattgatttgacgttagatttgaagaaatttcactatttggtttacattttggggaatgcatgttaagtggtattgttactaatatatgaattttgaattgggaaaaacatgtttactgaatcgaaagataacctaatttgcattaatctgataactagtatggaaggcatattcgtcatgatgaagggaaagtcttatccggtttccacttaacgtggtctgctttggtgtcttatttggattttaagagattatttcagcaacatgttcgatcgattcatctctcttattataatagagttgttgaaatgaactagctatttgtctatcacttgtttattcattgcttgctggagaaaacatacatttttcgttttcatatttatcgttctttttatcgaaaagaagttctctagcaatgtgcttcggatttataaacgaaagaaaacactattggtttttcgattatttcattcttttgtcagtcactgtatgccttccatctttaatgtgatgaagtatatcctaaaaggaacatgaaattattttaaatttcagtctagca

SEQ ID NO: 100598 - DNA, 230 bp, Mimulus guttatus
  Intron number 1 from transcript mgv1a009382m (locus mgv1a0 09382m.g) derived from phytozome v7.0 (chr-ID scaffold_55; pos 666120 to 666349 reverse strand)
tccttctaattggagagctgttccttctaacacaggtttctttttttctttcttttttttttttttttaaaacaaattgttagttggcatcattaattaatttaaagggatgtaataaatattttctgccaccagcaccaccgtctccttcaatgcatacctaatacctcttcttgaaatgttcttttattaattatttgattttgttaaaaaaacacaggtttgttcag

SEQ ID NO: 100599 - DNA, 982 bp, Mimulus guttatus
  Intron number 1 from transcript mgv1a016331m (locus mgv1a0 16331m.g) derived from phytozome v7.0 (chr-ID scaffold_1; pos 3449676 to 3450657 reverse strand)
tataggtgggactcttttctatttaattgctggttttatgtttcagtactttcatcgttgtgcttgctagatttataatcattttctagggtttgaatctgttgaaatactgtttgtgcttcaattttattttttctctgtaaatttaactcttcgccaacttagaacctattctcgtgatgattcacgtgtttaactcatcgccattgaaagtttaatttctcgccgtttgctaattttcacttgtaattttgttcgactgtgctgttggatctgcttcgtttttgttaaattggattttaatatatttctggattatttttgcgtcagttttagtgatatatcatatatcagtaagccttttcttagtttatcccttttcttcctaattcagagttgctgttttacgtggttgtatttccaatttgttcttccttttgacagttcaattcactgcgttgctgaaattttccatagttggtgaatggattattcctgttttataacttcgttttcagggatttttgctgttgctttcgcgataacgaaattgttgatttggatgtttatgtgatttcattagcaccacttcagttctaccttgcttgaagttgtatgtatgtattaatgattcattgactaattgaccagtatcaaagtgttcatgattcctttttttcatattaaatatgatttcatttttcaaggactttacctacttctttgactttctcaatttgacccaaatccggctaagctactctatttccagggggaagaaaaacaatgataatgctgttcatcatgctaatcaaagttttgtagtttgtattgcttgataaactcatcttagcaattattctgaaatctacctactgttatactggataagtttcgaccgtttgttttttttattctatagcgtgcttatatttgaatgtatgatttcatgcagcaacctctgtgcattctgctcttcgga

SEQ ID NO: 100600 - DNA, 593 bp, Mimulus guttatus
  Intron number 1 from transcript mgv1a020684m (locus mgv1a0 20684m.g) derived from phytozome v7.0 (chr-ID scaffold_190 ; pos 44105 to 44697 reverse strand)
ttcgttagccctctgcaactggaaccatttccgaggtatgtttcttaatcgaatctagtgttgctttggctgcgtttaattagtatcattggtttttgtgttgatcatttatttatttgttttcttatcactgattgatgctgaatttgtgtaatctctaattatttgctaaatttatttaattttgctatttacttgcaatttgtttatggttttattaggaatttctgtaaattttgcaataaaaatttgattttttttttccagagcagttgcttgtaatgatataaaattatttcgtgttaatatcgattttttgcgtattgattgttatgtacatggaaatgtaaatcctttgtttattaggagaggtttatgtggatttttacatttaacaatttggttttcgtcgaggaaaacgatcgacttgatatttgtctttcttatttcagagcagttgcttgtaatgatataaaattgtttcatgttaatatcgatttttaggtgtttagattgtcatgtacatggaaatgtaaacaatttgttcattaatgaaggcatgctaacattatctgacagggcagaggaggagc

SEQ ID NO: 100601 - DNA, 565 bp, Mimulus guttatus
  Intron number 1 from transcript mgv1a016681m (locus mgv1a0 16681m.g) derived from phytozome v7.0 (chr-ID scaffold_212 ; pos 118624 to 119188)
ccacaccgtcgacaaaggcgccggccacaaacaaggttttccttctccccccctcctttcttattcattgttcaatcggaattgtagttatttttattttattgatcttctcttgccgatgtattggtatttaaatttgatatattcgctgcatttcgcatgaggaatttgtgtgcgtggatctcgtgatcgttttttatcgtttattcactttgatttcggctttggaatcaccgacaaattttattttttcctttcatcgaattggtattctgatattgacttggcttgatttttccgtaaattgtatgtttgtctgagatctaagtttgcctctgtttttagatgtgataataaaaaataaaaataaaaaattgttcttggcattaggctattgtatattgatgtgtttatttgatttggtggtgttttattttctctatttgaaactatgtaattatttaggtgattcgtaattttgttccaccattttttccttgtattgagcactatccgaacatgtaagaattttctcatgtcttgttaatttcaggtcccaacttga

SEQ ID NO: 100602 - DNA, 991 bp, Mimulus guttatus
  Intron number 1 from transcript mgv1a025801m (locus mgv1a0 25801m.g) derived from phytozome v7.0 (chr-ID scaffold_18; pos 1075561 to 1076551 reverse strand)
gggaagttgtgggttgagagtaagtgcattactggagattttatgcaaaagttagttgactgtattagcagtattttgaatttgttgtaccaacttgttggtgcatgcatgcatgcacagaaaattaaaggacatactatattaattaatagggaatcaggtaaaataataattaaggagtaagaagattgattaacgctaattacagtctcacagaacataatcttctctcttcttttctagcgtgtgcggtgtgtgtgagagagagagagatgattaggtggggccggggggatttcccataagaaagaaagtcaaatattgcttttgcgatttcaccaaccacactttttaattattataatataaaacgttaaaaagacgtgtcgtggttatgcaacgagcacatcttccccactttcatggatcccaataaattaccaaccataaaaataaaccataaatcgtgataaacatttccaataatggggaaaacacgattttaagaaaccaattatccatttttttttaattgcaagactgacgattagtgccactattttcaaaaccaataattaaggtcctagctgtagaaaaaatcacaaacatcatcatgtatttacggcaagaaaacattaataatatcagaacaaaaacaaaaataccaaaattcaacaattcaaaaaaaaaaaaaaaaaaattgaaaaaaaaatcggtgccagccaactaatcactacctaatgattcgtagtatataatgccatttgtcccttcccagaaaaaaaaaattccctgccaaaaaagtcaagtgtgacattgccatatttgtacagtgttcttgatacaacaaatatatacatacatacatacatacagacactatgaaacagaacaaagaaagccagcatttgctgcagaaaatggagcccaaatcatcaacctttgaaatcgaacaagtacaccaagaacacgagaaaacgtgctcaagaac

SEQ ID NO: 100603 - DNA, 906 bp, Mimulus guttatus
  Intron number 1 from transcript mgv1a007979m (locus mgv1a0 07979m.g) derived from phytozome v7.0 (chr-ID scaffold_262 ; pos 141711 to 142616)
tctacaaatctgaaccttgggaacttgctggtatataaagattcaatttttatttgtttttttttttttttaatttatgaaaattgaattggcaaagatttaatttctatgttcattttccagtttttttttttttggatttattattattttttaatttaaaaaagaaatgagcaattggacttataaataagccttttgtttatgcaagtttgatttttttcgagctttggttatttgttttatgaatttgttgatggtgattttgtttcagacttttgtgcaatgaagcatgattttttaatccccaatggagaagagaagtatcagaattagggttgtttaattttaagtatttaaaataagaatgtgtcaaagatgagatttttgcagctccgatttggtgagatgcgaaatcgaggaaaaactatagtcaagaactgattatgtggttttgttttcgaatctttaaccattatttgcattaaagattagatctttacaagaccatgtaatccgttttccggttttattttaaccatttttaaagattagatttttataagcaggatgagagatcagacgaaagataggaaagattcattggacgtgcatgttagttttcaaattagcgacgagggatttaagtttttcaaatgtggaaaatgccgcgaagcggatgtataaagacatatatgtgtttttttttatgtaaaaacggttaaagatgtgatttttatatcatgtaaacgatataaatgtgatctttggttgccttttttcccctcaaactaatgtatgtaatctgtgaagtctagttttttcctttatcttgataacaatcttcttacgtgcaacttgccttgggaaaaaagattactcgtctgtgaacacgagagatctcga

SEQ ID NO: 100604 - DNA, 401 bp, Mimulus guttatus
  Intron number 1 from transcript mgv1a026405m (locus mgv1a0 26405m.g) derived from phytozome v7.0 (chr-ID scaffold_8; pos 268680 to 269080)
aaggtataaacaatttttacgtttatcgattttttgatttcggttgtcccatatgtttgcatgaaaaactagtaagctttatctcgtcttttttttttatttttttttatttcttgtgtgatttataaatcttcatttgttctttaaacatctccatttttagcctaatttgttttatttttttttattttgtattttttttttatttcggaaccaatcgaacgacattttcaagattctcgtgaaattgaaatgtaaatcttgtctatatacaatcattaattgaaaaaagtttcttctatataaatcataatagatttgtttttaaaaaaattaattttaccattagttctaattatggtttattaattctgcagttgtgacagtgaaacacccaagtg

SEQ ID NO: 100605 - DNA, 521 bp, Mimulus guttatus
  Intron number 1 from transcript mgv1a008823m (locus mgv1a0 08823m.g) derived from phytozome v7.0 (chr-ID scaffold_213 ; pos 169417 to 169937)
gggttgcttccaggtttttttttcttttttttttttttaattattaattccaacttttcttcaattattatgtattcttttttgaagtatttgatttgatttgattataatcgttgggtaaatcagatttgattcttgtttagtagtacctatatcatgatcttcttgggatgtgcaaagttgacatctttgaaaaattaattaaataacaaaaaacccatggaaaacgggcgaattgcgttttgcacccccaaaattaaccctgattggctatttgccccctacaatttttaaaatttacaaagttcaccctcaaattatatatcttatgcaagttgctatctacaatttcgacaaaatgaatcacgattttgttccgaaaaaggaaattggaaaatcgaaaaatcggagttttggaatttattgaaatatgtacttggaacccgaagaaacaaaagtgaactgaaaacaatctccgaatttcaggcaataaatcatcgcattgagaattccttcctaga

SEQ ID NO: 100606 - DNA, 1034 bp, Mimulus guttatus
  Intron number 1 from transcript mgv1a024178m (locus mgv1a0 24178m.g) derived from phytozome v7.0 (chr-ID scaffold_86; pos 387870 to 388903)
gacatcaccagaattcaggtaattgctggttttgtcttcttcatctaaaacaatgcaaaaaatcacttcattaattgatgatatattatgtattctcattgttttcctattgttgtttttgggatgttggagacctaatttcaaaatgttataatagttttaacttgtgttaccttgagatgggttgtctacgggggttgagttagacgaataggctgactagaacgttgacttgttgagtttgtggaaatattggtgcagaaaaatataatttgaattacagttgtactggattggaatccagtaaatagggaaacttaaaagctagtaatgatagatttttttcgatcttcttattttgttatcatatatgcaaacactgagaactttggaggaaagtaagcaaactccttgaatgtcttttccccctttgattgggccgaattggcattttctttgcacgagcacaaaacgaaaacttgtataaaattgttaacgtggaattagtgcttacataactgactgcacatccaagtttctggtatttgaataatcctgtttatatctttaactttcaacaggttgttctctcattcccctatcttttaccgatgttttcacatattttaatgaattaattctattattttgattgatgatttagttatggttccttgtttaaaataaatcctccagtttctgtggtttctatggttgattaccaatcaccaacgctaccgatggatagttgtacatacagaaaatgtaggactttattcaattaaataacttgcatacagtcagttatgttagctatttcttgctaaatttgcatactgtcttttaatatttatttcgtcaaatttgcaatataagtcgttatgcttctgatcggtatatattttcattcacgttattttgaagtacttgaatacttgcatctagctgcgtattcatgatattgtttcatcaatgccaaattatcatttctaattttttttttgtttccgttcagtacgaagataagaccatcg

SEQ ID NO: 100607 - DNA, 621 bp, Mimulus guttatus
  Intron number 1 from transcript mgv1a002833m (locus mgv1a0 02833m.g) derived from phytozome v7.0 (chr-ID scaffold_54; pos 1244075 to 1244695 reverse strand)
tctcgtttccattgtcagatctctcatcatcatctgtatgatttctactctgtcaatattcattcatattctgatgaacaattacttttctgttttttctatcaatgaacaatttgtattatgctatgaatgtaggaaggggcaaacattttctgtgttggcctgtttgagtttttgttttcgttttcgtttgcttttttttttttttttttaattattcctttttattttgtttgatattgtagttgaacagcagttctacatttgaatgctcttgtgttgttacttggtatgtgcgcatgtgctttcttaaattaataacggattttgattgcttgattagatgatttttcgttgcgaagaatttaaatcagttatattttgtagatgaaataaaactcacttgtttttggagaaaattactttgtttcaagataaactaatatataaccacaaaatgttctttctatttcaaataacataccctgaaatatctttcagttattgagtttttggcatgattataattactacttgacaaaattaacagtaatactttcttggtttttgaagttaatctgttatttgtggatttgtcaaatgcgaacaggtgtatatacg

SEQ ID NO: 100608 - DNA, 899 bp, Mimulus guttatus
  Intron number 3 from transcript mgv1a012901m (locus mgv1a0 12541m.g) derived from phytozome v7.0 (chr-ID scaffold_67; pos 140336 to 141234 reverse strand)
gaatcggcaaaactcaagtacaatatgttcgtattatcggtaaattttcttcttcttcttttttctttttttttttttttttttttttatggtttttttttttttttttttttatgggtgatgtatacagacgtactgtaattatgtaataattgaaataaattgcaaattgatattaaatataaataattttgacgttaatttagaaattctaaatttaagtagactagtaattaatctccttctttccacatatgatttgaccaattggaacttcttgatttgaatatttgaagaattgaacagaaactcagaaagaaataaaaattcaaaaatgatatttaagttagtgcatatcctcattttattttattgacttctttcaaaagagctaatgtccagtgaatcagaaacaattaatattaattaagaatgatttcacgtttttggagaattgtctattgagttgttggtattctcaactacaaggtaggtgtagttgctatatgttggacatgtagtaaattggaagctgtcagtttgcgttctttatttacttagattgattgaccttatgatccctaaacttcactaacaatttggactgatctcgaatgctactgaccttaatttcttcatgtcccaaaaatgtccccttcttaaaattgtaatttatctcaaattggattcttattatttttttttaaattattttatcataaatataagttgtattttatcttttataaaatttattcaattctgtggacatactatatattcgattattggaatgtagtgtatgaagtacatgatgtcctttgtgtttctgttaacaaaatatatgttccagaagcgttttcagcacctgtgtttttcttccatttgcaggtgattca

SEQ ID NO: 100609 - DNA, 749 bp, Mimulus guttatus
  Intron number 3 from transcript mgv1a025337m (locus mgv1a0 25337m.g) derived from phytozome v7.0 (chr-ID scaffold_4; pos 1169064 to 1169812 reverse strand)
agtcccgcttagttggtgggcttgaactggccaaggtgattgttgattagtggatttgcttttcgtataattgcatttatttcaatgttagtattatacagattggtttgtagtgctgctttgattaatagtgatgacttaagaattgaagttttaaatgctgagtagcgagtatcctataaatgtgctccaactaacctcagcgccatatgctaataaaaaacctggcaaagtaacaacattctcaattagaattacagacataacttttaattatagaggtaatatggctatgatattctctaaattcatcacctgctaagtagaagggcaccatgggaaaagataacttattttgtgtgtgtgtgtgtgtgtgtgtgtgtgtgtgtgtgtgtgtgtttgctattagccaattttgtatttattgaatttgcatattcttgatgctacaattagttgtggagtagaaaacatatttgaacatcttaaaagacgtgaaaatacagttagactccgtagacagtgagatatataatgtcatactcttgtgaaaagcactgacttgcgttcgtgaagaactggaaccaagtaatatgagggaagtgatgaattttttttgaagtcatgtgctgaggaaaatgttaattcacatttattgatagcataacttgttcatcgtctttttaagtctggaactacttgattgtgttgcagattgagcgaccgggttccataatcattagtccctc

SEQ ID NO: 100610 - DNA, 612 bp, Mimulus guttatus
  Intron number 2 from transcript mgv1a013677m (locus mgv1a0 13677m.g) derived from phytozome v7.0 (chr-ID scaffold_1; pos 4481981 to 4482592 reverse strand)
accattgaggtgaaaactagtttcttttagtaaattattaattttacgttatgttatttgtgtcgggactaaatttattttgttgcttagctcatgtttttccatcgaatcaaagtccgaaagaagttcagtatatgtactgatataggcatcgtttggggatattgcttggattgataagattgattgaataggataagattgcatagtcgatgataatataatatgtgattttcttatgtttgggatttatgattatacaatccttgtgttgggtaatattcttcatatgattgtgtaataataggggttgaggttggtagacctgtttttaattgcgggcttcaaacttacaccccaaacatttgatacaccttgattatattgtctatcaagcctttcttattcccaaactaggcctctgtggatgtgtatctctatcgccaaaaagagggataaggaatatggatctgttgtagtaataccctttttctagaatgaaaaacttagaaaattcaatttgattcaaatagttttacttgtttatttgaacaattcttggaaatttaaagaaaggaatgatattcagctttgtttgttaatgcccaacag

SEQ ID NO: 100611 - DNA, 843 bp, Mimulus guttatus
  Intron number 1 from transcript mgv1a012100m (locus mgv1a0 12100m.g) derived from phytozome v7.0 (chr-ID scaffold_89; pos 14669 to 15511 reverse strand)
atcccaaatcaaggttcgattttcacacacattaggtaatctacatcttttctattttgattttcccccctttcgagttcattgtttatttgattcaattttttttttgtttctaggattatgtaatttttaatttttctttataatcacgaatcgtgatcaagtcgaacttcagttgctcgagccgtggtgctgcgtttcgatgttttgggttgaaaagatttggtttttttttgtttctgctgaattttcccgccattaaagagcttgaattagttcgatcattgcttttttgaagttgtaaattggagtttgtctgcttgctgatcttctatgctggtggaaatatatcagcaaatggaaaaaaaataatattttttttcgagcaatcacgctaattagggatgggtttctcgttgaataatttagttgatgtagtgatctcctctataaatatttgttgcataattgtgcatatagtaaactaaggtctcgcttggttggagagattagccatgattaactaaataataggactttgttcgatgtttggtatccccaataactcgccgggttgacccgcaaatattatgttatcatggcttatcttgccttctaggcatgttttttattagatcatcgaaggtccaataatagaatcgggtttcattagattatttaattttatcttggcaaccaaacgaggcctactaatgagttttcttgctgcagtgaagtgatattttatagtgttttggttctggttccaaaaatttggattaatgatcttgtgattttgatcctgtttctagcaggttattaccgtttcgccactgtaaaata

SEQ ID NO: 100612 - DNA, 938 bp, Mimulus guttatus
  Intron number 1 from transcript mgv1a016087m (locus mgv1a0 16099m.g) derived from phytozome v7.0 (chr-ID scaffold_104 ; pos 459029 to 459966)
agacgaaggattgctggctaattatcgacggaaaggtccgatcctttttactattttcgtttttccccctttttttttactggaaactaaataggattagtgtttgcttaatttttttccagctctttggccttgttttttttggtgtgtgttgattcgttaacctttttgattctgatccatttatgttaaacacgcgattagtatgactaagatgatatatcaagcttaattacgtttagtttattgccttattaaaccaatgaagatcattagcctcatgatgtaactcgttgtatgttaatcggttgttatggtgaattcttcttctttgggggaggagagaaattgacggttgttatggtgaattcttcttctttgggggaggagagaaattgaggtcatgcgaaagatatagatgctcggtaccgttgaataagttggaatttaagtgatatttctatttagtttaaagatttgattctgtgcgtctgtcaacgagggggagcttgaaacttgaaaggaatgcgtattacatagacaaggaatgcgtattcactcaagacatcttgaaacttgaaaggaatgcgtattacatagacaaggaatgcgtattcactcaagacatcgcttaattgctttggcaggagtggtttgtcgaaaaagccgatctctctgtttacaaatattcagaaattacattgattcttttttttagccgttgggatttattatatacttttcatcttttcgtttatttggaactaattaggatttggagatggaaccttttcagtctggactcatgaggcatatctttgtagctcttggatattgctttgttcttcgagttttcttgttatatcctcttcttcttttcttgaaaaaatatgcagttggtaaaaatgtttaagattgaataataaattttcaggttt

SEQ ID NO: 100613 - DNA, 784 bp, Mimulus guttatus
  Intron number 2 from transcript mgv1a004752m (locus mgv1a0 04530m.g) derived from phytozome v7.0 (chr-ID scaffold_3; pos 2538695 to 2539478 reverse strand)
ccttaccctctcttctctcggttagttttttatttatttattattttttattttattttaagttatgttgatctaaatgtagtatgtgcattttgggttttcctgtttgaaatttttgcttatttttcaatttttattttttattttgtgtttatggtgtctttgctttttatttgttaagttcgatttcggtttcggttacagaaggattaaagatagtattttgaataatttaaattcaaataggaattctttgcttaatttggacggaaaaagaattttctttattttgtgtttatggtgtctttgttttttttttgtttaagttcggtttcggtttcggttgcagaaggattagagatagggataaggaaaggatggagggatttttgatattctttaaataaaaaaatgatcttgtgaaagttggagataagttagtcaataaagttttgatcttgaaatgaattctgtgattctgtgttcttgatttcgcttttcggttattgggattttgtcggcgctcctaatttcgtctaattaagtttgtctcgttttttcattttcttgaaataacttatttggtttctttactaaatgttagtacatttagctagtgtttcttgcatgtatttggccaattcgtagtcatattacatatgtaatatgtgtacgaaactcgaattgttaacattttactcgaattattacatattcgtttaagagttttattaaacggttaattcattctcatggggacgattaattttattacaggagtgga

SEQ ID NO: 100614 - DNA, 470 bp, Mimulus guttatus
  Intron number 1 from transcript mgv1a017375m (locus mgv1a0 17375m.g) derived from phytozome v7.0 (chr-ID scaffold_76; pos 630872 to 631341)
taaatttcggttagtcgaggctagaagctaatcaaacataattacgatatcaaagcggattaaaaaccacccaagtagacattgtgaagctaatgaagaaaattaaaaaacactcaagaggagttttcgagcaattctaaaacatcaaatacaagcccgagtagccgaattgacttcagagagaaaagctcaagaaacactaaatatgtccaaaactcaaaacaagacaatacaaaaaaaaaagggaataaatatccaaaactcaaaatcaatatttctgaactgaaaaaagaaaaataacataatagtaaagttatagatgatacaagacatagatcttgactatgctcttcaatcacctctcaccaaatggtgatactaagctttcaaaatagataatggaatcaacttttgagtcaagaatatgaactcgagactttcgcaacttatctcgtccattacaaacgagt

SEQ ID NO: 100615 - DNA, 777 bp, Mimulus guttatus
  Intron number 1 from transcript mgv1a010831m (locus mgv1a0 10831m.g) derived from phytozome v7.0 (chr-ID scaffold_24; pos 600699 to 601475)
atgtactgtattttaatttttttcgagattagggttttcttctttagatacttctgtttattgtacgatcgatttgatttctggttataataatttcaattgtggcaaaaaaattatgcctttgagtttctattcggtggttttctaatggcgggcttgatgtttttttgtgaattgatatttgagcaacaacaaggcgattaaaaaaaattgaatctttacactttattaaataaattcaataaatccatatttgagctgaattagattttgcgaatcgcgatttcatctggctgtatcagttttttgtatgctaaccgattacattcttaggttttcagtaacttgtaaaaagattttttatttttttttgcattgtaatgctcgtatataacgccaccggtatcgaattctgttgtagaaaggcggtacagaatgatttcatttgccaaccttgttaaattccttttgtgccctgttctttttcaagggggtagcattactttcagtccgattgagtcgttttttcagaatcttgctgagtaaagaaactatcttgggaaatatcgtcggattgttttgtcggaaagacatctgactttacattcgaaatgcgttgtatagaaagagcaacagttacagctgcttccttttcggattgccgtttttttttgcattttagtgggattttttacatagcatgagaattagtcgtattaaagaggcacattttttcatttatttatttatttccctatctaggcggtttctggccag

SEQ ID NO: 100616 - DNA, 703 bp, Mimulus guttatus
  Intron number 1 from transcript mgv1a023241m (locus mgv1a0 23241m.g) derived from phytozome v7.0 (chr-ID scaffold_535 ; pos 8585 to 9287)
ttcccgtcgacccacttccaggtattcgtttgtttgttcacattacgttccggaagatttgcgttcttcagtggggaatttaaacaaacaccttgtatacctttagtaaggtgttcccattttttttttaaattccggcggcgaatatcaccaaccactatggcaacctaacctttgtgttctcgagggatttctgtcgatattgttgttcagatgactcgctaaaaaaaaactttgcctctgcgtggagaaaaaaatgttgtatatgagtgacaaagtgcaaccgttactggaaaaaaaggaaatttttctttagcaagtttatcctagataagctttctactctagcttagacaagtgggatttggccaattggcccaaataattgtttttttcttgacataaaatgctttaattatgataatttttattctccattctgatacggatgatgggttatcggatttttttctctgcggattttttgtatctaatataactacatattatgttgagtatttatcatcgaattttgaggaagtgaagaaaatcgacagtgaagttccttatagtacattttatctcttgcaaagagttcgcttgaatcgtctggcttgtttgtaaggatgagtgatctagcatttgattattatctccctagtttataggagtttcttcgattctgtatcttcaccaaaggaac

SEQ ID NO: 100617 - DNA, 676 bp, Mimulus guttatus
  Intron number 1 from transcript mgv1a006679m (locus mgv1a0 06679m.g) derived from phytozome v7.0 (chr-ID scaffold_36; pos 362569 to 363244)
agagggagcgccgcgcagaagaggttgctcgcgaggttcgtgattgtttcaattctttttttttttttttttttcatccgattttgtactattggaagctgggcgttcgtcgtaaaaaaaaatgtgggtttttggaattggaaaagatttggtaatatggaatgtactattgttggatttttagtctctgttttgcttaggataggaagtacattattcgtagtaatttttgtttttggttatgtttggcgaatccattggcttagtatgttgcagttgcattgttccgttttcatgtttgcctttcgaattgcgttcatatttcaaaagattgtattttttttgtaaacgtgtttgctcgttttattgttttatttttttaatctcgttatgattatacgttttctttcatttggctcgattgtgctgataatcctatttatctcttgaaaagtgtttttgtttcatatcatagttgagtaattgcacctctttatttataagattgcggttgtgatgctttttttgggcactcatcagcattttttgtttattgttctttctcgtgttctcgattgcatctctttattcgtagagtttcaattttaattatttttttctgtcagtacttcattttttcttcattgttccattcttgttttctgttcgttgcagt

SEQ ID NO: 100618 - DNA, 1022 bp, Mimulus guttatus
  Intron number 1 from transcript mgv1a006368m (locus mgv1a0 06368m.g) derived from phytozome v7.0 (chr-ID scaffold_85; pos 860005 to 861026 reverse strand)
cgtgcttccgcccctagcggatcttcctctggaatgtatgccccttttcccatttatttttttattttttaatatttttaatttaatcgctatgtggactttacgtgttagaattggatatgttgttcttctgaatcctgtgtttaggtgtaaaatgaggtggggatggtagacgaatcaggctagacctgtttgacaatcccaaaaacaatttcgatattttaagaaactagagttgaacttgagcagcaattaatctgtatccactatccattgcattgcttaattacaaacaatgtgatgaattacacggctagctataaagtgggggtatactcttgtatcttgatggtatggatggcctaggtatgtgaagttgtatgttaaggctagggttaactgcaactacgtgattgctttacctatctgaacccgttcccttctggcatttgcttattctagtggcttttcgtatgttcctcttgttgttatagaaattctcagaaagctatcactatctgttctttggttcgtctcttaccaccatcttgttaattagaacttatagtgtttagggaaatgtcagaagcaataaatttgctttgctatcttagatactaccttgtttgtctttagcaatgcctttggttgactttcttagtttctctttgaattgatattggtatgtatcaaaggtttactgttttctgattgagttcattgctgcagctatcattgcacttggaccagtatttggccagaagtgtttggaattacgtttgcgactttgtcttcaaagccttgttgttgttaattagtgctggtggtgtttaatatattaatttgttttgaacttttgcctcgattcataaacatctgttatatgctcaccagaatcatcatcttcttggcatgagccttttctatttcttcgacattgttagatagtagacacatgtatcatcacatttggaagtattgtgagccatgtatgaagttactatattcttttatacacaggt

SEQ ID NO: 100619 - DNA, 1021 bp, Mimulus guttatus
  Intron number 1 from transcript mgv1a015024m (locus mgv1a0 15024m.g) derived from phytozome v7.0 (chr-ID scaffold_8; pos 2139250 to 2140270)
agcgggccccggatcggatttaaaacaaaggtcgggtatatttcctgatgtaaaaagttaaaagacttataaacgcatctaatttgtgtagaggaaggacttgttgggaattaacaagaaagatggggggtataattggaaacctggagtctagaagagataggagctagctccgattcgtatggatcgaggttatcatgctcatcatcgtcttcgttggctctgctcatgagcttgtacaactgcccatcttcatccctcgttccgaaattgtcctctactttgccttggtcaagcagctgtggtcaacagacgcattcgctctctctgtgaagaatttaatctctctcctcgacctatgcctccaaatggattattattgttattattatttccgttggtttgtccaggatttgtttttagtctctttcgctgctctaatttctcagaaagatttctgtgcttcgatcgtaactcctccaaatattgctctgtattcactccatcatgaaaaaagacacagaaaaactcaagaacagtcaaagactcaaaataacaaataaaaagataagagttgaatagcatacaagcatctgtcttcctctagtttcttttgtctctctctctaattcctcttcgacctgtttctgttttttctgctgccgtgcgtcgggtgtagatttgatgaatatctgtttccctttttgcttaatctgtaaagagatggagaaatttttcggtaaaaatgtcaccagaaccagcactataagaacttattgcataaatcaaacttaaaacaagaaatatcgaaacaaaaacaatgaaagaacttatgaaacctggtcaggtgtgagcatctcatcaggtacactaatcagattgtatttttcgctcgaggaagaatccaccttctcgacactttcagcaggctctccctttgctttgcgcaaagattgcgttgcttttgaaaaggccgattcgacttcctgttttgaattgtgtaccgattttgcaagaatcg

SEQ ID NO: 100620 - DNA, 693 bp, Mimulus guttatus
  Intron number 3 from transcript mgv1a007302m (locus mgv1a0 07302m.g) derived from phytozome v7.0 (chr-ID scaffold_17; pos 1959847 to 1960539 reverse strand)
agaggatcacttttgaagacctcgttattgctaaggtgaatttaagacctgcgtaatttttttattattagtattttcttttttgcgttatgcatcgaaattacatgatctgcgtttttttggaccattctttgatgcttttcgctcgttcaagctttacctatgtcctccgttcgtaggttgccttgaacaagtatgttctgaagggattaaagaaataaaatggagtacaactacaatgaccattgaattgatttcttgtatattagaatatatgaagtagtgagaacaagcgagtattatctcgttttttcctacatgtatccgccatgctactttctagaatcaactatttgttggataaaatattccatcagtattagcttagcatattccatcagtattagcttggttcacctttactgtaattctaaattgacgtaaacaatggagaacttaggacgagattcaaatcgagttttagtagatgcaattctttcccaataatttcttttggtggtgttcttagtgcagtgggccttgtgagtctatgcacatactgtgcgcacaactcacatatgtgctcttcttattggccactctattatagcacctgaaatgttcagagtacgggttttcaaagcatgttaaaatagctacaattttattcctgcttcgtattttaggcgactt

SEQ ID NO: 100621 - DNA, 858 bp, Mimulus guttatus
  Intron number 1 from transcript mgv1a009022m (locus mgv1a0 09022m.g) derived from phytozome v7.0 (chr-ID scaffold_109 ; pos 695162 to 696019)
tttcaatctctttcattttccccaaacgtcctacggtaaattacaggaatcctgttgctctagggttcctcttccctcaatttcagcttttgtttttactataaccttagctagaattcaatttttatgtacattttgtttcttagtatttggattattataattcccttttaattaatttattttatttttcattttcttcactgcggttcaatcggtctttaatctacatcatgatttctctagcctctttcagttttagtttatatttgttgttacattttaaattcatctgaatttagttttaccctttttttgggggggggggggggggggggggggggtcggtgatggatatttttatctttagatgctgtcgatgttgttctgttctagtcaatgagggatatttgtagaatattcagtatcataatgaatgattggtactgcgggaatgcaaataccaagctcaatttcgaaaataggtttggaaatacatgatatcatcaaatgatgcatgtgttcgataagaatctacatgcactataacacccttgttgccaatcctttatccttgcagaatgcactgtttattttgactataattaagatttattgttcactatgtactggttcttgaatgttatcattcatgggcagcaaatactaatgtatgggtattttcgcatggggttgcttaatgggcatggccattgactgttcatgtaaactgctaatttgcattttttgtaatcgtaactggagtattctaaggggtgaacttcctattcgtggtgattattttggatatcaccaattagtataaaagttttcactatcttcttctgcagatttgtt

SEQ ID NO: 100622 - DNA, 623 bp, Mimulus guttatus
  Intron number 2 from transcript mgv1a013878m (locus mgv1a0 12207m.g) derived from phytozome v7.0 (chr-ID scaffold_7; pos 3330180 to 3330802)
taaggtttgaatttgcagtagtgcaatttgattacaagtaaatattgcaggcttacgaattactacattaaacgcatcgattgtgataacttattctcatgaatttaatttgtgttttctgttagttatggtggcttgatagtcctttgatttggtggaaattattatcaatagttgatcccagtttcgtattcttaccaaaaatcacgtgtcttgattaagattgctcgctgagctacagcgacgctaggacaattaatgcattccgtaatttttgttggaaatatatctttgaggtcaatagttacgaaaatgtggtttattttttgacaagcatgtacgggtgaaatactctgtaatttttttttccgataatgcttaaaactgtgttttactttgtgtctgaaagtgtacttctgaactcaaaattgatagaatagcataaaagtatgtgctgaactgaattgaactaatataaactatctttccaaaatcatcttcgattaagttgtgttttattcaatctagtttttcaacaatttttcaaggttgcaaaccttctttatacgttttattttgcttgtgcaggttctttgctccagttatcaattacttaatttcaa

SEQ ID NO: 100623 - DNA, 933 bp, Mimulus guttatus
  Intron number 3 from transcript mgv1a016871m (locus mgv1a0 16580m.g) derived from phytozome v7.0 (chr-ID scaffold_201 ; pos 82822 to 83754 reverse strand)
tttgaaagacggcaaggaagttcctggcaaaaaaggtctctctctctctctctctctctctctctctctctctctctctctctattagggttcattttgattcattcatttttattacaatgaaatgtttaaggttggtggttatcttcgaggtgttcttgaatgtgactggtatatgctaaaaatgtatagttacataaatctaataaggactcgtttggttggagagatttgttatgattaactaaataataagattttattcgatgtttggtattcacaataacttgccgggtcgacccgcaaatattatgttattatggtttatcttgtcttgtaggtgtgttttttattggatcgtcgaaggtctaataatataattggtttcattagattattttatcttatcttggttaagcttatctcggcaaaccaaacggggccttagaaatttaatattgttatgtatcttgtttcccaatgttgtttccacgtgcttgtattctgacagatcaattttgtggcaaatatgaaaccctgttttccaattcttgaattagggtttgctgcatcaaacgcttcggtttcaactatttactggaaaactgttttatagttggaagtagtaaattatagagttattacaatgttgtaatatgcgataaacgattcgttcttctctaaaggaataagaagtttggagtaatgccgagagctaatcttgctcgataaattacattgaatgataactctatgaatgggtaacttatcttcgcattctatagataatcttatttactattgatttgtacttggtagaatatctcaatttcttaattgagccgatttagatgtaatttttaaatttcaatttttttttttaatttggattaattcaaatttttatatgtgattacaggcatatcgttgctc

SEQ ID NO: 100624 - DNA, 641 bp, Mimulus guttatus
  Intron number 1 from transcript mgv1a006279m (locus mgv1a0 06303m.g) derived from phytozome v7.0 (chr-ID scaffold_8; pos 2430560 to 2431200)
cgaaattccagaaactgcccatcttattagtcaaggtttttaatttcatttttcttttatcaatttcatattctatttttggggcttgtccttttgttttgattgtcctggtgtgtgtgtgtgtgtgtctgtgtgttttggttggatttggtaaattttcccattctattcttgatttcttttttcatttcttttgatttacttttgtagaattttccgtgattggttgaatgtttgttgaattgttgtattttatggtcaacgaattgatttttatgctaaaatactatagcaattactcattgtttaaattttttcagcccgttttcttttcatcgtatgatgttttcgttccaaatcggaatacaaatcggaattttaggaattctttgttccgaaaccatgaatttccatatcaaattcctggaacttttcgggttcgagattctgttctgtatccgacaattttacgcatcacaatcacaatattcttttggggaagccacaatttttaaattaaattcagtgtcgggtgtaatcgaaaaaaatgtcatatacgaaagtttgataaaccgtcaattattatattatcatttcaagtattttgagcttaatctcacctcccatgtaaatacagattc

SEQ ID NO: 100625 - DNA, 659 bp, Mimulus guttatus
  Intron number 1 from transcript mgv11b016134m (locus mgv11 b016134m.g) derived from phytozome v7.0 (chr-ID scaffold_3 01; pos 71015 to 71673 reverse strand)
tgtttttacacgtacgtttgggcatgtccatttgaacgagtgggtttgggcatgtttgttgatttgtattaatatcctaagattgtgtttgtgttttcatgaacctttttgcgaatgcagattttgcgtgagtacttttgtgcatgattttgtacttttacttatgtgcttatcttttgtagcgagtgtttttttgcacgtttcttgatgcgcattcgtgtcctcgaactgtagcgggtattttcatgatcgcttttggaatccaattttgaccatgttcgagtccgaatttggaaatttgacattagacaagaattgtagccagctgaaatagctttccaatgccgctggaaccagtttatttggagtccggatgagaaagttgtgctcgacttcgtggacactaccgaagatgttgagggatcctctcttctaatttcattttattttcctaattgcaactcttttcttactctttgatcatttttgcttcatggacacctcattatcaatttgtacctatagaatactaaatccaccaatgaaaagagaaatataaattaatccataaaaaaatccacgtaaacgtaaacgttgagtgttatttctacactccactgtatcttttgtatctagtgtgttcttgctgttgtttggtt

SEQ ID NO: 100626 - DNA, 893 bp, Mimulus guttatus
  Intron number 1 from transcript mgv1a010391m (locus mgv1a0 10391m.g) derived from phytozome v7.0 (chr-ID scaffold_54; pos 494220 to 495112 reverse strand)
ctcgtccgtacgattccctattccgaccaccagaggtaaaacccaattaatttgattttgttgtcgtttttttctggaattggtttcaatatttttttttggctgtaagttcaaatgaaaattgcaattagggcaaccgcagaattgtttaatcatcttctactgttgaaattttcctgatttcaactttttactgagttattgatcttttgttcctgtgataaatgttgttgatttttaccatattttgctatctttttggctttcgaaaaattactgcttcaactctgtattaagtttttcagttgtatagcagtcatttacatttggtgactcttgtcttcatcctttagggtttacctccgaaattcctttcgaaacttcatattattggagatatttatatcgaataattcaccatgtatccgagccgagccatggtcaaatgaaaaggtcatatattcgaatcccaccaccacccgttcaaatatttccatgtgcaagacttcactaaattgggcgtttagatgaagtggttgttcaacgtatatgcggctctttaaaaaaagatgaactcatattttagaatatattgcacgattagaaataaattccccgagtttaagacaaggtaggtacataagattttagaggctatataaaatgtctaatgtcattttatccacgtcggtcctcctccgaaagtctaaagttttttttttttttttttattgagatagcagaaatatatgttcttttgaatttgagatgaataaaataatttgtttttttcatacaattcaacatcgttatagctgctccgtttggtttcacaattcccccaatgattgatgttggacgaatattttattattaattatatactccttcag

SEQ ID NO: 100627 - DNA, 591 bp, Mimulus guttatus
  Intron number 1 from transcript mgv1a001484m (locus mgv1a0 01484m.g) derived from phytozome v7.0 (chr-ID scaffold_59; pos 20224 to 20814 reverse strand)
tccgtcacagatctgtatccggattataaacaaaggtacgtctgaagaaaaaaaataaaaaaatccagctgccacagctgatgattcgttttttttttttatgtttgtattttgtcttaatcgaagaaatttcgaaaaatgctgttgttgatttgagctgcgtgtgattctgatcagatcttgttctttggatttgtgattctctgatgtgtgttgtagatctggggggctgttgaagattttgtttgttttttttggggcaattgaagaatggtgattaatagctgttgttttgttgctggatcttttaattagttattaattacagattaccagcattgataatctgatcgtcttcttttaatcaggttctgtttgtgtatcttaagtcggatctaatcatgatctggatttgattgcttttgtagtgttggaaaatttatcgaattcgtcgcaattaatgcttccgattaattactaaatcacacaatttaatgtgcttctatcttgattaaatgtagtggttacggtaaatcttattcatttgcttctgtaggtgcaatattgagaaatctcaggagtgattggaaa

SEQ ID NO: 100628 - DNA, 754 bp, Mimulus guttatus
  Intron number 1 from transcript mgv1a015278m (locus mgv1a0 15278m.g) derived from phytozome v7.0 (chr-ID scaffold_20; pos 1964701 to 1965454 reverse strand)
gttctcaagtaagttccgcactctttttttttccttcagatccatttgtgaaatgtttatgatttcgacgaatttgtttttttttttcttttccgcacttttaattcgattcacagatgatgtttacctgattttatgtgattcattttctcaaaggcgttcattttgaattacggtgctgtatcgatcaattttttttttgtttctttgtttttagatttgtttttttgggttgggagttcggaattgacgagctgttctattgttatttctaaaaagattttggcttttaaatgaaaatggcgttgattattgttattttaaacgatttataggcatatagagattaaaaaaggaatcgaattgttttcggggggttttttgctgttttatttgatgtgtttctgaaagaatttatcgattcattaggagtttgcctcaacttttgttttggtctaggttaatatgttgtttcctccattgttgtctagaaagaaaccttcgatatctttacagtatcagaactgtgtttatgctgtttcgaacaatttgcgtctattatcggttttttttaatggactgacttggtttaggcaatgactgtatatatatttctccctataccgatagtgcactttgatttggtagttgaatttaaattcttgtttatgtcaattgcaacgatatttatttgctaagtattgatctatggttcacaggacagagctttgccgttttagcggtcacaagatat

SEQ ID NO: 100629 - DNA, 933 bp, Mimulus guttatus
  Intron number 1 from transcript mgv1a010686m (locus mgv1a0 10686m.g) derived from phytozome v7.0 (chr-ID scaffold_247 ; pos 172793 to 173725 reverse strand)
ccaacctctctacttacaaacagcagcttggacaggtgaattcacgatttttcttttccctccctttttcaattggtatggattttattttttttctgattgtttgattgggagattggattttgttatgtgttaatttgggttttaactagtgtgaatcatcgatactgaaagttgaagttcggagctacatgattttgttttcttttcgtttcattttggtatgtgttgtatttttttgttaattgtttgatgggaagattggatttttctgtgtgttaatttggggtttaactagtgtaaatcgtcgatagtgaaagatttatgttcggaacttatatgatgaattattacatagttgaaacttgaatatgtcacctccaacggttagaaattataataccttaaattcctaatattcgtgtcgtgggcataaaagggaactaagttcaatgtgataagccttaaaaaacttcactacttctgatatacactaactgcacaatgtatcaacatgacaaaatgtgatcttagcatggtatcggaaacttcattctattgttaaaatgaaatagaagtacgtagtttcttgttcgatcggcatcagatggaagtagttcaaatatattgtgataaacttttgatctagtgtaggttttcttgtgaggttgttttgttcgtattctgtatctagggtagaatgggggtgctaatctatacttcattttattttggtgcttgtttgtattgtgtccagagtgaaaggaatgtgtcatgcctacttacagatttatcctccctcacagcattgttgagttctgaatttgttgattcctttagtttttatgctatgcaattgtgcaggactatatcctacttgatatttattataattcattttctttaatatgaatcaggtccgtaagctattga

SEQ ID NO: 100630 - DNA, 599 bp, Mimulus guttatus
  Intron number 1 from transcript mgv1a014978m (locus mgv1a0 14978m.g) derived from phytozome v7.0 (chr-ID scaffold_11; pos 86960 to 87558 reverse strand)
gcgattggctctgtatgctctctttctctctcttccaattttcagatctgccttttgttattattttgctcaattaatttactttgttgtgggctatttgtttcaaaaaagatccgttttttatttagttttttcttgatttctatagttagatctgttgttttaatttgaattttccatgtgtctctgtttaattttcttaattatcaataattatcttgttcttaacttcttacatccttaatatctagagttgtttatgcctgttggactaaatttactagtgaaaaattcgatctttcgaattaatgaatgcttaagaactagcaaattagctgcatataccgatgaattgtagttattttatttcgtgatttgctgtttatacttgggttattgctgtcgaagttataaagattagatttttaccttaatcgtagccttcgaaagtcgaaactacgaccgatcgatctatatatatacgcatgtgctagttgtttatgttcgcataatcgtatcaaattgcagcattgcatcattaactaatggctccctttattttttcgtaattctcagttttcgtgtacgatagaaaccag

SEQ ID NO: 100631 - DNA, 981 bp, Mimulus guttatus
  Intron number 1 from transcript mgv1a010092m (locus mgv1a0 10092m.g) derived from phytozome v7.0 (chr-ID scaffold_9; pos 3157041 to 3158021)
acaaggctattcttgccctaattgatctccttgttgtaagttccacgtttttctctctctgttttctcacgtttttttttgtctttttgaatgaatgattatggattagtggggactagtccaggaatttgtttcagggtggggggatttttttgggatttttttttctgataaaatcagaaaatgggaaaggtaaaaaaagaaaagaaaattagaggtttttttttttttttgcattagtttgaattttgggttgactgattaataaatattgtggctttttttgcattaatttgaattttgggctgactgattaataaatattgtggctttttttgcattaatttgaattttgggttggttaattaatagaaatgagggcttttcatccattagtttgaattttgggtaggttaattactaaaaatttggggcttcttttgcattagtttgaattttgggtaggttaattattaaaatttggggcttttcttgcattcatttggatttttgggtggtttaattaataaaaaatagggcttcttttgcatgaatttgaattttgggttggttaattaataaaattgggttttttcttgcactaatttggattttggttgggctaggtaataaaagttgggtgggctaatgaataaaaattggggcttcttttgcattaatttgaattttgggtaggtgaattaataaaactgggtcttttcttgcattaatttggattttgggtgggctaaatagatatatatatatatgtataatatagggtaacaatatcaattgaggggggcttgagtccagcgttgcccaagggtggactcgccccggttatgtatatcggtagtatcgatttgtatttagtcatgtaaaataatagatcccggagttgatgactcgctcttactgttaattttccaatgatttttgacagggaaacgttggattaatcttcacaaaaggtgactt

SEQ ID NO: 100632 - DNA, 916 bp, Mimulus guttatus
  Intron number 1 from transcript mgv1a005267m (locus mgv1a0 05267m.g) derived from phytozome v7.0 (chr-ID scaffold_561 ; pos 589 to 1504 reverse strand)
tcaatcacgaacacatcaaggccgttctcctcgttgtgagtatactagctgatttcgattaacttttcgaaaacatcaaggtaacttgttgcttgtggttacaagtttttgcagataaccccattatgcttttaatatcagcaacacataacccctcgtggttgataggggtaacttccgttttgtttttccgtcaaacttaaacgccagtgccacacatcaaagcaattttttttgcagatgaacgccttgaagtttgacacacgcaattaggtttgacggaaaactaacgaaagtcacccctataaaccacaaggggggttatgtgctgatattacgagcacagagagatcatctgcaaaagtttgtaactacaggggattaagtgctatttaacctctaataaactcacaattaatcacacgtgtatatatgtagatgtgtgtaaggtatatagaagatatacatgtgtatgatgatgatgatgaacttcaccaagtgtgggtttgaattgaataatcctaagagtgtaaatcataatagaattccaccaattctgattcaaatattatattcgattctggaacaacatgcttcattttgaattccgaaagctctgatttacaatttttgggtcttttgtttgaaatgaaattggaatacatattagattatgattttaaattccaaaaacaattctgaagattccaattttttttttaattttaaatttatgttataacataattgctattatgtatgatctatatatagttatgtattctatatatagtgataattctaatatgattgccccttataatcaaacctttcaaatgtatcttcgtagcctcagtatatcgttcattgtatatttccaggatatatttgctgccggaacggagacttctgcaac

SEQ ID NO: 100633 - DNA, 446 bp, Mimulus guttatus
  Intron number 2 from transcript mgv1a014302m (locus mgv1a0 14302m.g) derived from phytozome v7.0 (chr-ID scaffold_162 ; pos 505608 to 506053 reverse strand)
acatcggctggtcattcgtcggattctagagagaggtaaaagatatatatatatatataatagatatatatatatatatatatatatatatatatatatagagagagagagagagagagagagagagagagagagagaggaagaaattttgaaaattaaatgtgaataatgatcctcatcggacacgtttcttaaattttcaaatttttttgaaatctgcagcatgtggaatactaatcgttaattggccgcccattctttctttctagctgcgtactatttattttttgatttttctctatatatcccacgcgcacacacactttctctctccaccgtaagtactacactttctctctcctctctctttcacaacgaagacgagtgagtaatgacgtcatgttttttcagaagagaaacgacgccgttgagcgacgccgcggaac

SEQ ID NO: 100634 - DNA, 481 bp, Mimulus guttatus
  Intron number 1 from transcript mgv1a018833m (locus mgv1a0 18833m.g) derived from phytozome v7.0 (chr-ID scaffold_5; pos 2808889 to 2809369 reverse strand)
taatcagatttccggccattacctttattcgccaggtatatattattttttatgggaaaagtacagtttgcaccgtcatgtttgcaccgattttgtattttggtccctcgtgcacaaaaatacacatttgattcttcatatttaaaaaacaaataaacacttttagtcatttccgtcaattttcctttactactaacggaatcaagtgtgtgccactaaaagtgttaagctattgaaacttgatggaccaaatgtgttttttatgaacatgatggaccaaatgtgaaatcggtgcaaacaagagggatgaaaattgtaatttccccttatctttatctttcttttagtttcttctttttttatttttcgtgttaattagtttgttttagtcctatagagtagtttctttaaattgtccatgactactttttttatttatttataatattatttggcaggaataacaagacgtttccaaaca

SEQ ID NO: 100635 - DNA, 858 bp, Mimulus guttatus
  Intron number 1 from transcript mgv1a025050m (locus mgv1a0 25050m.g) derived from phytozome v7.0 (chr-ID scaffold_689 ; pos 4077 to 4934 reverse strand)
gttttctggagcttccatcctcccgcaataaggtttttcctcttcttcttcatatatatacatacaatttatgaatgtttccgatgttcctaattcgagaggtataggctaatacgagatgttaatttctggatttgtttctgaattaaaatcgacattttgcagtttttttttcgtctggattttatatttgagcattgaaaatgttaattgttgtcggttatagacgaccactaactattaagctgagtatttgcagtaattcgagcaaacattgttgctgatatgttcgcggaatttacattgaattgttaaatttgatttgtgtgttcaccaataaatgtatgtctgtgagagcagatattgctggaaataactagttaaaacgcatttttctaggcttattttctaatttgaaatgcatgttttccatttactgttgtgtgtgtaccttattgaagtctctgctatagataatttgattgatttattactttcaagcacaaatcacaccactttgatgaatgattgctatatttcttctgataagtgttgtagatcaaagtttgatattcccaattgaattattgtgacttttgtaaactatagatattgctcaataattagttttatcaaatcaagtgtagtatattcaactagggtttttatttagttcgttatttttcactgccagaataaccgctgagagatcacaacttgagtcgttaatttaaagttttaggacttttaaagtcattatatcagccatgataagaaattggtttatggatgtttggttcataattgaaagacttctgttgtttataatcgtttctaacttattaaccgtaaaaggtt

SEQ ID NO: 100636 - DNA, 840 bp, Mimulus guttatus
  Intron number 1 from transcript mgv1a012873m (locus mgv1a0 12873m.g) derived from phytozome v7.0 (chr-ID scaffold_55; pos 785529 to 786368 reverse strand)
ttccccttcatcacgcgcctcttcccctaatcaacgtacttaattttatctttaatatatgccgttcttttcgttaatatatactgtgtataccttgtaatttctattttgttcctcatatctgcgatttgtactgtgtatttatgaaattacccctcttttagggttggaattcaatgtccgttttcgtgctaagattgggcgatcgccgaaaaatagatttattagggttttttgtaagggcttcaaataatgagttaattcttaatcagattttcgctgatttctggagattgctttgcgttgtacttttaataaaattcatgggagttgttaatcatataatatgcagtgtcaaattaatcatggtgattccgattctgtctagcaaagagacgaacaacggagaaaggataacattgtgctggattattttagttgcatacatttttaatgatggtttagatgttggttatgttgcattttcccagatctcgatatcgagtgaaagctccatagacaactgttatggttttcttatacgtgttctgttttttgatatacgagagataaatattttccaaggatagatatatgctgcgtgatgtgtaagattgttcgtagctgtactatcttacagaaaataaaatttggaagatttaacaaataacggggaagaattaatctagttgtcgactttccttgtactatatctgtataagctgtttcatgcttagctacacctatattgaaaactttctttaggttatccatcatcacgtaatttgatatttctttcttgtagattttctgcatccctttgcaactcgttttgggggt

SEQ ID NO: 100637 - DNA, 367 bp, Mimulus guttatus
  Intron number 1 from transcript mgv1a002806m (locus mgv1a0 02806m.g) derived from phytozome v7.0 (chr-ID scaffold_177 ; pos 292957 to 293323)
attctgcgcggagaggttattttttcgtttgttttcttaaatgtaaaattgttatttgtttataaggttctggttttgaattatacgggagagttgtagcatgtaacactgggaaaatagggcagaagaagaggattaacaaaaaaatagttatgttgtagtcttgaattaaagaagcatcacgttatgaattaagcctcgacaagagaagaaaatcgattggaatcagtaggtggtgatcaagtagtgaagttgattttcttgtttgtttatttttcattggtttggatgttgggggcataatctcaaaacttattgtgattttatatcagatatctgatcagctgaagagattttccaaatcact

SEQ ID NO: 100638 - DNA, 535 bp, Mimulus guttatus
  Intron number 2 from transcript mgv1a013046m (locus mgv1a0 13046m.g) derived from phytozome v7.0 (chr-ID scaffold_1; pos 3199258 to 3199792 reverse strand)
cagcagtcccaagctcgccaggtgtttcttcttcttcttcttcttcttcttcttgttcctttccttctcatttttgttgctttttttggtttattttctaatctgattttatttgttggggtttaatggtttgagcagaaattgatatcagatgttgcaaatggttttattatttgtcactttcattttttaaaaagggtatagttcaagaagttcgaaaaatgattgatggtactgttaatacgacctttcggagaaatgtgccagggctactgaatttattaggccattgaaatgatgttgatgatatttttgtttcatagtctactgaaatgttctatttatgtatttaggtatttcaaattcagttaacttgaatactgaagatactcttaaactccctgtttcgaatggcacatgtttcataagttatcctctttgcctgagacgtactattgtttttcttactacttgatttttgaatatgaagatttggaaaactatctgacaggtacataaagaactgcaagataca

SEQ ID NO: 100639 - DNA, 769 bp, Mimulus guttatus
  Intron number 3 from transcript mgv1a016975m (locus mgv1a0 16975m.g) derived from phytozome v7.0 (chr-ID scaffold_24; pos 1562408 to 1563176 reverse strand)
gggtgtccaagtcaagctcaccggtggaagacaaggtaaatgttttgcctatttgaagtttttggctgtttatttaatcgatttattttccagctgtgaaatggctcagtgaagttctgcgtgctctatgaatattttcttaaatggttttcgtgacattagttgaaaattggcacatcgaatctccataagatttcatcgactgaggtggctttcggaatatggaagcttcttacgtttaaacgattgtaaaaaatattttctcagtgcaaagtcatttttcgaaaatatcgtatttgtacttgtatggagcatcggtctgttttgtggtctttgctttgctttgatttatcgatctctgagacttggtagtaggtatgtgtttgcatgcacagattttcgtctcattatattgtttgacaaacttgcttccttgaaaggactagatccaattaaaagtgagccagaaagttttatcataatatcttttatgatgtaccagaaaaaattctattaactgaaaattcgggtcgatttgcaccgaactgcaagtgtaactatgtgatttctcatttcacttatgtaagaatttagcatcattctgtcattgttggaccaacgtattaaagcaattgatcagataattttgaagctacttttaataatgactaatcagcatcccgccgttaaatcaattggtcattttttgggtttaccataaagaagtaactacttatgtttcttccagtgtctgggattctaaaaggat

SEQ ID NO: 100640 - DNA, 536 bp, Mimulus guttatus
  Intron number 3 from transcript mgv1a011191m (locus mgv1a0 11191m.g) derived from phytozome v7.0 (chr-ID scaffold_4; pos 2382099 to 2382634 reverse strand)
gatttcattatcacgtgtttctcttgcatcccaaggtaagattcgcttcgccttcggatttatggcccctatgcaattataatgcttatcagtctgcttgaagtgtccacccccccccaggtttttagatatatagctcctttcaattaggaacctttaaagagagtagtattgaattaacagaaaattttacggcatcgctcatcaagaacagtcgttttaccactttcttagagaatgtttgattccgttgaaaggtgtcagctagtcaagttacttagttatcttccaaggccagcatatggaggccctttgctaattgaaacgatattttctgattttttagcatagttctttcatatagaagttttttttttttttttttttaattatgttacgagttagatgaatttcattggaaatgcttgtagatgtcattaataattatacattttcatgcttattctgatcatctaatatatgttgtttacttctaatcaggctttgactttgatactgttggattttcctggcct

SEQ ID NO: 100641 - DNA, 622 bp, Mimulus guttatus
  Intron number 1 from transcript mgv1a006021m (locus mgv1a0 06021m.g) derived from phytozome v7.0 (chr-ID scaffold_66; pos 912671 to 913292)
aaggtaattccttcttcttctttttttttttttttttttttttataaatttcccccctttgatttggtgaaatgcaattgcccttttgtatttatgctctgttctgttgaattgattttgttttttgtttgatattgtttttttctgggcaaagctgctgcttcatatgtttgactctctctctctctctctctctctctctctctctctctctctctctctctctctctctctcatattttgggggttttggtgctctgttttttttagatggtggaagattttgtgtttagggcttagagtgtaagtgcaaaagaaaaacaattacataaaaatttaaaaaagagtttttcgggttttcgggttcagtttcggtttgatatacttgaaacccaataattgtagcaaaataattgaagctatcatggagttgaatagtaataattctagcaaatttcagttataaataaaaaaaaactaacaaaattgggagctttctttctaattcggaaaaaaaaaaaaaaaaaattaatcgcctcgttttctttgtaattcgaaaaagaattcgatccgtctcaaactccaatttttttttttttatttgtggagtttcagtgacgac

SEQ ID NO: 100642 - DNA, 810 bp, Mimulus guttatus
  Intron number 1 from transcript mgv1a005751m (locus mgv1a0 05734m.g) derived from phytozome v7.0 (chr-ID scaffold_212 ; pos 187421 to 188230 reverse strand)
cttctccatttctcggccacacctcctttcacgccgtaagcttcttccactcctcttactaaccacttgattttgtattttttttttctctaggttcttctcttcagttctaacatctagaatttcgaggaattttgattgtgttactctgggtctctgaatttcgattgaaacttagaattgttgtttgtgtatctgtattaatttgaatgaattaatttcatcaatttgtttgcgctgcatgaaatttgtcatgttttttgttgctccaattgaaatacgtttgaatagcattgggtaatgcaagtagtagggttttgattcgataggagttgcattgtgcatgagttagtcagcaaattgttggcagaatttgtgtacgccgtactgtcaaaagattgaattgctgttaatttgatttgatttttgtagcatctcgtttccttagcaggttttttttcgatgcaatgttctttaaaacggtccgagtccttgttttgtcaattgaaatttgtatggaatatcctacattctcttatgttatggtcttaaatatgggcatacaattattttcgactcgctcgatatcatattttacaagacgaggtttatttagtttcaaggaaactgtagtatgtcttgccgttgaatgtgctattcatctgatggtgctctttatttaattgtttcttcgtaaccgagactagacatgttttactgtttctggttttttttctgcttagcgaaattgactaatttaactctcttactacagaggaaaacatctgttaatagatacagacgtaattc

SEQ ID NO: 100643 - DNA, 1048 bp, Mimulus guttatus
  Intron number 1 from transcript mgv1a003324m (locus mgv1a0 03324m.g) derived from phytozome v7.0 (chr-ID scaffold_3; pos 1962049 to 1963096 reverse strand)
caaacaaggtcggcccttttcacaaccctaggtaaatattcctctccttttcgtgatttttccttcgaatgttcttattgtatatgactctagatactgcattggtgaaattttggttggggatttgattgctagggcttaattgcatattggctgattcttgtatgctgttgatttggttgttattgctgtaattttgatcgattggtgattaattggtttgtgaaatttgaggatgattgagataatttctccttgttgatggacactgttaagcaagaccagaattgaagggagtgagttttggctttgattttacatgctaaaaaaatggtggctatggtacaaatctaactcgtgtacggtactaaatgcaatttgtaaacttctagggttgagtgtagtttaggacatgccatttatctatggcagacaatacagcttaatcttgatactgttgaagggggttttcttgaaataagtaaggttgaagtggaaaattcatggttgttaactggtattaagccagtcactttttttttatggaagaggatttcaatgactgtgttcaattcatttcccttctagcgttagaaaaccaaaataaaaaaaaaaagaagcaaatatggaagaatcaaaagcattgtgagtaatgaagtgattattccttgtataattatcccatttagttttttgatgaatgccacaactccaccttaaaaaaatttaagtcctcaattttagttaaaaatttggctggaacctggttttaaacaaaaaacattggcaaacacacacggatgttggccttaaaagcagtaaggtagcttttcatgatgtattctcgagtaaggtttctctgaggtgatcaactgctttatttttgcaatatgcatgcaattttattttatgtatgattatgtattgcatatatttgtttcaaaatgttagcattatcacctattaatttccttttgttatgctcatatcctgttatttgttctaatctgcagcgaaacataccgttactttgatctcccattttgtt

SEQ ID NO: 100644 - DNA, 745 bp, Mimulus guttatus
  Intron number 1 from transcript mgv1a015223m (locus mgv1a0 15223m.g) derived from phytozome v7.0 (chr-ID scaffold_2; pos 3422526 to 3423270)
gattccaaggagccccacaacccatttttcttctggtaatattttcatcgaatctgatgatttgcttaaatgcccattttaggtttaatttcttgcttcttcaactcgctagactatatccctgacaattgaaattggggtttattgaaacgcatttgtatataagaagaatcagagctttttttttctcattttctaactgtgatgaattgctgtacatgagttgtctgaacttattgtgtggtttacagcccgttcacatggtgttcgatgaattgtctgaatgggattctgctatatgcaggcctattttgtggatgaacatctaattgcattcacagtaaaatttattaagcaagctatagagtatgtaagctcaaaacaaggtcttgtatggaatttatatattctcgagtttcagaaacgcagatctgtgaatttccaaaaactcaatataaaattatttctctctaagtactggaaaggaaaatgcgtttgttagtaaaatacataagatcactgtcttctgtcttcggtgcatttagctgtactgtatctgtgtctctatgagagattattacgaatacggaaacaacttcttttgctgatgacctacacgtcagaaacgcattctcaattcaaaattgcttagtgattgccccttaacgattctcatttcaaatatgcgatgaaaagaatatcattttccgtttgggtgtaggctcttctttcaagtcagcgcaag

SEQ ID NO: 100645 - DNA, 1058 bp, Mimulus guttatus
  Intron number 2 from transcript mgv1a015733m (locus mgv1a0 15733m.g) derived from phytozome v7.0 (chr-ID scaffold_3; pos 1024207 to 1025264)
atttccctcctgattatcctttcaaacctcccaaggtacttaattaatttctactgcattttattctctattttttttagattaagttacgagcggatcagtcgatatttaatataaattggattccactatttttttgacaagtggcacactcttaagtcttaactcttaataaatcacgctgattataattagggttatatgggttacgggttatgctgatgttttctttttcattttttttttccagttattagaattgtaattatatttttatttaaactatccacatgtcaatcatcctatgacatccgattttcctattaaaacatgtcatccggtctaaatttgcacttttttgtacccaaagagattcgaacatctgacctctcaccaaattttttgataccactatttaggttaggaccggcccagggccggtgcaaaaggggcaattgccgaaatcgtcttattaaagagattttgtttcgattttgaattatgaaagattttattaaacggccctttataatctcttttggccaaaaaagagaaggaaaaaaaaaacgaatattcgaaatttaggcaattgacaaattcagttttaactttcaaatatttcaaacaatctattttcttcggttaataaaatcaatcatcagtttcaaattgttttttacattgaactaattattatatacttcttgctttattaaattaaaattcaaacatttttaaaattttatagctaaatatttgtatgtttgattttattttacatatatacatcttcaagaaaaagttctgagccgttgcccttacccccgtataaataatatggctaaccaaacatcaaactaaactttagtatttagttaattttggccaatcttggcaaccaaacgggccggggccggagcctacaaaatattaatatatctattcttttattaaaatatgttttttttaataattgaagtaatttaataatgaaatattaatattaataatgatatgatgcaggtagctttcaggaccaaagtatttcatcctaacat

SEQ ID NO: 100646 - DNA, 610 bp, Mimulus guttatus
  Intron number 1 from transcript mgv1a008754m (locus mgv1a0 08754m.g) derived from phytozome v7.0 (chr-ID scaffold_11; pos 597831 to 598440 reverse strand)
tgctataattcgtcatacatcaatcgccaattattgtaagtagctggtttatcctttaatctgctctctgtatttttttttcgttttcttctttgttcttatttcaataatcggatctcgttgtttgcatatgtttttttgaattttttgtgttcgatttggttttctggttttatatttctttctatttttcatgtgctcttttctcatgcttatgtaataaaccctagctacagaatgtggttccgattttgtgaaatatatgtgcagatctatttagcgaaaatcgactaaatacaaattaatgtttttgttgagtttcactctaattgtaaatctatttacctaaaggcgaaaggagatttcaaaattaggtaattgtgtttcaaattggtgaagtttctggacttgatagaaactaggtagaggttataagtcctggggatttaattttcatgtttgaaatatttcattagcatcttacagagcacctaatgcgtttttttccggctaattgatgctattttttgttgtttctgctgctatttttcccttgctagttatgttgttttctcgtctaacacgcgtttcctttttcagggataattga

SEQ ID NO: 100647 - DNA, 873 bp, Mimulus guttatus
  Intron number 1 from transcript mgv1a005281m (locus mgv1a0 05281m.g) derived from phytozome v7.0 (chr-ID scaffold_69; pos 868933 to 869805)
accagcatcactctgcactccatccactgcttcaggtaatataccattacgtaactttcttgcgatttttttcgatttttttcttttttttatttgaattttctgcgatttttttttttggggccaaacatagtatatatttatgaaaatttcaagaattgaggaataaagtaactatagaagcctgtattcatcaataaggttgataagcatgcatatataatattgtgagattatatagttgaaagccagtcatacttgaattattctggaaatttacttttattttggtagcaaaaaagaagaagttatatttagttcatttacagcagtaatgcttgcttttttgctctcaatgataatattatatattttatgaatttaattatatacatattttattaattatattataatttggaattattttatgtaagaagccattataaaatgcactaaagttgttttcaaccttaaaaaaaaaattagtgactcttttgcttcatggcaagaagaaagcaacaatagacaacttgattatgtgccttgtcttgtattgctgtgtgttttttcagtgtgtaaaaatgtgtgtttttttggtttcatgtaattgtcccatatatatatattttcacctaatattgatggaaaataatattttaatggatccaatgcaaccccattatgagtatttatttgtagaaaatataatctttaaatggtcataaattagttgaaaatttgctttttcagttttccctttttatttttttattttttttagaaattaattcttaatatatgataatctcttaattaaatcaaacatgaatctcaggttcaagcaagaagcaatcaacattagaggtcata

SEQ ID NO: 100648 - DNA, 175 bp, Mimulus guttatus
  Intron number 2 from transcript mgv1a004514m (locus mgv1a0 04514m.g) derived from phytozome v7.0 (chr-ID scaffold_11; pos 1369746 to 1369920 reverse strand)
ctgattcagggactgtggaaaacaagtctacttaggtttgttttttcttttctccaaaaatatatatatgtatatatataattaaatttattcgaattgatttgattggtcaattaaaccttatttctctgcaaatttcaattttatgtatctataggtggatttgatacagcac

SEQ ID NO: 100649 - DNA, 862 bp, Mimulus guttatus
  Intron number 2 from transcript mgv1a023590m (locus mgv1a0 23590m.g) derived from phytozome v7.0 (chr-ID scaffold_16; pos 2111235 to 2112096 reverse strand)
caagattgcttcagggattgctggtaattactaataattaattattgggtaaattacaattcacaatcaccctggattattatcaaattacgaaaaagccccctcatattttgatacttgtaacttcccctgaactatgaatcttcttacacgtccacccttatggtgtcaaatttaacataatcttctacattaattttgtggaatgttctctaatttgtattcattttgtgcaaaaatacagtttctgatgcaccacaatcttatatatataaaagccaaaaaacacagatcttatgatcatcttgcttcaaaatgtggagctcaaatgggataaaacgggtacaaaattgagaatattccatataatctacaagattccactaaatttgacaccacaatggtggacgtgcaagaagattcatagttgatgggtagttgtaattatcaaattaaacatgagtgtttttttcgtaatttgaccatacatcatatgatggcgttgtagtttacccttaattattagtcatattcaatattttgtgtacaattaattttcttgcacttttcactaattaattagattagtggtgcatgtttgctattctaattaaaaacgtgtttttgatgtacaatagaacctcgataaattaataacctcgatttaataatagcttctctcgatcctgattcggttgaaaacatgttaaattattaactcggtaatttaataattcgctaaattaatagaattcctctaattccaactatattaatttatactttatagaggtttaacaatacatatggttgtgtaataaatgtagggtttaccactggatctccaatcaaagtagaagtg

SEQ ID NO: 100650 - DNA, 634 bp, Mimulus guttatus
  Intron number 2 from transcript mgv1a015294m (locus mgv1a0 15294m.g) derived from phytozome v7.0 (chr-ID scaffold_7; pos 3081649 to 3082282)
ttttgacaagaagcctgataattacttctgtcctggtacatttttttattattattttctttcttgatattatatatttctttaatttccacctcatttttaaataatttaaaacatataataaaacaaaattgtcgctttatgtttcggtctaagggtgtaaaatgagttcgagccgggtcagctcatttacacccctatttgggtcttctagagatatcacgccttgggagagaaatacgtggatgcgtgtaaaatatgtcgagagatgtataaacgtgtatgatagtttataacatgatgaaatttgaaattcgtcgaatgaaatatagaacaaactttattaattgtattaatatatagaacagtcaaatttgcaccgatttcacattttgtccctacgtttcaacaatttgacagctttgatcatttccgtaaatttatcggtagtccatccgttaatagagtgatggacatagtactaatggaaagttaacgcaaatgacctaaaacgttaaattattgtaacatgagggatgaaatgaggaatcgagatagggacgaaaaatgtaattttctgaatatatgtgaaattgcagtttgtggtgcaccaaagaggaggtttagggcatat

SEQ ID NO: 100651 - DNA, 585 bp, Mimulus guttatus
  Intron number 1 from transcript mgv1a009419m (locus mgv1a0 09419m.g) derived from phytozome v7.0 (chr-ID scaffold_2; pos 177382 to 177966 reverse strand)
gaaaaggaaccctattagtttcttctcgcttgaaggtttcatccccaaatccccaatttttatctcgatttttttgtttgtaatatgtttgtatctgtagatatgaatgtatatgtaggattgaactttttagacaaactgaagattttatatttattgtttgaatttaataattcgtaaaacttgtttgggttgtgattattgtataattggagaagattttctttcgtacgtgatcttgagatttaatctgccgggttaagaattaactaattgaattgcatcatttgaaagattaaattttatgggctgaatcactgtatcatggtaatctttgtcgtgattgtacgcatattgacaaaatgaaaactgaattgcttgatttgaaagaagatcaaattttgtgtgctgaatcactgttttcatgataatttttttcgatattctatgtatcttgaacaaatgaagagtaatggatcttggaaagatcacagcttgatgtgctagttgattttttgttgtatatttatcttggtctttgatgctgtagtttctttggagaaaaatcaaggacgcttcagaatc

SEQ ID NO: 100652 - DNA, 554 bp, Mimulus guttatus
  Intron number 1 from transcript mgv11b020794m (locus mgv11 b020794m.g) derived from phytozome v7.0 (chr-ID scaffold_3 7; pos 194489 to 195042)
gagccataagcgagcagggctccaaaagtttgaaggtacttgatattttgctagtctttgacaagtttattttttagtggtttattttactgttatcggtgttgttaaatatctgtgaactatgcagctgctgagatttctttcggcaaaaatggagtggaaagtgataaagaaatttctcatgatggaataaccgtaaccactgaaaaacccgcagagatgaattacaatcaaatacgagctcgtcttcagcgtctgaacttacaacaactcttcattccataagatctaaaagggaggatcacatttcacgggaggtacattgtacagatccatgtttatttgaattttccctttcccattagtttatacccgtcaaacaacggcactctatgaattagtgtgtgtgtgtgtgtgtgtgtgtgtgtgtgtgtgtgtgtgtgtgtgtgtgtgtgatcaagaatacacaacttttgtttatttagtggaataatgttaataataagtgttttttgttaggtaactgcaaattctagtgatttgcggaagttttc

SEQ ID NO: 100653 - DNA, 685 bp, Mimulus guttatus
  Intron number 2 from transcript mgv11b020794m (locus mgv11 b020794m.g) derived from phytozome v7.0 (chr-ID scaffold_3 7; pos 195152 to 195836)
tatgtgtgtcgtctaatatatttaatggtatttttagctctcatcctcgatattcaatctcctcatctgtttttattctgtcagtgatgcgcaaaagctagtcgaagtgaagcagaaacggatagacggtgcccataaagctttgcaacttctcagaagcacctgcatagtttggcctaattcagcttccgaggttctattagtcggttctttcgatggatggacaactcaggttagttattttcataattaagagttcaacagataaaattcgtaacgaagtaattggagaactatacgtctgaccagattcccgtttattactatgctatatttccttgggagattcgccatttgaccccattttttgtctgttgtcaaaaaatctaagtagaagttgagagtgaactaactaataaggacattgttaaagaatggtttaaatttacgatccttgattgataattaaatgtgtcgttttgcatttgatgaattgcagaggaagatggagaaatcaagaacaggcgtcttttctgtgcgcttaatgctgtatccagggagatacgaggttagtacataaaaccctaattaatccatgttaactgtttagttacatgcactaatcaaaggactactataatttcttgcagatcaagtttgtcgttgacggtgtttggagaattga

SEQ ID NO: 100654 - DNA, 846 bp, Mimulus guttatus
  Intron number 2 from transcript mgv1a009230m (locus mgv1a0 09230m.g) derived from phytozome v7.0 (chr-ID scaffold_4; pos 3968601 to 3969446 reverse strand)
tggagaaattgtaccgatccactcgttctggaagggtaattatattatctcgtcgttgtggatatctgtactagggttatcatgttcgtttagtagtgaaaaaattcgtgtaatttaagtaaaatctggtctacagctgtacttgcagaacactaattgctcaagtggataaattagatggcaattcgtgcacgaaggttgttctgttattcttccgcactgctttgattgaggatctgtggatattgtatccatgtgaattaagagccactggatttaggacattatgataaggaataattattagaagtaatttcaactcagccgcacttagatcttgttttaagttttcatttatggagctcaacgacggaaaagttcgtgcttgatatttgatttttatttatgaacaaactaccattttagatatcgatgcaaaaggaagtgatctgaatttcaaggtttaatgtagtatttcctcatctgaatttcatagttttacctttttcccccgattacctgagtaaattccacctagtatatccttcaagtatgtatgcattttgttctttatcgaattaagagccactggatttaggaacatttacgacattatttctatttccatttttttatattttcattaatcctgagatgtgggcaagataagcttcatgcaacgaaagattggtactgtaatttagtttcgaggtcaatccagactggatcagcgataattctttgatttttttgttttgttttgtatcacagtgtctcttggtttcagctatgcatgttttctcttttgtaggattttcagaaagaaatagtcaaagcagctgaagc

SEQ ID NO: 100655 - DNA, 406 bp, Mimulus guttatus
  Intron number 1 from transcript mgv1a013458m (locus mgv1a0 13458m.g) derived from phytozome v7.0 (chr-ID scaffold_58; pos 745733 to 746138)
agaggattctcaccacctcaaaaaagcttttcagggtatttttttatttatttttttaattatttattatttatttatttgaaatttatttcttgattaattagatctatattgtgaaaatcattcatttttgtgggaattaatatacttatttccgaacataaaatgttagtaaaatctttcgtgtatatatataaatatatatgatcaatgatcatcgttgtacattcacagtttatttatttctgaattttgttttagttaaagaaaaaaaaaattataatatgttgttctttaaactaagcttaatttattctatgaagagcatgatatatgattatttaatttggtgaccaatttgatttttgcaggattcggcacgaacgaggcatcgataatcgagatc

SEQ ID NO: 100656 - DNA, 532 bp, Mimulus guttatus
  Intron number 2 from transcript mgv1a013458m (locus mgv1a0 13458m.g) derived from phytozome v7.0 (chr-ID scaffold_58; pos 746215 to 746746)
aggacttggagaaagaactctccggtgattttctggttagtttccgatcgattttaaatttaaggcttcgtttggattgaagaatttgtcggtgggaagttcgattctataattaacaaaatttactaaattcgtttggatttcgaatctatttcatttggagttcattcgaaatgatctcattttgtcaaatcttcctcacgaattcaaatccgagttctttcgaccttctcagatcataaattaataatggattcgtgaaaatcaaatatatttgattgctctttcgatctttattgtacattgggccgaaaaagaatccacatttcaacaaaagaaaaaaaaaattagaatccttgttgtttcgatatagttatacgaacatgttgtaatattgtttattgcttatgttcttcttttaaactctgtttatattgctaaaatgtatgtacattgtatatatatatatgtatatataatgtgctatttttatttagcgagcggtatctctgtggacgcttgatccagcgga

SEQ ID NO: 100657 - DNA, 940 bp, Mimulus guttatus
  Intron number 3 from transcript mgv1a008335m (locus mgv1a0 08335m.g) derived from phytozome v7.0 (chr-ID scaffold_25; pos 1157598 to 1158537 reverse strand)
ccagtggccgtactactggtgagcattctgttatacgtcaattgttttgttatttccatatattcgagttgtttgatttggggtgtaaagctaattttgatccgaataatcccgatttcggaataacatttttcattctcgaattccgatttttattggaatgaaattggaatatatgtttgattccgatttccgatcttatttaatttctgaagatatttcagaaaattctgattttttttccaaatattcaagttatttgatcaggggtgtcaatttgaacgacatttcctatttccgccaattttgattccaaattccaatttttgaacaacatttttaattccgatttccaattattcccaaatttttggaacaaaattggaatacatattagattccggtttcctatccgatttgaatttaaaaaaatatttccgaaaatttcaaatttttctgaaaattgcacgtgtaatatcaaacttattatggatcttattccgaaatccgcttcctacacgaaaaaatttccaattccggaacaagttctttcattgcaatttccgaaattccgatttccggttttctcaaatgtattttgaatggaattggaattagtttttcactaacgaaatatactggaatttttccgaaagtgataattccgttccgatccttctgtcctaaatttgattgttggtgcccaacattttcaagcttataagttaatggaatcacaaactaagttcactgatatgcttttacaaattccaaaaattgtagtttaaagaaagtgtttcttacaaagaccctatgctcgaaactgccattgatatcctcagctactaatttctcactaattcagttaataatccaattttaatgctaattactattcactattcctgttcttgattaggtattgtgttggattccggtg

SEQ ID NO: 100658 - DNA, 320 bp, Mimulus guttatus
  Intron number 1 from transcript mgv1a017785m (locus mgv1a0 17785m.g) derived from phytozome v7.0 (chr-ID scaffold_252 ; pos 152678 to 152997)
caacttttccgatcacggtcccgatattttgacacgtacgcaatttgttctttgtttttttttaagttcatgcatgaatgatcttgtgtatgtattcttttatggattatgatttttaggttttacgattattttcatcttaattgtattaaggtttcttgattatttttaattaattaagttgtcaacttttccctgttcatgcgtgatcttttgatttttaattttatgattattttcatcttaaactcttccatgcatattgatcttgaattcttgaaaatatatacaggcgaatatcctccagttggagacaagga

SEQ ID NO: 100659 - DNA, 644 bp, Mimulus guttatus
  Intron number 1 from transcript mgv1a000027m (locus mgv1a0 00027m.g) derived from phytozome v7.0 (chr-ID scaffold_54; pos 1091814 to 1092457)
ttcgaaaaatcattcggtatttcatttcttttggttactttcatttcatttcgtttattttgtctgttatgttgtctcatagttgtatacttggcctttgtttgtgcttcagaagtttttgtactttcgattttcggctaatagtaagatttgttttcacagtggtactgtaagatttgttagcttttgattgttaatatagcttattgaacttcgactatcggtcattggttagttcgttgctggttttcttttccagttattgattgaaggagcgcagagaagtttctgcttacatttccgcaattgtgcatatataacatatatatacctaggtcttacatgatgtatgttctcttcttcgaaaatgtgtgcatcgattttgcagtataaattattcttaattattttggattatatcgtttcttttttcgtatttggaatgagacctctctgattgatttgttgaattaagcttcattcatagaacgtgcaactgtatcacacatatgttcatgttttatatcatgtaactttttcaatcgatcatatagtgtcttgtctgtatctcttccccttctgtatatatacttatatatgtttcaattgactgaacatttgatttgtttttctgggcagggatc

SEQ ID NO: 100660 - DNA, 826 bp, Mimulus guttatus
  Intron number 1 from transcript mgv1a025762m (locus mgv1a0 25762m.g) derived from phytozome v7.0 (chr-ID scaffold_25; pos 1560633 to 1561458 reverse strand)
ggattagtcgagccattgcgacacccctcaaaggagtcgttccccacttgggagctactttaccatattccaaattccatgatacggagcaatagttgaggggtacttgtaattgctgaaacgacaggggtgcgtaagttatttactcatacctcatagggcccgcgtaatttaccctagaaattagtaatggctaacatcgaacctcatatacagtataacctcgataaattaatacccgataaattaataacctctcttaaataatatatttttccggtcccgattcggggacaacgtgctaaattaataattcgttaaatttataagataatacacattcgaaaattttaagaagccccatataatggggataactatttcaaatactaacttttgcttacttgaataccaaaaaaataaaaaataaataattaattgtaaattactttaatgcccttaatgaaaattaaaaccaaaaaaatattacaaatactatttttctttcttaaataccaaataatcaaaaacctaaaaaaaacatttcccctcctcactcacaaacccctcacctcctccacctccttcttctccctccccaaaaaccctcctaaaaaacctcaaaacaagagaaatcaaaaccttacacaacttgcaaaatggcgtcaaatgacaatagaatggtagtttacgagcaaggagaacccattcaagtatgtattcatgtattttttgagctaaaacatcgattttgaattttttttttttttaaaactcgccatgtattttcgacacatacaggtcgaaaatacccttatttttcgac

SEQ ID NO: 100661 - DNA, 745 bp, Mimulus guttatus
  Intron number 1 from transcript mgv1a009908m (locus mgv1a0 08731m.g) derived from phytozome v7.0 (chr-ID scaffold_54; pos 670581 to 671325)
gccacttccaaattaccgtccacccgaacgacaccgtcagtaacttttctttctctctctttctcgttgcatctgctgagtattttcttttaatttttgtttttaataatggcgtattgagtatttaatttttttgatttttgattttagaatatttagttaaagttcccagcttttacatgcatttggcttaattaccatcgcttacttattttttttcaagttttgattggataatggggttgggttaatcgaccttttgcgtgcattactcgaatccacacttacatttgttaaattgcttgataaaaaatataaatagtaggtgagcttgcaaaataacttttaatttagaagattttatatatatttttgcttattggatttcatcagatttgttatatgttttaatgaggcttacgggtgaaaatgctgactgtattttcattgttcaaacggaatgttagaaagtcgcaaactgttttacagtgaatttgtttccgaaatctgaagtaacatatgtcaattttcaatttctagaatgtagcgtgtatgactctactcggcaattccaagtttgtcggaaacgtatgtggtggtctcttctttttatttgattgctacatcttatacattttggaactgtcgtattataaatggtgtttttgacttattatttgctctcatagtatatttccgatattgttgaccgatcaagattgttggttatttatgatactaggta

SEQ ID NO: 100662 - DNA, 851 bp, Mimulus guttatus
  Intron number 1 from transcript mgv1a003746m (locus mgv1a0 03746m.g) derived from phytozome v7.0 (chr-ID scaffold_4; pos 2133222 to 2134072 reverse strand)
cgacggtccacctagctccgccgccggcaatccaggtatacatacaaatatacacgagtgacaagtttcatggcgattgcacacgtgcttctatgaaatgttcagtttatttgcggagtgcgcacattttcctgatctggttgttgctggagtttttccgaataattgtttacattcagtaatgaacatcgcttgatttcagatagtttatcgtcggtttctttcaggagatttactgacgtgattttgaaaaataaataaattattaggacttgtttccggtgcattgtatttcgatgcttgaaattggatcttaaaattgaagtccagtaggattccaattcaagtttctatagatttattacaacttcgacgatctgagcctgctaaacgcagccatcgactagcttaagataatcataaaatcgtctcgtatagttcaattgagttgagttcctccattttaatatcaacttgtgaaggaattaattgtatctcgtttgtgctcgactgcaaagcaaactctgattcttaggatagcaatataattgatgttcagcaaaagttctgaggttttagaatttagaatttagaatttagaactatttatttgttttcttaatcttcgaattggattgagacaaatgcttgtcgtgtttttacatacaatggatagtatttatacttaaatgtccctctgactcctatttcttaccgtaaactgagcagttttcagatatgctattagtctagtggttgacctaagacagactctattaggtaccagttaggacttacgagtgtttgaacatgcatatgagataaatttgagttgtcgcctaaaaacgcag

SEQ ID NO: 100663 - DNA, 912 bp, Mimulus guttatus
  Intron number 1 from transcript mgv1a014533m (locus mgv1a0 14524m.g) derived from phytozome v7.0 (chr-ID scaffold_92; pos 1020308 to 1021219 reverse strand)
gtttttgttttctctctgatcctctaaaatccacggttagtttcttcaatttttgtttttgttgtgttgatttttgtaggtttattttaggtgtggatctgttggattttgatgtattatgcgtctgatgaagtttgggtttgtttttctctttttttctttgatttatgtgtttattatgattggatgctgtttcgttgttcgctgttgggtttatgttgattgttcgttcaattttgaattttccttctaattttgcttcgagatttatttttttctgtttatggttttttacccgatttgagtgtttggtgaggattgatgatgcttatatttgaagttatttgttgagaagattggtaaaagctgtggcttttaacatattttaggtaaagatcccatcttttttcgatttcaattggtttaccattaaaattgttgttaatagctgtagcagtatatgttcgagcatattactctttctgtctgggaacaaatagatgttttcgaaactatctatttgctggattagcttgcttgtaatggtaatttggtaaaccatcgcttatctgctattaccaatatatgagtgtgatcgtcgatagttttctttgatttttccggaaaaaaacgcaagttaccgattgaattcttaatgccgttagatttcgaggggggtcaaattacatgtaattttttgcaattgcttgaatcttttgaggggaggtgttgaagttagtatattcttttccagacatggttggtctgaaatactttgccacgatcgacggaaatcagaaaaatatattctttactttctagattgttccctcaagacaccaaaaagtgatatgtgcaagattattatatcattaatttttcatgtcttcagagcagcaaaaaacttacgag

SEQ ID NO: 100664 - DNA, 818 bp, Mimulus guttatus
  Intron number 2 from transcript mgv1a016398m (locus mgv1a0 16394m.g) derived from phytozome v7.0 (chr-ID scaffold_36; pos 1083065 to 1083882 reverse strand)
atcttcaggtgattctgtgattacactcataattgtttatttaatttttttggtgaatttgttgtatgtgtttgattttttttttttttttttttttatgtctactgtggttgatttttaattcctgaagaaatgtggtaaccgaaacgaaaatattcttcgaatgtacgaatcggcttttgttagtttcgctaatgtaaatgtggttttttgtttcctttaaagtaaactaacagtgttcttgatctacattgaagcaatatgatttatttcacttaagttatatgcttgacccgattggtcaatcacgtaaataattctaattgcaaacgagttcacccgtaagagtgagcttcttgtaacaaactatatccttcatcatctgtcttttttcgtttttgcttaatgttttggttgttttggttaactgtatcgtcacagtatttttcagttcgtgaaatctagtattgtttgtgggaacgatctattttaatgcattattcgatcaagcggacagtgttcgttgtattttgccttagtgtagagcaagatcttgtcttctaaggcctcgtttggttggggagattagccatgattaactaaataataggacattgtttcatgtttgtatccccaataacttgccgggtcgacccgcaatattatgttgcctttcagacaagttttttttatttgatcatcgaaggtccaataatataattgggtttcattaaattatttaatcttatcttggcaaccaaacgaggcctaagcatgttgttttacttattattactatctcttctttgtcgcagcgt

SEQ ID NO: 100665 - DNA, 781 bp, Mimulus guttatus
  Intron number 1 from transcript mgv1a007869m (locus mgv1a0 07869m.g) derived from phytozome v7.0 (chr-ID scaffold_142 ; pos 441406 to 442186 reverse strand)
agcttattaaaactgccgtaagccattttttttccctttttataagtgcgtgtatttgtgtttttttttttttactgtattgtatttttattttttaatccatggtttgcatgctcttttggtacttagatctcatgatcgagttgcttttgatttaattttggttgatttattttagatatagtgctttgcagtctaaaaacagcattatgattttttgaatactcctcttgaatttggggagtttatttatttatttatttattatttcattttagaaattgtggagtttattttcttccattgctaaaatttgttgagagaattgaatttgtaatttgtataataaatggcaaatttcgtacttatatgattctgaggtcatgattcacgctgctgtacaatggcacatcatgctttctaataaatattattgttgactgcaacagttgattctttaatcatatttcgatcccacttccagttttattctaaattaatcggaaagtgggtttgattaggctctaatcacgtgcttaagcactattcttttggttggtgagcattgagatattttatagccaccttatttattacaataaactatataaaattacgtgtttgaattttataacgacgtagctgtagtaacatagtacagaactcgataaaatccatttttgttttgctgcactttattacaattcagtgtcaattgatttctggttcgtttatgttgtgagtagaaatcaattgcatcaccgggtaggggaatccttgc

SEQ ID NO: 100666 - DNA, 446 bp, Mimulus guttatus
  Intron number 1 from transcript mgv1a006935m (locus mgv1a0 06935m.g) derived from phytozome v7.0 (chr-ID scaffold_37; pos 1061457 to 1061902 reverse strand)
tttctaggagaatcctcgacgcctttgttcccgaggtaaaaaaaaattggtgcttaatttaatggtgctaggagagaacttgttgttgaatgcttattaagtagtaattattttgcttattggcttgatttaatatgatttattgatcatgcgaaatgtatctatatataatcgtcttcgttttcagtggagggattttttattttatttttaaattcatccatgatttgagctgtttggaagaaattttttttgctttttattcgaaaagaattgtcaattttaggttttcttcccaaaaaatcgaaaatattaatgtcacgagctatgagaattaaacttttagctttcgttttgattacgcttgcttagtcgtagaataattgccgtttttttctgaaatgtgtgtgaaatgcagggatttccgagcagtgtgactcctgatt

SEQ ID NO: 100667 - DNA, 636 bp, Mimulus guttatus
  Intron number 1 from transcript mgv1a010932m (locus mgv1a0 10932m.g) derived from phytozome v7.0 (chr-ID scaffold_249 ; pos 83650 to 84285 reverse strand)
agaagattaagacacctcaaacaccttctcatcaggttttttttaatcttatctttcttccttttgataagattaattgaatcggataggatgggataggataggattatcttatgtttgttataataggggttgaggttggactcaatatcattcatgtacttcaagtgtttgattaaattcccgaaccaatttttaaaatgcttgattatatagtctatccttattcccaaacaaggccgttgagtattaatttgttatactattttaattgattggtttccatgtctgaattgattgcatttgtgaactttcgtaagttaatagactcgacgatcgattggagaagaaggtgagtttgtgtaagagttgttacttgacaatgtctcccatttaaagacgttgttcgattggtggatttaatttgattttcttttagtttatctgtacaaataaattgacaggatttacgttatattccattgtatgtatttcgatggaaagagaatgcttatgtggaccgagctttctttgatggggttcagtattttcttatgtggatgacttttcgattttgatgagtgaaggttctgttttgtagggttcggagccaccacctccgagaattacgtcaaa

SEQ ID NO: 100668 - DNA, 717 bp, Mimulus guttatus
  Intron number 1 from transcript mgv1a002515m (locus mgv1a0 02515m.g) derived from phytozome v7.0 (chr-ID scaffold_163 ; pos 635754 to 636470)
gcccccgccgctgctgtagatcgtatcctttttttttttatttgagctatctgctgtatagtttcgtataactgtttcttttggctcgttgtctttactgaattactggtttaggtttagttacatcctgatttgattttgatttttggttgagttgtttgtcttggttttgtgttgttttagatctgagcttgttgaatctggtgatgttgtgtggggtttgtcaaatattttcgttttgctaggcttttcagttttttcgagtttcaaccctccaagtgtttgctttatttcttacgtgcagatttatatgttagggagattttctgtgcttgtgatttttagggaaacgctttgcagcttggtgaacaagtatattaatgaagatatgtgaatttttgagttattctcctgactattgtaatttgtgtagttcttttattttatttgctctccagtaggccagttggctattttaatctgagattggatatgttatgttgtatgaggctgatagaatttctattgttttggttttgtaatggtgaaattaattttgaaggtgttttgaatcatttgtgaaccttcaaatcaactagttggggttacttattggttttatgcatttattcctttagtaatttacgtcaaaagttgcattcctttacttttcttgctgtagaggcttcagattatttgcagaagctgtctttggat

SEQ ID NO: 100669 - DNA, 581 bp, Mimulus guttatus
  Intron number 1 from transcript mgv11b024330m (locus mgv11 b024330m.g) derived from phytozome v7.0 (chr-ID scaffold_2 4; pos 229965 to 230545)
cttgaaatttgtgtgtgtgtgtatatatatatatatatatatatatatatatatatatatatatatatatatatatatatatatatatatatatatatatatatatatatatatatatatatatatatatatatatatatatatatatatatatatatatatatatatatatatatatatatatatacatatatatatatatatatatatatatatatatatatatatatatatatatgttttcatgacttttctttgttgtttaaaagagctattcactacgccactacaagttctttagcaaacagttttttaagtctttttatccaattttgttttttgtgtattttttacagactaaaagtaatcagctttgtttctttaggtctgtagggaagactcaaatgaacgagcagtcttctcgaagccattttgtttcactttgaggatcctcggtatcaacgaggtatttattattgctttatattacttgtactttactatcttgtcatcttgctaactgtggtttgattgtggttggttcagagcactgatcaacaagttcaaggcgtgctaaattt

SEQ ID NO: 100670 - DNA, 814 bp, Mimulus guttatus
  Intron number 1 from transcript mgv1a015236m (locus mgv1a0 15236m.g) derived from phytozome v7.0 (chr-ID scaffold_159 ; pos 377924 to 378737 reverse strand)
ccaaacgcgccatcggcgttgaggtgaacaagcaggtacaacacttgttccccctacatttcttcaatttcatttttttctattcaatttttatggtacttgtgttttttttttcctgatgcattactgtagcttggattactgaatgtagttgtacgtggaattgaaaaatgaaattaatctgttataaatggcaattctgttattatcactctagaaatcacatttgtataattcaaatatgttagtattttctacatcttaaaatgttggattgatggtagaattagggattgggcggattgtaattttacgtgtatgtatgaaaatcgacatgtaaatgaccgtgaaatacatatacactacacgcttgtgttgacatttcacaattttgtcttgataagatttagtagtacctagtactgtttttatgtcggttaattcttgaatttgtggatgtatttgatactcgaagagacagtttgactaatacacggtgcttagttctgttgaattaaggtttgtccaaatcgaacatggtgtcttgatctttacttgttaatcgagatgtcctccactgttaaaccctagaaaagaaaacgaaaaaagaaaattagaatgcctaatgagacttaattagtgtctacgatcgaaattttgatttatgttaatagaactagtattgcttttatgcaggttaattatttaacttgcggttgtatttgatcctcgaaaaaacagtttgacgaatgcatgttcttggtttttgttaaattcaggttagtaacagaatcataaggaagaggattcacgt

SEQ ID NO: 100671 - DNA, 867 bp, Mimulus guttatus
  Intron number 1 from transcript mgv1a001500m (locus mgv1a0 01500m.g) derived from phytozome v7.0 (chr-ID scaffold_7; pos 416451 to 417317)
aaactcgttcggtatatttttatttgatcttgtcaattattgcttttgttttcttctgcttttttttgtttaatgatgaaggatttgttgattttgttttgttggatttcatcgaaaaccggggggcctggtgttaacttttatggattttgttgttgtggaaacaattgattggtttgtgttaatgagtaaaagcttgtatgtatctttgggaaaaaaatcaatctttggaagtattaataacttctgtagatttaatcgtcgaaagagtcaaatttattcatacaaatttgttggatcggagtttaacatcttctagttttctttatattgtctgtgtatgttcgatttatgttgagagcaggtggtataagataggacaagagaggttgtttaaaaaccctagaaaattaataatgacacagaatgtaaggatgtgtgttcttttagatttgcattgatgatcgttccgtatccacgtatgtagcactttcatgtgtatgtaacacttcattgattgcactttaaattgagactgcgtgttttattcattacacgtttaatttcttaatccgctacatcgacaatgtacgatactctgtacacgtgtccggtgcgtgtttatagtgaattatcagaatctgtattagttttaattgacacctgactcgctagggttttcatgattttatggtgagtaagcgacaatgactcaaaaggaaggagataaatactaccctacatgaagttcatatatatattttttttattttgtttctactattattattaattttctattcaatgttgttttctgattttaaaactggcttatcaatatggtgcttgcttttgtagaacttttat

SEQ ID NO: 100672 - DNA, 586 bp, Mimulus guttatus
  Intron number 2 from transcript mgv1a006240m (locus mgv1a0 06240m.g) derived from phytozome v7.0 (chr-ID scaffold_663 ; pos 22026 to 22611 reverse strand)
aagattgcggaaaacggagaagaagggcctgaattgtgagcaactttttttttttgtcaagaatcgtgttcttgatatatatgtttattattacttgtgcatagtatgcttgtttatatgggtttgctctctatttgggttagtgaatagtatgtttttaagctactttcgggttctattttttttcgggttagaagaagggcttgaattgtgagtactccctttgaatcaagtagtgtgttattaacattcattaccatttccttgattttgcactcatcactcttgattagtttaggagagattagttaatgggaagggtattttggtcaaattctataaatttgttttcttgaaatccatgcatatagatatatattagttttgttgatatccgcgcactaacccaaaacgactcttattttgaaaaaaagtgagcaactttttatttcaagaaccgtgttcttgatatacgtttattgttacttctgcggagcgtatgcttctcctatttgtttgatgtgtttgctccttactcgggttactcgggttttgttaacaacttggtggtacgtacattgagcag

SEQ ID NO: 100673 - DNA, 422 bp, Mimulus guttatus
  Intron number 1 from transcript mgv1a003047m (locus mgv1a0 03047m.g) derived from phytozome v7.0 (chr-ID scaffold_151 ; pos 273509 to 273930)
gaaacatctcggaagtttcaaggtacttatgtctctttattatttctctatatattttctgtcctttttagcaattttttccattttttctttgggaagaaaccgacatatatataaacaagtgcctgatcttgctattcttatagtttactatacttcttctctgggtacggtggtggcggtggtggtggtggtggtagtggtggtggtgatggttcataaaactcagttgtactttcttttaaaatcatgtggaaacaaaacaaacccatgtacgatgatttgactactttctcataattgtcagaaaaagagtcattattaatacctttcctatgatatcttaatttattaatatttttatatttaaaaaaaaaaattaattttgttttaatttttttttgaatttgctattcaagtac

SEQ ID NO: 100674 - DNA, 485 bp, Mimulus guttatus
  Intron number 2 from transcript mgv1a003047m (locus mgv1a0 03047m.g) derived from phytozome v7.0 (chr-ID scaffold_151 ; pos 274123 to 274607)
atcgaattcgaacaggtcgacagggaaagcaactggttcgtattaattctcgttttccgtttttaattcccccacacaaaaaaaaaatcaatattaattactttgtacttaagtttgatgagatattatactcaaccaaatttcactatatagaaattagtaaattaaggtctcgtttggttagggagattagccattattaactaaacaactgaacattgtttgatgtttggcgaataacttgcggggtcaaccagcaaatactatgttatcttggtttatcttgcttaacattaatcgaaaacataatgatcatattatttcgcctaaggatcggtcactcaaaagattatttcttagcgcttaatattctatatatgaattcaatactagatcccgaaccgacaactattattcgaatcaaaatactaaaaaacccgatttttttttttaaatttattatttgtgtgtatgtatttgcaggg

SEQ ID NO: 100675 - DNA, 436 bp, Mimulus guttatus
  Intron number 1 from transcript mgv1a002053m (locus mgv1a0 02053m.g) derived from phytozome v7.0 (chr-ID scaffold_11; pos 1834221 to 1834656)
accgaagccgaatcaatcaaatttctcgtagataggtagtatgtttgtgatttattatattagtccccatgaatttggatttctgactcttgctggttattttaatttgtgtggatttaggttaagtgcaacggaattgagtgcgaaggattggaaatttacgcggatgatgagatattcggggttacagtttacggaagggcaaatgatgaagatagttaatgggcttgggtataaagggcaatggaagcatgcactctctgttgtggagtgggtttacacctcaaaggagcatatgcattttaagagcaggttcgaagattctcactttctgcaatttttcgcaaaacgtcgttttcttgtgtttttatttcgtttttttgtttgattgggaattttaggtttgtgtacacgaaattattggcggtgcttgggc

SEQ ID NO: 100676 - DNA, 253 bp, Mimulus guttatus
  Intron number 2 from transcript mgv1a013983m (locus mgv1a0 13983m.g) derived from phytozome v7.0 (chr-ID scaffold_4; pos 3233302 to 3233554 reverse strand)
tacaggctcaccactcttctgaatcaacacccaccgtctgtttcttctctctcttcattcattttccatcttttatatgtcttttttctcttcaaattcatgtaataattatttgatttttagtcaaaaaagatatttattatttaattttttttaatttttatttttgtttcctatttggtgtaataatttgaaatgactttaagtttatgtggcaggtttgccctatttgttcagttaaggtttctgggaa

SEQ ID NO: 100677 - DNA, 486 bp, Mimulus guttatus
  Intron number 3 from transcript mgv1a004866m (locus mgv1a0 04848m.g) derived from phytozome v7.0 (chr-ID scaffold_81; pos 253587 to 254072 reverse strand)
gtttacgccccggttggatcgccggtcgatttaatgtatgtcactgtaaaaaaattctatcacttgtatgatgattgttgtgtttattaccttcggcgtaatactatttggttattgcagttcatgatttcaatggagatacgtcccgtttgtttttttggcatgaattggagaaaacagtactctgtttgatgtgacaaatagacaccagttttcttttttttttttttttttttaagttggtcgatttctatttgatggcactgggaaaaggataatccattagagtagtttagaatagtgaaacgaaatggagtttttaagcgaacaaccaaactaatggagaaaaaatatgtttaatgaatgaaatttgacttattgcctctattagtttgcgtctgatttatcgacttgatcatcttaaaaaaaatgcatggacttgtccaatgcgatctgctttcatatctctcaatcttcttgtgtagg

SEQ ID NO: 100678 - DNA, 491 bp, Mimulus guttatus
  Intron number 1 from transcript mgv1a002082m (locus mgv1a0 02082m.g) derived from phytozome v7.0 (chr-ID scaffold_3; pos 2412793 to 2413283)
gtggtgccaaaattaaacaggtttgtctgtgtttttcattttcatcttcttcccatttatatatatctgagagagagagagagagagagagagagagagagagagagagagagatgagagagagatatgagagagatgagagagagatgagagagagatgagagaaatatgagagagagatgagagagagatgagagaaatatgagagagatatgagagagagatatgagagagatgagggagataagagatgagagagattagagagatgtgagagagagagagtacaaggctgttttttttttttttttttttggttttttgaattcagggctgggttctatgtcttaatgttttcaagttatatgtaatgttcaatcttttctttgatggtggttctttaatattaatattttatttatttattttaaattttttttggcgaaaaatgtttagttctgcgttaaatcatcggccgccggaaattcaga

SEQ ID NO: 100679 - DNA, 338 bp, Mimulus guttatus
  Intron number 3 from transcript mgv1a025481m (locus mgv1a0 25481m.g) derived from phytozome v7.0 (chr-ID scaffold_396 ; pos 82012 to 82349)
gtccatttgaaggttagtttgttactcggtgtaaattctgccctttaatttcagtagctatccaatcaatataagtaaggtctcaattttaggttttgctagttttgagttgaaaatcttctaggtcttgttgcctttatactattagtattaactgtagcaacaatctgcaataaaagggaaacaaaaaaaaacacccaacttttcttaattctacgagcatggcaaaaaattgcgacttgtgttgtttcattaaacataagatggatgtaaataagtattctttcttgctgtgatttgcagaaaagttcattgaggattacataaaacagagtctg

SEQ ID NO: 100680 - DNA, 554 bp, Mimulus guttatus
  Intron number 2 from transcript mgv1a005387m (locus mgv1a0 05387m.g) derived from phytozome v7.0 (chr-ID scaffold_113 ; pos 438891 to 439444 reverse strand)
ggtgcaggttcaaccatcctcgtgaccgtagtgtaaagctcccttttttttcggcaagatcgaatttttttgttgttgttgtggcgatcgtttgttaaagagcgtaaattagagatgtttcgtgtcgattttgattgctaatttgggggaaaaatcgaatctttcttgattcgatggggaatctgtggcgtttagaagcgaagtagaatcgggaaaattgttaaatttggatgcttttacatgaattggttaagcatgcattgagctgaattagtgggatttggggtcaaaatcgcgtcttgttttagttgaccggacgatcaaatcgatatggtgtgcatgcattgaagataactagttgggttctacacgatttgatgttaaattctagtaaaaatggagtctttgttcttttagtgagggttataaataaattgggaagtgatatagaagtagagggtaaattgggaaaaaaaacgtaaaaaatttagtaatcgtatgaatttgttgaacatgcattaaagcaatgtggcttcgcttttatgatttaggta

SEQ ID NO: 100681 - DNA, 1049 bp, Mimulus guttatus
  Intron number 5 from transcript mgv1a015854m (locus mgv1a0 15665m.g) derived from phytozome v7.0 (chr-ID scaffold_13; pos 2519064 to 2520112 reverse strand)
gagcccggcaattactatttccaaggtataacttcttttttcttttaatctcgagcttccaatgatgatgccaattattaaatatactttccaaaggtttttatattacttaccgcctcatccctgctacgtgtacagaacacgcttataatgaggaaactcaaatgcaatgtctaataataggttttatatatagaataaaatcaagtgatatataacagaacctacacttgaagaaacatatactaaatcattataaataacaatagattgtgcacttgtcttaacctattacaggtatttctgcttcaagtgtttacagaaatttggccatattagttggctcttaggattacaccactttaatttcatataaatttggaacactagccaatttagagtgggaattggtgaaattgtttctttcctgttttcttttaatttgcatgaaattttcagctccagctctgactgtagcggattttaacatgcaatgtttttgttggctattaaacttaataacacatatattggaaatgaagttcacagaatcagcaacagaaagcttgagaacatgcatcgttgtagatgaagcatttaggttaggcttcttctagctagttaccaggatcagtcagactctacttttgctgcttgaattgaagattctcctgtggtaattaatgcccctaaccaagagcagaacctcctttttcatacctctttatttgttcgagaaatgcaccacctcaacccatacatcttagattatccgattcgttccttccttaaaccaagaacataaaagagaacaacatcagttcaatccaagaatcattgggcagcaaagatagaggatgtaacatgattatttccaacgaaaacaagtaataagtgacagacagggttcgtaagagagaatttaacttcattcatgctccacaactctatcaagacatgggctacttcggaacataataaaaagaccttataaacgttgtttttctcttgcaggtgctggtatcaatttgtttgttgctgagtaatcc

SEQ ID NO: 100682 - DNA, 247 bp, Mimulus guttatus
  Intron number 4 from transcript mgv1a015854m (locus mgv1a0 15665m.g) derived from phytozome v7.0 (chr-ID scaffold_13; pos 2520158 to 2520404 reverse strand)
gcttccctcctgactatcccttcaagccccccaaggtgttttttttttcttttcttttttgaactctttgtttataatgaatgttggattcttgatgaatgactcaattgatagtttgtggaggcattgtatcatttaacctatgtatgtatgtatgtatgtatcagaattatagattattcttgagaattcaaatggtttctcatttttaggttactcttaagaccgagatttttcatcccaacat

SEQ ID NO: 100683 - DNA, 286 bp, Mimulus guttatus
  Intron number 2 from transcript mgv1a005503m (locus mgv1a0 05503m.g) derived from phytozome v7.0 (chr-ID scaffold_154 ; pos 508634 to 508919)
ctaccacaggtaaattgatatattaatttggattaatatttaaatatattgtttttttttcaaattcaaacatgaaagaaataaattgttttttcccgaatttgtaataaattaacatcaatttcattgtttatttcattccccgtaccggctctcaagataacttgattttttttttgtccttacaataaattggtattatacttgtaagagaagaaagcattttaaatgggggatatgtgaatccaaaattgctgatcttaattggttgcagtacttggcagcg

SEQ ID NO: 100684 - DNA, 681 bp, Mimulus guttatus
  Intron number 1 from transcript mgv1a004506m (locus mgv1a0 04506m.g) derived from phytozome v7.0 (chr-ID scaffold_1; pos 3526599 to 3527279 reverse strand)
tcgtttgggctctaccattggatcttactattaaggtactttgctctgttaccgacatattttggtctctgaaattgtgcaacgtttttgtatgtggtatcaaatgtttctcaacactgaattggaatggatcgtcaattacttgtagattcattgtgtttgaatacactagtagtattattgttgtacttctcctaattggtaattgtctggtgattgttacattgtccaaaaacttggatgcttctgctgattagcttcagtttgccaattgatttgaagtgtctaagtttcttgagcttaagtcttattggaactctttggtactattttattgggtcaattcttctgtggggcatcattttacgtattttgattttttattgttaatgacctttgtatttgcagcatgaaattgtgcttttctccctgaaaagaaaagctagtgtaattgctggagatttttgcttatcgttgtttttctatctgtgaattgattccacttggggatgctttctttgcttgtcttttaactattcatgtaggtacttgttatcttgttaaataatttgtgtctgtacaaagtatgtctatccaatgaaatgatttgacaaggatgcatagtagtcttcgctctcgtttcagttctgtatgaatacggtctatttacaggtattttca

SEQ ID NO: 100685 - DNA, 643 bp, Mimulus guttatus
  Intron number 1 from transcript mgv1a004166m (locus mgv1a0 04166m.g) derived from phytozome v7.0 (chr-ID scaffold_44; pos 1494410 to 1495052)
cttgaaaacccttgcttcacaatcgctccgctcaggtgagtagcttcactcctaaccggctcaattctagggtttttgatttgttaattcaattcacctgcttcgtattggggttttttttgggggtatccgtctcagttcgttttctggcgtttgttgtgttcaaaattttgtttcgattggtgtttgtcctccgggaattgcaatcctgaagaattcgatttataggtgtcactaatttctagcttgaattgatttgtaggtcaataatcgtggaattactttcttggatttgggcttggtctatctgttgatttagaagttttctgttttttttcttgaattttgttgatgttttgtggtgaaaattacttcttttagctgattttgttctacgctatttgataattttggtggcgtattgcttgttctttttatgagatattgaaactcaattgtgtgtcttatgttgctgtatttttttcttctgattttagatatatatttttttctgtagtcgatgtcgatatgctgttatgatttatgcgctgctttcttgtatctaaattgttgtttgaaattgtggaggtgatttttttattatctagggctttatcacgggtaaattcgagtactttttctc

SEQ ID NO: 100686 - DNA, 531 bp, Mimulus guttatus
  Intron number 1 from transcript mgv1a023449m (locus mgv1a0 23449m.g) derived from phytozome v7.0 (chr-ID scaffold_314 4; pos 2484 to 3014)
aaatatttgtaagagttgaccaggtagaacttattggaagcttttcaagaaatttccaattttatttttgaatgttcaatttatttttgggtagtagcatttgtggaatttcttatggtggattgtgccctaatcgcaatgtcccgtttataagggttatcgagtattaagcagagagctgaagatttaaaagattttggtaatttgactcgtttccgggttaatttattgagctaatgatgttacgtgcgtcgtcaattttaagtgaaaggttcgtttgagagaaaataggaaatcgaaatttgtttgcggatatctcctcacaaagggagatcaaacatttaatgtaaatgattacttacgttgtgtagtataatccatgaattcattacatttattacgataagccgtatcgaatcgtgatttagagtttaactcgacacatcacatggactataacaaacgtgattttttaaaatttgtgttgcatttgcagctcgagcaacaactgactgaggtggaacaatttta

SEQ ID NO: 100687 - DNA, 625 bp, Mimulus guttatus
  Intron number 2 from transcript mgv1a023449m (locus mgv1a0 23449m.g) derived from phytozome v7.0 (chr-ID scaffold_314 4; pos 3169 to 3793)
cgccagttcggtacactattgcgtcaggtaattcaaatcaagattgtaatttttttttattttatgcgaacttttttaaatcttgaattggatgattatgcattggattcctattaaaattccatcttaacacctctatatattctcctactttagtgctttttaacagaccgtaaaatgaacgtgggttccgttttcttcatgtctatctgttagggatgggaatcggaaggatcgaatcggaattagaacttttggaaaaattccaattttattttcggaagtaaaaaactaatttcaattccgttccacaaaagttcgaagaaatcggaatttcggaaatagaatgaaaaaacttgttcctaaatttgaaattttcggaacggtgggattcgtaaattccaattatttgtgtataacacaaaatgatattgatattataagtgtaattttcggaatttgcggaattaaagttggatcggaaatcaaatctaatatgtattccaattccgttcaaaaaagaatttggaaaaatcggaaatatttatcagtactctataattatcttttttacttgatcttttcactttgtcagataactcaacacgagtgggcggacccgttt

SEQ ID NO: 100688 - DNA, 161 bp, Mimulus guttatus
  Intron number 4 from transcript mgv1a006886m (locus mgv1a0 06886m.g) derived from phytozome v7.0 (chr-ID scaffold_66; pos 8622 to 8782 reverse strand)
tggttagctggtctatcggtctaccaaaacgagctgtaagtttcattttaatcttctctcaattaaaaataaataaatcaaaaatcaatttttcttcaatttacgacatgcataatataagagcagccaatcgacaagaaactactgagccttctcactcc

SEQ ID NO: 100689 - DNA, 568 bp, Mimulus guttatus
  Intron number 2 from transcript mgv1a008176m (locus mgv1a0 08176m.g) derived from phytozome v7.0 (chr-ID scaffold_148 ; pos 477638 to 478205 reverse strand)
ctaagaaaaccgaaaagatagaccacttcagggtaatgaaaattaattaattatattgggtgtttcgctaattgtgaagaatgtacattaaaataaattaataacctcgcttaattaataaagttttttggtcccaacttggtaaaaaagtactgagttattagtttgataatttaatatttcgctaaattaatagaattttgttagtaccgactgtattaatttatagaggtttaactgtagttttttccatattttgtttgttctttattttgcaagttataaacatcgatgaatacgcatacgtgtagaacgtactagtatgcctctattcagagaaacggcaaatgatacgtttgatattagtcaattcatatttgatgtcgaaaatcaatgtgaatcgattttattgaaaaagaaaccagaagtcgaaagaaggggctagctctttctttgattcgctgtttttgtaagaagtatcgtcttaattgtgtcaaagatggctaagctatgaattaacgatctttgttataaatgcactctgactagtggctgtcgttgcagttta

SEQ ID NO: 100690 - DNA, 1025 bp, Mimulus guttatus
  Intron number 1 from transcript mgv1a025290m (locus mgv1a0 25290m.g) derived from phytozome v7.0 (chr-ID scaffold_524 ; pos 21425 to 22449)
ctgtgcaaaagctcaaaatccttgtcatatacacggtacgtcattccactttgtttataatcctaatgaataagatcctttgagtaggattcatttggaagcatctgataacgtatatagcatggaacttttattttgtcatagttctgaacaataatatggtactattttagaacgtgtcaaaattcttgtgcaccgtttgtagttatatcctttgttgacatttagactctagacgttaaagcttaaaactctaaatgtcttgtagatgtggtaatctatattgctgtaccaaactgaagtgcttccggtaccaaactaaaaatcaccttggtttttccaaacaatgtaagaatatttctccattgttcacattcatatgaataataggggaatttgacttttttggtgacaacaaaaggagaaaatgtaaggttagccgagtttgcaccgaagaaaagaaaatgagatgggatttgaataaatattactatttgatttcatgtttgtagaaaataactacttaaaggatccaaatattcccaatatgtttgatatgcacacttttttatgtttaagaggaagaggataactagtgtctagagtttcagtttcttactaagccctaactttgatttactgagtctctctctctctctctcaaatattataacgtatgatattgagtagtgtctacaataatggaggctggatataaatcatttgtttcgtgaaattaatcttgaatgggcttatacaaggggaatcccatcttagagtagcatattttagtgactctctgaacttcctcaaagtttactgacgacagaacctgtgtagattaatatctcaaacaggacccctgtattttaataatctgcataactcttcatgcaacagcacttttcaaatgtgggataaatattgtgtttctcgatgaattatacaatttcagtcaaaattacattctataattgtggtttgctgcagtaaaaaaaggcaacgcatcctttccagacaagcca

SEQ ID NO: 100691 - DNA, 292 bp, Mimulus guttatus
  Intron number 1 from transcript mgv1a014823m (locus mgv1a0 14823m.g) derived from phytozome v7.0 (chr-ID scaffold_633 ; pos 8549 to 8840)
ctaacaatccgccaagtaagacagacttctaatatcctggataaccggtcccgtatatatatattttgtttttttctttttcgtataagtatggagtttggtttatttatgagataagttttgattgacttagtatagttaattttattttcaagaatgtcggtttgcttgtggagtttgggatttatgattagcagtaaactggtatagcagcatgttgttgtgtgcgaagaaagcttattggatgatattatatgtacagggcaacaacagttccccttaccaaatatta

SEQ ID NO: 100692 - DNA, 432 bp, Mimulus guttatus
  Intron number 3 from transcript mgv1a003988m (locus mgv1a0 03988m.g) derived from phytozome v7.0 (chr-ID scaffold_3; pos 3298877 to 3299308 reverse strand)
ggaggcatcaacctccattagaagaggtttctcaggtaagaattaatcattcatttgatattaaacatatatatatataaaataaaaatcaaatcttgtcaattatcttcgatcgttttctcgagttttttcgggttttcagcatcatctccaaagtacgaaacgggatcatgccacgtgtaaaattagtcgaaaaactcgtattctttgattgtgtgtttatttctggtagcttacctaacagaagactaatatgcatgtatagctaggatagttgtacaaggcattcattgtatgttgatattaaaaaaaaaaaaaaaaaaatacatatattataaaaacattataaaaaataaaaatgaaaaagccatagtattaatttgttcttgtctctcagaaaggcatagtagcagcttggggattgaaagccta

SEQ ID NO: 100693 - DNA, 966 bp, Mimulus guttatus
  Intron number 1 from transcript mgv1a005804m (locus mgv1a0 05804m.g) derived from phytozome v7.0 (chr-ID scaffold_22; pos 1159761 to 1160726 reverse strand)
gagatccatctaggtttgattttcaatctcacttaccttttttttcgatgttacttgcttgttgattgttattgtttgttattacaatgtgatagtgtagaagctgtgatgtaatgaatggtgcaaaacaggaaaaaaaaaaaaggcggaatcttacatatagtgtgattcaatttcaacatggtgatccaatttgtagctggatcaatcatctttcccaaacttgagcatgagattaaacatttaggtagtgttgcttagagcttgcatgtctgtttcatttgtagctcgtcttagtggttctagcagagttttttcgaagttcgtttctgttatagtttgttgatgagttgaagataatttttagatgattcgtggttcaggattcatggagttttacagtacttacaagcccagtaacgatgacacgttttttttccattattcaaactctgtgatatgtgatttgatacaaaatagatggtctaatatacacaaaatagctagatataatagctatttccagtatcgggagttgctgttacgtcttaaagccccacctcgccttggttagttggttcaaccataaaccgtcaaaatttcactattcaaccagtatattccctttttcaactatgtcgatcaaatttctaacctttggctgcgcttcgaattatacgactagtgttcaaattgaagcgatcaaatttctaatctttggctgagctttgaattatacgacaagtgttcaaattgaagtgtatggttagaaacaagactgcgaccaaataaacccccatgtcctggcattggttgtttttttgtcgcaaaatcacccaattcggatttttaccctattttcttaatttggttcgctgtcaattgaagtcactgttttacgatttcgccaatatttttatcaccatctccttaaaattcaagaatctttgaattacattgaaacag

SEQ ID NO: 100694 - DNA, 628 bp, Mimulus guttatus
  Intron number 1 from transcript mgv1a008420m (locus mgv1a0 05724m.g) derived from phytozome v7.0 (chr-ID scaffold_59; pos 108490 to 109117)
gtggtggtcatcctcaggttattttttttattttttttttatgaagcttttttattatcgaatttgttcttttctgtttttgtgttgccgtaaatttatcaatttttttatttttttacttacaattgttctttcacttttttgctattgttactctcgaaccatcgttagcggagccaggattttaacttcgaggggagccgaatgctataatagtacacaatttatttattttttatatatttttatgtaaattaatagagattcgagaaatgttgtgggggccatggcccccctgaccctatgctggctccgccacgggcgatcattgaattgaagagataagaaattgatgagtatttgaacacgagcttttcttttatcaaacatgttcttctctctttgatcttgttgtaaatatcaagtaaaatatgcatgttattaattcaagattgaaatatggtttcatacgattcccgatttttcaaatcaaattatgcatagatccttttcactagtttgttttctttagagtttctttttaatattgaggtagttacagtatttatttattattttttgaattgtattaggtactgaattttcctggggggaaagttaagttcac

SEQ ID NO: 100695 - DNA, 841 bp, Mimulus guttatus
  Intron number 1 from transcript mgv1a012656m (locus mgv1a0 12656m.g) derived from phytozome v7.0 (chr-ID scaffold_12; pos 2488394 to 2489234 reverse strand)
cgagcctacgtggacttgtaccggacagcgaaaaggtcagtaaatgtaaaaatcaagatttttcatttccaaatttattgttattacactcctttttcgtgaaaatgtaatttaatcggacaagattatttttcgtggatcaagtgtatatgtggtcgtgcttttgtttttcgaaacgttatacgattgaaattatagcgaagggaaaggatattctagtttcaaaatgtcaactctctatggtatcgaattttcgaagaagtggcggcgttgactaaaatatacgatagttagtccctatatcttttccgtgggatttttcgatattaatttcgttttcgaatgtgaaagttttgtgcttatgtaattgcacgattggatgggactgtattgccaccttacccctcgagttattttccgttaataaaatagctagtttcatcgcatatacgaatatattaaaaaacgaaagagacgtttacgaatactttaataagactaataagaaagattaagttgcaatcatgttgtaacatcggttgcagaagttgactttgatcgaataagccgcccgagttatgtttgaaaagctgaaaatattaaacaaattacataagttaatttacttcactaattaaagactgcatgagttggagtttgatgctcgtccgtctttgacttcgtctactttgaccttttctcgttcgtattattattgccatttgccactactttgaccttttctcgtttttttatttttatttttaatttttttaacacaaaagaacattatagtgagctcaattattatttttctttttcgattttcatttttcgacag

SEQ ID NO: 100696 - DNA, 1068 bp, Mimulus guttatus
  Intron number 1 from transcript mgv1a006296m (locus mgv1a0 06296m.g) derived from phytozome v7.0 (chr-ID scaffold_11; pos 174882 to 175949 reverse strand)
ctttcacgcagattggtgccactaattatacgccggtaagtttttatttcactttttttagcgtttgtttttgcttttccgggagaaaaaaaatctgattttgccgacgaaatcgaaaatttacttggtttaattgggctgatttaatgtggttttgttgagttacatgtggagttgtttgcctacgtgatttgaagaatgataatattgcacctgccatagtttaactgatgcttggattctgcttatgtaccctgattgtaaatcggtaaataatcgacatctgtggtccggaaactggatttgagttttgatttacggttgttcgtttcttgttttaatgcctttccacgttggatttcggggattcttagaacggaacagttagaaagatttaaacatgtagattaaagacatatgtcgtcaaatataaccgtaacagaaataattcacaacatcagatttctgaattctggacatgtttttagtgcttctgcacttgtcaataagttaaaaagatgaattgaacaggaataatatttgaaaaaaaaaactgttttttaaagacatgaatttccatgcgaatatgtagtattcgtggaaaaattatatagtttttttaaaatgtgtacacgtaagagttctgttgtctgagaggatggacacatacattatgacacgtgtatagtgaacggagatcgcatgacgcccaagtgtcaagattgcatattagtcttaccggtatttatggttgactatggtcaggaatgtgtttttgatcataaagaaatatacgaaagatattgtcctatggttctatatgaacgtaagagtttatgcattggaccattccgttgggggtgaagtggcaaaattgatagatactattgatctactctttcgttatgttcgtgtatttcgcaaagcactgcatagttgttaaggcctttcttagagttattgctcaaagttcaaactcgttttattttcgggttttttttaatcaagtaatgtgttctgttttgtggcatagggtttaactacacctagtacagcaattcagcctca

SEQ ID NO: 100697 - DNA, 958 bp, Mimulus guttatus
  Intron number 2 from transcript mgv1a007923m (locus mgv1a0 07923m.g) derived from phytozome v7.0 (chr-ID scaffold_44; pos 1406689 to 1407646 reverse strand)
ctcatcaaacagctggcagacaaaccccagaaaaggtagcatctttaatactttctctctcttctaatcccaataactgtgagaagattttgcatgaaaagggttctggttctgatttgatttctctgacatgtaataatccgaagagaaagaattaaaggtggaatctttattacattagtgtgtgtttaattaagtttaaataatcttaattcttacaactctattattattattataaataatattttatgtatgtgtcttgtcctccatcatcacaccaaactacagttgaagtcctagatcataataattacctactttctttttcccatctccaagaactgtagttccaaattccttttttttctttttttttttttggtgattgcaataaatctttattgggagcagagaaaaaacaattaatggaatttaataaatatatttatttattattttcaagatatactaaattgttttttctttattttttttttggttaataaaaattaaagatgatatctttgtaaagattatgctattgctgacacgttatcaccccccacccccccccccaccccccctcccaaaaccaactcaagattatttattcttagctgctcctatttgactgtagatttaaatacactaaaagtctaccaaaaaataaatcttttctattttttgcttgaaaattaattttgaaaatgatgcagaaaaaaaagcctggttctgattcaaacaaagcggttgacgctaaggtgatgaatagttaattaattaattagcccacgttatccacatgcatgaatgcatggaattctgtaacaattttcctgcaccttagaatattggtaataatttatatgaaagaataaaaatttgatcttgaaactaatgtttttttcttgttttttcagacattgagaagattagcccagaacagagaagcagc

SEQ ID NO: 100698 - DNA, 589 bp, Mimulus guttatus
  Intron number 2 from transcript mgv1a011771m (locus mgv1a0 11771m.g) derived from phytozome v7.0 (chr-ID scaffold_8; pos 1174093 to 1174681)
ttcaatctaggtacggctttttcgtaacgaaaattagcaagtaccgtaaattcttgataaatgaaaacttaacattctttgcaatttgaagtgttactcgaacatggtgtgttgctcactggtagttttttggaatgcggtttgttcgtttgacatcaacatgtaccttcttataataataattttaacaaactcccggttagtttattgttcattgattccttaacatatttttttggatatgcatgaacatcttcctatcatgagaataaacgagctaaattgatcggaattataagagaaaaattacgagagctcaaataggatatgtatttaaacccagcatgccgactgtcgatttgggctacaagaatacaaagttcaagctcataacctgggcctggttatttgatttttgagccggatgctcaatagcaaatctgccaatgtattaaaaaagaaagctcactttgatcctcttaccttttcatcacacatgtcctttcgtcttcttcttactatcgtcgttcttgctatattcgttatcgtctgctgtaaatgctgattggctgctttctgaaattgcagt

SEQ ID NO: 100699 - DNA, 610 bp, Mimulus guttatus
  Intron number 1 from transcript mgv1a013032m (locus mgv1a0 13032m.g) derived from phytozome v7.0 (chr-ID scaffold_149 ; pos 493421 to 494030)
attaacgccactatttcattcagcctccccactgcgtaacttctcttcaccccttttcaccacgtgtgtgcatttttattgattttttgtattttttttaaatgcatttatgtgggcattcttggctaaaatttgtaaaagaaaaattaatctgtgggaactgtaatttgcggatatttattaattattgttgagtattgatgaattgcgtatataactgccttgaattcatggagaactgagttaacctctgtctgttggatcgttttattgcacgaatgtattgattagttttcggaaggtttttttagtttttaagtacaatcgattttgaattacgaacaactagttgcctgcgttgacattaatttcggtaggtatcggaattttgtgtttgttaccgtaaagctgcaaactcgagctgtactttagaatgaccgatcttgaattacatttatgtttgaagtatatggataatcttaatacgtattaatcgaacaatagcattgagttggaaaacttttgcgcttatgtatgaatcaccgatttcttttttttttttaatgaatttgcagaaagccggagagagttgctgccaccgagaaaattc

SEQ ID NO: 100700 - DNA, 505 bp, Mimulus guttatus
  Intron number 4 from transcript mgv1a014341m (locus mgv1a0 14341m.g) derived from phytozome v7.0 (chr-ID scaffold_2; pos 2702557 to 2703061)
gtggagcaagtggaacattcaagtactacataaaggtttcagctcttgccacctttgataaaactatgaaatcttatgtcatgctatactctattttgtcttctaaatataatgttaaaaggttagaaattgcagaatccttcatatgacatggcatctcaattatgaccttagacgtatcatattctatatgacaaagaactactttctcagttcaattttgttctgaaaattttattacttgtctcttaatccaaacacgtatcaaactttgagtctccttttgcagcgagagatatatatctaagtcgaggtttcagtttatgaagttggcctctcatgcgtatattaatattcttcaccgaactgattttgttgataaaagatcatgttagtgtaattcactaattgcagcctgacattataaagcgatctcacagcaccttctgaaagtttttttttttttgtagattgttccaactgaatacaagtacatctcgaagga

SEQ ID NO: 100701 - DNA, 542 bp, Mimulus guttatus
  Intron number 1 from transcript mgv1a010300m (locus mgv1a0 10300m.g) derived from phytozome v7.0 (chr-ID scaffold_27; pos 1780787 to 1781328 reverse strand)
taccctcccatccatcaggttttcttctctctctctctctctcctcttttttttttttttttggacaaatgggtgtcaagatcccatctttagggtttgtttgtttgtttgttcaaaggttgtaccttttcatcagtagtttattttgttctacttatttttaggttgaatttttattttgggcaagtgctgatgaagtaattgggatttgaggaattgttatttgtagctattttaccctaatttgtatggttgaccaaattatccttttttttcccccttttctgtttctttgattttactaaatagctgcaaatatagaaacttacctttacatattattgttttctcactgactgattcttctaaattggcatttggataaaccctttacaaaggcattgtcattgtgtggtataatatacaaaataattagtttgatcaatgaaaatgctttcgaaactttgctgtatttcatattttctgtttctggtctaacataaaaaaggttaattacgacagtgccacaacgggcatacact

SEQ ID NO: 100702 - DNA, 852 bp, Mimulus guttatus
  Intron number 2 from transcript mgv1a003486m (locus mgv1a0 03486m.g) derived from phytozome v7.0 (chr-ID scaffold_9; pos 1575665 to 1576516)
gaagggtattttttttccattctaactcctttcttctttctgtttcttatggaagggtattattgcaattttttttttattaattgttaaattcattagagttttgctactgcttcattgattagagttttttttacaaggtaatcatcgtttcgttgatttccttctaaatttggtgcactggagtcttgagtatttttttagcagtggggaagattgtcaaataaaaatcgcatcggattgaatttgacagacgataacctaggacaaatctcgcaacgctgttcgtagtattaaaattattctgttggtcgaaccttaagacaatacatttcaaaaatcggagattttatttggggtttattctcgtgtttaagtaggattgagttcattttatttgcttttatgctaagtatcgaggaagatgctcacaaaccaaaatgaagtcgaactttagcagtagtacagtgacactaacaactgataaggattaaataaataaaaaaaaatatcattaaattctgcgtttgtaatgttatattatttaatcgtttattaattaaatatcgaaaaaatgcatgataatgtaatttgtgtcgattttgttgcttttgaagtagtgtaaagtaattaactttgtatctggccaacaacgagcaaagtggaaattggtagatttttaatgcatattctctctgtttttgatgtaatttggtggccaagaactatattaacgtatggtatacatttcatgcctctaaatattctcacattggttcggttcgaacttatatctacttcttaacgtgtgaaacagactgaagaatatcttgctggattgaacctcttgtg

SEQ ID NO: 100703 - DNA, 956 bp, Mimulus guttatus
  Intron number 1 from transcript mgv1a004337m (locus mgv1a0 04330m.g) derived from phytozome v7.0 (chr-ID scaffold_169 ; pos 233211 to 234166)
ataaatttcagtaaaaggaagaaaaaaagcaaaaggtaattttatcttcttcctctattttttttctctttaatccaatttttaatcagagttaagctgctattaattgcatatcaaagcggataaaatatttttccttttctaattttttttttttgtttttaattttatcgtctgatactctgattttacacatttttccagaatttataacgcatataaataatgatgttcatcttcactttctctctctatgtttaatattctgatcatatgaactctttgcatttccatctctgtgcgtgttgtgtgtgtgtgtgactgtgtgagagagaaagtaaagtgtgtgtgagagagagagagagagagagagagagagagagagagagagagagagtgagtgagtaaatgagtgtgtacttttattgcgttagaacctgattccctgaacatcccccaaataaaaaggacactaatcactttttcttttctgccatatcctttttttctctttctctctcatcatcgtcatctagagagagaaatcaaacaccaaatgttgaagatctactccattttcagtcggtttcaactttcaataagcgttttttcccttggcggtgtagtgatcagaacatacatctggtggtgaaattacgaaaacatcctccttcagctggtttttaattcacggtactaaccaacaaaaaagaaaagaaaaaaaggggccatccgttggattctttgtctttatcggtggtgtattcgtgtttggtgatacgtttttgggtgtttgcgatacgtgtcgcattgtgtgtatatatgtatatttttatgcctcttcttcttcttcttcttcttcttcttcttttgtgtgtgcttttttcattttgtgttatctttttttttttttcttctcagttgaagttatctccccctgttttctgtagaagtaa

SEQ ID NO: 100704 - DNA, 732 bp, Mimulus guttatus
  Intron number 1 from transcript mgv1a013507m (locus mgv1a0 13507m.g) derived from phytozome v7.0 (chr-ID scaffold_85; pos 934907 to 935638)
ttacctcatcaagcttctcctcatcggcgacagcggtcagtcatcattctatcttcgtattcattcccccttatttttttttggatttacctgcttgattttttatggatgttcctattcgcttcttaattgattgtttgaagctaggtttttgtctaaattgaagtggttttgttcggatctgtagcttcctcatcgtacttttttcgattaaattcattttatggcatttgattcgagctgtataaacaaatatcgattcccggcagtgatacattacaatttttttttaatgattgatctataatgtcaatttgttgcttctggtaattctctgatttgagcaattaggttctggagtttgtagtataaaattatctcctgctacagtaggctggcaatgtatcgacaaatctaaattattaagccgtcttgctccgaatctcatgcttgttttatggtggttcgttcttttggataaaatgaattgtgaattgttaattgtcgtactcttaaccactgcgtagaaacttctagttctttctttttaatgtaagcattttttatttggcacatatgtagcaagagatgtatctatattttcgtgtgtgagttaatgggcatagtgacaattgaacatggaccaaagatagttccttcttgttttcctttacccgtttattctctgttcctccaggtgtgggtaagagttgccttcttttgcgattctct

SEQ ID NO: 100705 - DNA, 700 bp, Mimulus guttatus
  Intron number 2 from transcript mgv1a005981m (locus mgv1a0 05743m.g) derived from phytozome v7.0 (chr-ID scaffold_216 ; pos 317149 to 317848 reverse strand)
ctgtcggcaaggccaagctggtaaatatattcacctgatttcgtttcttgtttaagattctttactggcactgtaacattgtttcttagctttatatatatatatatatatatatatatatatatatatatatatatatatatatatatttgggatttaccattttgatctggtttagaatgaaaaattgatttgactacagaactgtacttttcattttcgttttttttttggtgattacccttatattttgttgagtaaactatgtcgaattttgtttatccttcccgttgttttgttgaattagttaacgtcatagcttgagctctattactgtaatgtgcacttgaaatgcttagttatctcggaaacctaatatcagtcatgaatttattcctcaatgcctctttaatcagctgaaattaacgttcaaaactatttattacggtctttttttgatctctaatacaatggagaaggctatttgtaaacgaagatcaatgagattacagtgatgatcgtgtagacattctgctcgagttctaatggaagcttatctcacagccacgcttcaatagatatttttcgctagaccaactagtctaggaacataacatacggtttaaaaaattgtattcttaatgttcgatcttgattttctttagaaggatcaactaggccagccaagtggaaataacgt

SEQ ID NO: 100706 - DNA, 629 bp, Mimulus guttatus
  Intron number 1 from transcript mgv1a005981m (locus mgv1a0 05743m.g) derived from phytozome v7.0 (chr-ID scaffold_216 ; pos 317863 to 318491 reverse strand)
aaaccccctctaagcactctcgcgatctacctcaggtacaaatttccccaattttctttttcctaattttttttttcttctcttgattttctcgaaagtgttcttttactttctggccacattcaaatgtttccaatctttaagttcggaagaactggaaattcacgaataaacaattcttctgttcaattcatacctttttttttaaaagaattattcatacacgttaagttttggtaaagaatcctctatttcattataccatgtgcatttttaatttagtagggcatttgcttttgcgaattcaatgagtttttagttccggaagtgataaatttgataaatggcgttatagacggtgaatgcatagaatgtatttgaatgatgctgaagatgtatgtaatgaatacaacaatcagatgtttgttattttcatatattaatttgttgaatgggtgactttggatggttcttgttgtagtcactgggaaatagtttatgtttggttttcccgaatatgttcttgtttttttttattctttctcgggttatttggttaaccaggaattggaggggcttttgaataacttacaggactgggaattgtcttttaaagaaaaagataagaa

SEQ ID NO: 100707 - DNA, 564 bp, Mimulus guttatus
  Intron number 1 from transcript mgv1a014368m (locus mgv1a0 14368m.g) derived from phytozome v7.0 (chr-ID scaffold_266 ; pos 184902 to 185465)
tccaaagccgaggatctcttgtgaaaaattcagggttggttgttttgctattgtcaggaacaagtttctcttccactgaaaacaaggagctccgatctctataagatgttctccggcgagttctaagacctaagcaatatcatgaaccaggggaaacgatattctctccgttgtacataagatttgcaaattgaaacaaatgttagacttgcaccaattattaatgaaaagaatctaaaaacatgatatatgcaccataattgagttgggtgaaacctgaaatgcaaaattggttaaagttttgtttgttgtttgagttggtttggtggtttgttattgtaagcatttcagtgattaaatcagcttcattttgttggtgcttgcagcgttttcgtcgtcaagttgggtgaagttgtacgtcgtttattgtggattgatatttccgttgggcgttactgtttgatcatggaggtaattctttctttctttcttttttatttttttcaaagtctcttttgaatgacttgcgttgagatgtttgtaggcgtggagtggaattggaat

SEQ ID NO: 100708 - DNA, 777 bp, Mimulus guttatus
  Intron number 1 from transcript mgv1a009069m (locus mgv1a0 09069m.g) derived from phytozome v7.0 (chr-ID scaffold_27; pos 1602054 to 1602830 reverse strand)
aagtctcttttcgccggtggtgtcgccggaggagtgtaagtattgaatttgtgtttgctatttagcattttatctccgtgtgtgtaaagcatgtacgcggtgatcgactttgcatctttcagatattttattttggaagaattggatgtattattgattgatacgtttggctaaggaaattatattttcttacgattttatttaacgcaagtggattaggtttaattgttctgattgggctgtaaattccacatattgcatggggtttgtgaagttttttgtatctgtttttctttaattggaattctttcttcatgagttttgctgtttgcttagcatttaattatgggagaatgagtttttgattttcaatgtcatttatttctgcaaatggttatatagacagaattttcctactttgttggagagagaatttcgaaagtttgagttgattgaagaaaaagattccattttcaacattttattttttatttcttttcaacgtacgagatgcatttgaaaatttacagtcctgaaacttagtaagaggatacttttgctctaccattgaggagtaattgcagcggtaacagaaatataaaattttactctgttttcataccaccattcatggtattttgcagaaatcttgttaaaagtaataattgcttgtagtgctagctgatggtttcttatggaaactcgaacttggcgtgactgacttgctgcatgctcatcacaggtcacgaactgctgtagctccattggagcgtttaa

SEQ ID NO: 100709 - DNA, 442 bp, Mimulus guttatus
  Intron number 2 from transcript mgv1a005002m (locus mgv1a0 05002m.g) derived from phytozome v7.0 (chr-ID scaffold_8; pos 1536734 to 1537175)
acattggtaatttttttttaattacttaattctacgataattagttactgggctgttgcaagtacttgcttgatatcaagtattactgcaaattaggcaaattctatatattcttgtttctgtttatgatttcgtgctgttatattctgttggatgcttggtgctcagtttatgatcaatgctgtttattaaatggaatatttatgctgatatttcactgtagctcaattgaacatgtttttgtgggagtattagcagtttattcgtcttatcctagaataagcggatcgatcagctgaaactcaatatattgaaaacatttgattcaatatgttatgcatcttaagtttgtaaattcataataataagcgtatgaactgtatatggacaaaatttttcttgtcttaatgtttgatgaatgtggaatgttacagacaacaat

SEQ ID NO: 100710 - DNA, 338 bp, Mimulus guttatus
  Intron number 1 from transcript mgv1a010629m (locus mgv1a0 10629m.g) derived from phytozome v7.0 (chr-ID scaffold_4; pos 570842 to 571179)
gcgtcgtttttgaggagagaacaagccctgcagaggtatatttgatgcaattgaacttttttcttttttttttttatggtgaaagattgcgcctttttttctttctgttttagtttttgattttagtataatgcaattaaaatttatatgatttctttcttcaagcatgtagaatgttgttgttcagtgattgattgattgattgatcgacacctatgaataaatgtttgagctacaatgagttgttcttaagcataatgatgtatgttcaccccgttgtttcgttcgattctgaaacggtttcttttcgagaagtaggtgaagaaagaaatcgagca

SEQ ID NO: 100711 - DNA, 1050 bp, Mimulus guttatus
  Intron number 2 from transcript mgv1a017050m (locus mgv1a0 16994m.g) derived from phytozome v7.0 (chr-ID scaffold_12; pos 2597411 to 2598460)
cgttgctcctcgtggccaggcttggagcattgaaggtaattttcattttattttttctaatgcgcgaacatagatcatgtcacatttacggaactcgaacaatagtattctcgaattttaatgatgtaggtggattattttatcgatatacgatttccatttcagaaaacgaaacattattgttatcggcgcacatctcagatagaaaattggatagttcaattaggggagcatgaagtataatccagtgattattacgaaattttcgttcattcagattgaaattgtagtgtagacttaatcaatggtacaaggttgaatgttctgaatttattactcgacagtagcattgaccttttgttgattattgactaatcgaaaacttgaattttttttttataagtgagccatcagattattggattgttccaagaatctcaaccctatcgttatcacattttatctttttttgaaactatagatattgatggtttagtcttgtatatatcatcctaacacatggtattcatcagatactgatgatgtatgatgactgttggatggtacaagtgaagttctatttacatgagcactaggacaatgcgtgataggtagtcatgaatgattatgcacgaggagttaccgattttttttccttttcatttattgggtttatctttataattagaccatcgaatgttaagatgttggtttgattcaatggaaaaagattcttgatgtttgtaattttcttccccaagattgtatttcattttctagctccttcaagttttgcaaatgctcgtacaatggatgttttgttgcaatctatacatgaagcgaaaataatgtgccagtaggcacatcttctatgtgcaataattatgctattgttttgggatattgcacaatgcacaatgactttcgtctttctttttctggtgacaaaacagtgcatagattagaataaatgccagcataaccttttgacgtaagcttttttgtttccttttagggttgtgattactgctcattggctgattttcagtt

SEQ ID NO: 100712 - DNA, 836 bp, Mimulus guttatus
  Intron number 2 from transcript mgv1a010726m (locus mgv1a0 10726m.g) derived from phytozome v7.0 (chr-ID scaffold_55; pos 943889 to 944724)
tgtgtttgcttctgctccggcgaagtgttatcttggtatgtgatggttgactttttttttttcccctttaatttgtacaaaatctgattgagcaattcctttctgcagatcaaagggtttgtatgcatagatcataaaaaaaatattctaaactttactttaatttttaatttttttatatattatttttgaattacggccacccgtgaggtaaggtcaaattactaaaaaatctctcatgtttgggtaattataaccaacccctcaactaatgaatcttcttagacgtccaccgttgcagcgttaaatttagtggaatcttccagattatgtgaaatattctctagtttgtacccgttttaccccatttgagctccagattttgaaacaagatgatcgatcataagatgtgtcttttggcttgtaaatatcagattgtgatgcattagaaactgcattttttcacaaatcgagtacaaattagacaacattccacgaaatctagaagatagttgaatttaacaccataagggtggacatgtaagaagattcataattgatgggtttggttgttattacccaaacatgaggcgttttttcgtaatttaaccttacctcgggcgtgaccgtaatttacccttttgttttttacaacatattttgattctaaattggcccataattcggtggtgatgatctctgttttgattgataatcatgtaatatgtatatatgtatttggatgtaaggatttgagctaatgattttcgaatctataatcgactattcatagttatttttcttgtgtgtatatatcagcttcaggctcgaggaca

SEQ ID NO: 100713 - DNA, 652 bp, Mimulus guttatus
  Intron number 1 from transcript mgv1a020847m (locus mgv1a0 20847m.g) derived from phytozome v7.0 (chr-ID scaffold_229 ; pos 372619 to 373270)
tgggcgcgtgtcggcgcgtgggcgcgtgtcggcgcgtgaattctgcagcggcggtacctggcgcgtgacggcgcgtgacggcgagtgagcggcgcgtgtcggcgcgtgaatgcgtgaaattcttcggcggcggtacggtggcgcgtgagactgcgcgcaggaccttctcggggcgcgtgagggcgcgtgcggtctccgatggcagtctggttttcaccgatgtgtagatcgtttaacggcgatcttggtggtatgatcagaatctggatcggagcgatgacgcacgcacagcagtggttttatggtgtttcggcggaagcgagaaaagaaaaaaaaagacgagaacaccacaatgaaaccaaaaaaaattgctagatgatcagagattggctcttggtaccatgttagttgaattgagaaaaatttgatgtatattcttctccataggaggcactatttatacacttagagagaaagctatacaaggaaattactaattacaatgaaatcaaatctcctaacttatgtaaagcatatcaaatcaaatctctaacttatgtaaagtatatcaaatcaaatccctaacttatttcctaagaatatacattaacatgcagtaggcccaactctctagggcagcaaaaactctcct

SEQ ID NO: 100714 - DNA, 1000 bp, Mimulus guttatus
  Intron number 3 from transcript mgv1a014664m (locus mgv1a0 14664m.g) derived from phytozome v7.0 (chr-ID scaffold_125 ; pos 512813 to 513812)
atataacaatataaagtttcaagtttgggatctaggtacattctttcacgtctaacttgttttgatgtgaatattgtgttcgttaacttgaattttaaagcatctctttcgaataaaatattagctgaagcttctcgtttttttctctgacatgggagtccatgagtttgcaaaagcttttagaaatagattatgagtttttttctgcacgtaatctgtttttatgtgtttgcaaaacaagcttttgcttttgcttctcttaaaataagctggtttaaggtataattttaaaagcacccatgtacctgctttttctatattagttgattttccgcctaatttgcaaacacccccaacttttagaaataagcacttaatttcaacttaactcataatcactaacttctgcttttaaataagctgttacaaacatcacctaaataatctaataaaacccaattgttttattggaccatgaaagatccaataaaaaagctccctaaaaggtaagataagtcatgataacataatatttccgggtcgacccaggaagttattgggtataccaaacatcagacaaagtacagctatttagttaatcatagctaatatccccaaccaaacgaggccttattaatgtccgtaaagattgcatcgttatttctaatccaagaagtattgaaataggttttacactgctcttgttttattatgtgaaatgtctcatgtgggctttcggggtaagtttgttttggttacgactcggtatattgacccaatcattttttattaagtggggatgaatgtgaaatagttgctagccgagcaaattgtggcgcaaaattatttgtcagcctcgcttgtgcgcgtctgcttatctgcgtgattttttttttcttttcattttttcgtttattattgccaatgttttcgtttaacatagacatttcatttgctcatggcaggtggacagacgagtatcaggtaacttattttctat

SEQ ID NO: 100715 - DNA, 746 bp, Mimulus guttatus
  Intron number 1 from transcript mgv1a008625m (locus mgv1a0 08625m.g) derived from phytozome v7.0 (chr-ID scaffold_63; pos 418647 to 419392)
agaagtacatcttcaccattgacgacgactgcttcgtgagttttttttctccttttgtttgattcgtttttttatttttctcaattgatgttgatctgagttgaatcggtgagttttgcgggcgaattctgggctagatctgtgtctgtgcttcctttgttgattaatttttgaaatttcgttgttttccggcggcggagtggtggtggtggcggtggcgttttggtctttggggatctggaaaaagtcaacggtccattttttagaatatgcttcagaagtagaagaaaatcctctgtagtctgttgttgagtgcgagaaaaatgtttttggggttgtactataataggtggaggtccactgagaaatggtggaccttacctttccttatgacacgtggcacacgcaatttactttttttgtttggccaaatctttctggtgggatatttcatatttgcattaaagtttcatttccttcggcccacataaacatttttaaatctctaacgtagaattctttgcgttgatcttaaaccttcttataattattattattccaatgtgaatgaaattcaagattccaaattgaaaaaatgaaattgtgtgttggatttcatgttaccgtgtgattaatatatttggagtgttttcaagatgatgaactgaatatatatgtgtatatgtattaatctattgatcgaaatgtgaaataggtggcgaaagatccaactggaaaagagatca

SEQ ID NO: 100716 - DNA, 421 bp, Mimulus guttatus
  Intron number 1 from transcript mgv1a015428m (locus mgv1a0 15411m.g) derived from phytozome v7.0 (chr-ID scaffold_36; pos 94175 to 94595)
atttctggggcttcccatttcaaccaaaagaggaggtacgttttattatcccatttctgcattatttattgtattttcctaaaattataaataatttaagtgtaaaattcatttttctttgatctcaatgaaattatgcatattgaaggcaaatatattggtcaacaacaatgatcttgtaattatccaagattttgaatttgtttccgacaaatagtaattgtaatagatctttatcgttcatataaacaccaaaaacgatgtatgttttttttttcttctgatgtacggattaataataccgatcgtgtgaatatttcacccaatgtagcatagaataaacctgattcacatgcatactcacgtgttgtcctaaactaacatttgcatataagaagaggagaaaagcaaccgcaccacc

SEQ ID NO: 100717 - DNA, 851 bp, Mimulus guttatus
  Intron number 1 from transcript mgv1a016431m (locus mgv1a0 16431m.g) derived from phytozome v7.0 (chr-ID scaffold_300 ; pos 85624 to 86474 reverse strand)
cgacgagcttcctaagcctcccgcagctaaacgacgtaagattatatattcttaactttattaattaattatattatcaatttacaaattctctttaattttaatcagatcagatcttgataatgtattgtatatgagtatgaataatatttttgatttcatctttgagtcacttcagaactaattaattaaacgaagagatttattcgatcgtttaaagttgcattgttagttgaattagcaaataagaacttgaattaattttattttatttattttattttttttcatgaacagtgattgagcttttttgtgtgcaaacatttgtagcttatcttctcctcttccttcaattatttccacttttatctcatctaatattcaaactttataatatgtatgatgtggcttattgttcatcaacagtgtatatatacatatttttaaaactttccaaaccctaaatcttgtttttttaaattattttttttagttaggttttttaatttttgtccttgaactagaaaaaaaacaagaagttttacctcggtgtatatatatatgtgtgtgtgtgtgtgtgtgtgtgtgtgtgtgtgatccaatggtgtggaaacagtgtaatatgataaaaatcttgtaagggaaaaatcatcattagataatgatgaagtagtgatgagagagagagagagatctagagagagagagatagagatccaaaggaagtcagctgccaagtgattttaatgtctgaatttttgttatattgtgtgttttataaaatattatattatataatatattttttattttcagccccggagaaaagacagagagtgccctctgcttac

SEQ ID NO: 100718 - DNA, 694 bp, Mimulus guttatus
  Intron number 1 from transcript mgv1a019552m (locus mgv1a0 19552m.g) derived from phytozome v7.0 (chr-ID scaffold_87; pos 618910 to 619603)
tcttccgtactcgaccaagagcaaccaggtctctgtgtagtgtgtaaagattacatttttagtatttattattagggtatattacaaccaacccttaagtatggttaaattacgaaccaaccaactctcatgtttgggtaattacaattactcctcaaatcttcttatacgtttatccttgcggtttcaaatttagtggaatcttctagattatatggaatattctcaattttgtacccgtttttatctcattcgagctccacattttgaagcaagatgatcttaatatgtgttttttggcttgtatatatcagattgtggtgcattagaaactgtatttttgcacaaaacgagtacaaattagagaccttttcatggaatctagatgattatattgaatttgatagcataagggtagaggtgtaagaagattcataattgagggataaatgtaattatcaaaacaatagggtttttttgtaatttgaccatacctcaggggttggttgtattattattattattattattattattattattattattattattattattattattattattattattattattattattattattattattattattattattattattattattattattattatccgacactaatgaaaatggggactgcatttaacagattttgtgatttaccttggtg

SEQ ID NO: 100719 - DNA, 539 bp, Mimulus guttatus
  Intron number 1 from transcript mgv1a003265m (locus mgv1a0 03265m.g) derived from phytozome v7.0 (chr-ID scaffold_113 ; pos 124208 to 124746)
tatttattgacgaacgcctctctatttcattgcctgtaaaatatgtaggtgacctcaattattatctgcacttttttttttattattgtttttaaaccttatactggctggataagaaaatggaggatttgtgtagattggttacaattattctgtatttgattttgaagatagtttgtttgggtgtgttgttttgctgattagtgaatatgtgattttgtggaaatattcaagttgttaaatttactccataaaggtgatgaattactatgtgttcgatttcgatatgtactgtttttttttttttttttttttctatttaagtaggattttccttaatcgagctgatcgtattaattcttctcgttgttttcgtgtagaatttgggatacattggtgtactcaatcgagctgatcgtattaattcttctcattgttttcgtgtagactttgggatagacactataagcgtagctccattttcgacaccaactaatttcttcttgtgatgcagataaaaagacgtcgaactaatcgtg

SEQ ID NO: 100720 - DNA, 492 bp, Mimulus guttatus
  Intron number 2 from transcript mgv1a007498m (locus mgv1a0 07498m.g) derived from phytozome v7.0 (chr-ID scaffold_109 ; pos 671746 to 672237 reverse strand)
ttgagtctggcatttctggcgtgattgagtgcaaggtaaatgatttttaaccttttattttggctgaaaaattcaagttgaacacaccacacggttctttcttacttaggtttagtgtttttactggtatgtacttctttgccttagttttgctaaggattggtttgtgatatttgattccttagtatgaaagctactctgtatgtataactttagtactgaaatgctacatattatatgtcaatatgcaaaatgagtttgtcctttagaataatggacagggtattgttcttgttgaaatattaaattgatgtcaatgcttcgtcattctgcaacgtaattactactaaaaagttatacttagtgattactgggtccgatgttgctgaaccctatcttttcttcccatgtattatctcgctccattgcaaatgaatatgcttcgtttttttttgtctttgcagtacttctctactgcagaagggtgcaggt

SEQ ID NO: 100721 - DNA, 835 bp, Mimulus guttatus
  Intron number 1 from transcript mgv1a005773m (locus mgv1a0 05773m.g) derived from phytozome v7.0 (chr-ID scaffold_450 ; pos 101057 to 101891 reverse strand)
ggtggtcgaggtgtttatacctacagggctggaaggtcattttcactatcttttcctcttcttctgttcttatttgtttatattcagttattatcctcacttactttcacaatcttttgaaagcagctatattttttgaggatttttatgattctgtcaaaattattgtgaaactatggaattttgctaatattagtccgttatgttccgaatgttgttcatgggctcatcttcagctactggattaatgcaatgacttagtggtgctgatccatacttggtaaacataaatctaattgggcaaaactaagggaattagattgattgtagtgcatgttcaatgaacgccttttgcttttagtttggtagtctaacattatttgtctggtgtttgattcacgtcataaagtttttgaaataatctcttttttcatggctctttctttctgcccataattacgatttttatatttatgttcgttgtaccagaaaagttattgaagaaatgaaaggtgaaagcacctggacgccttgtgcactttttcgaatatttttttgacatacttcatacctatgtactcaagaagggcagaaaagtcattgcatttcattcaaggataaggtgctggcagtaaggtgtcagagcttagcagttaccaatccttactcaacattttacattttttgtctagagatttaagatatggattttcatctttaattgaattttctgtttgaaggtttcttaatattgtgtttaggtctgaagggatttcttccgtattgcatatttcgactatctaactttaccaatttttacacaggcctcttgaag

SEQ ID NO: 100722 - DNA, 948 bp, Mimulus guttatus
  Intron number 2 from transcript mgv1a020092m (locus mgv1a0 20092m.g) derived from phytozome v7.0 (chr-ID scaffold_358 ; pos 68536 to 69483)
gagaaggagacaaatcttgaggtaaaatatgtgttttttgtttttgggctgactgatttatatctgaaattggtatgtgccttaggttatacagtacaacaacaatgttaggtacagtactgaaatctgttcctatgttaatatggtctgctcccccattaatttgcttggatttaatgatggatttttttcttttaattatgtcggttatgcatgttatattagttctagaatatcctcttgcgccattgcatattgaacattttcctagaggcatctacttcggataaatggtgcaggactgttagaatataatcaagattatgaatctattattatcgttgtttaggagatttgtgtcttctttatggaagaagtcttcctagtttggagtcttttccaactctatataagagagtgggtttattcgatattgtaactatcttctatctagctattctgtaataaaactgtctgccatctggccgttgattcagtcattagctcgtaatatatctttattttttgaaaatattgaacacctatgctgcaacaataaatcaaaataataaaatcaatcctcttatttcttccggagagccatttttcagaaaaaaaaggacaacaaaaactggattgttttgaatagttactttccacattttggtgctacttcattgaaaatgataccttaagaactaatgttttgtctttagtataaccacaattaactactgatgacgatacaagtggactacgtagagatttttgcattaccatgaacttgtgaatatgattgtgatgttgcaatttacactctgaaaattaagtcctggtggcttttatatttataatatgtgcctagtgaattaatataattattttaatataaattcttgatacattaaactgttcgattttgcattctttaggtacatagagatcaca

SEQ ID NO: 100723 - DNA, 732 bp, Mimulus guttatus
  Intron number 2 from transcript mgv1a014185m (locus mgv1a0 14185m.g) derived from phytozome v7.0 (chr-ID scaffold_15; pos 334418 to 335149)
tgctcatttcctacaccagcaacacctttcccactgtaatttctctttcccccttttttcaattttttttttttaattttatttgctgagttattttaatttggggaattcatgaatgatgttttaattgggtatgttaatggtggtccaactatgcttaatgtacttctagggtttgtttgtgtggaagaaatcaattttgcttatgctttttcgaaactaagctacggaatttattccccttccttctgttctgcttgtgtttctgggtatatttttgttcaatcaggggaacttaaattcaaatacaacggagttattgcaatatgattttaaatgaactgtgtatctttggtacaagttgtatctatagttaagattttgaggaaatttgtccttgctccgtgagttcttctgcttcgcctttttcttgataatgtactcgaattcaaaatttgagcgtttcactcgctgagggttcttttaacttacccctttggttaaagcttatttgatcatggtgttggatggtggcaaagttttgaggagactatagtcttgattaatagacccctaaaatttctgcatcgtgtaattagatgttgtcattgtattttattgccatataataagattggtctactctgccgaagttaatatttttcatctttgattactcgtcatgtaatataaacaggattacgtccccacagtatttgacaattttagcgc

SEQ ID NO: 100724 - DNA, 872 bp, Mimulus guttatus
  Intron number 1 from transcript mgv1a009632m (locus mgv1a0 09632m.g) derived from phytozome v7.0 (chr-ID scaffold_18; pos 52411 to 53282 reverse strand)
agctttttgcagcccaagcttattcgcttagctcggtactctttccacattttttttcaatttttttttaatatatatatttttttccgtttctgtataataatgtaccaatttgtttggattctcctgcgaatattttgtgcgaattatatagagagatatattaacaatatgtaaatatttagttatttactgatcttgattcttggttagcttaatatgttgatttcgctgcaatcttggtccggtgcatgcataggtttagttgcaataatcacgatcttggaaatgtaataaatcagataattactctgatttatttgtggccacttggagtggataatcatggttaaagatatgcactgcttgcctaattcgaatagaataacacgtgcacgataaaaggggcaatacgggaatagttatttatcatctttttgtttggcccatccaatcatgttagtggttttaggagcaatattgggcatgtatgtgaaaatgcttctttggtgggaatattccacaatatgtgctatgtgggctacagtcaacttattttttgactttatggttttatatccaaaaccaatgctgttgctttctttctgcagttggaagatctagtattaaatgccgtccctttcgctgtttacaagaattagtattccaatgttaattgttaatagtcagtggaagcttactatcgtattttatgcaaatacatgattaccggttttttttattcctgtaggaaagcatgtttctgcatgtattttatacaatatacgctaaaattttcatattactaaaagttgtctgtcgtattatctaatgcagaaataagggaattgaatttgttgcaattgatctga

SEQ ID NO: 100725 - DNA, 310 bp, Mimulus guttatus
  Intron number 1 from transcript mgv1a016206m (locus mgv1a0 16206m.g) derived from phytozome v7.0 (chr-ID scaffold_8; pos 2675011 to 2675320)
tgattatacagatttgattaaaattcaggattaaggtaaatacttcataattttttgttgccgtcaaaatcatggcttccccttttgagttttatatcaacagtttcttcttcgccccctttctctgcttatttcccgtcttgcgaaacgcatgcacgtgaatttgattttgtgttttctgttttcacgatcagttcgttggtgagtggaaaccctttcctgaattattttctgttttttttttttttttttttaaatttaatttgggggtggaggaaaaaagaggttcgagatttgcagggttgagaaa

SEQ ID NO: 100726 - DNA, 630 bp, Mimulus guttatus
  Intron number 1 from transcript mgv1a010538m (locus mgv1a0 10538m.g) derived from phytozome v7.0 (chr-ID scaffold_37; pos 1153675 to 1154304)
tatcagtgaggagacccaccaagattcgggtaagcttttcctccatttttcttttggtagtgaattttgcctactacctgtttgataatttgtctcaatggaaattgcaagtttttgaggttttttagtgcatgtctggtcctaacaagaactttgtttttttccttgggtaatgtttttgtgttgttgttttgctattgttgacgggagaaaatggattgactcgttccaattaatatgtcaacattgttgttgtattaacagtagagaaagaagaaatttcgaattttccccgtttagatggaagattatatggttggtaacgtgtgaacgtgtgttgttatgggatcttatatgaatgaatacaattgaaaaatgtgatgtcaaaatgctgcaactcaagctactcttgtcgggtggcaaagtttttattcaatcatggactttcagttctctctctcgcctttgagccctttcctcaatccattttcagattttttgttcattgggtttcctttacttaaatcgaagaaatgatatttcagttattttgaacaatattcgaattgaacttgctttttatatatgtgtaaagctatagataattctagcggagaagtcgaaccgatt

SEQ ID NO: 100727 - DNA, 633 bp, Mimulus guttatus
  Intron number 1 from transcript mgv1a023097m (locus mgv1a0 23097m.g) derived from phytozome v7.0 (chr-ID scaffold_138 ; pos 196085 to 196717 reverse strand)
tcctctaaatttgaggagttgagggggtggctgtaattatccaaacaagagaggtgtttttgtaatttgaccatacctcagggggtatttgtaatttaccctattttcatatcatagtttttcgtactttatattttgtttatttcggtacttaaatcaaataaaattgatattgtttttaaaaatattagattataccgtattatatatcaactattaaaaaaaattgaacttatagaattgattcccattcatcgtactagtgagttactaattaattttggtaattaaatcggatcaaaaattgcaattgcaatccaatcaaattggaaaatatggcgaatcagatttttggaagtcgagttttggaaatcgacatgaaaaaagttgttccaaacaatttaggaaattaggttccaacattcacaagcatttctctgaagtctaaactcctacactacaccgcctgcaaactcttatgagcagtatgtatcttcttcttcttcatcgaacctagaaaatccccccttttccattttcttatggaggcagcaaaacagtacagcagaaggcgccgccggaatccctcaatcgatagactcagcgatttgccggactcgattctctgtcaca

SEQ ID NO: 100728 - DNA, 535 bp, Mimulus guttatus
  Intron number 1 from transcript mgv1a004609m (locus mgv1a0 04609m.g) derived from phytozome v7.0 (chr-ID scaffold_14; pos 1950382 to 1950916)
atctcatcccttcgtcgccgtgataaacattgaaggttagtttctttcgattcgtacggtggtggtttcgtcagattcgcctcaaaaaaaataccgaattcactactgtcttgagttcttcatttgtttacatcggaattcaaatttattctattttccggttgttatttgaattgcgaaacagtaaaaattctaagaacttaaacaatggcttccgttgaggttagatccaattggaggggagcagggtaaaaattccgaccgaaataagaagactttaattatttattttctaggttaattaagattgccgaattagggaatgtgttcatatccaatcggatcccattggatccggcataagtgacccgtatccgacaaaatcaaagtctgacaaatggaaatttatgttgttcataatgctgttgagatttgagaacatatatatatatatttcagtgttcatgatttaaattttcaaaaatattacatttgggtataataattgtaatttctgattgtttagctgaactgg

SEQ ID NO: 100729 - DNA, 785 bp, Mimulus guttatus
  Intron number 3 from transcript mgv1a004494m (locus mgv1a0 04494m.g) derived from phytozome v7.0 (chr-ID scaffold_83; pos 974186 to 974970 reverse strand)
agtctgaggacatttttccgttcgtgtttgagtcggtaaggaaaatttaatgtactcttttattggctagaaatttgaaaatgaatggagatatcatgtaatcttccgtatgtattcctaaatggatatccagtgacaaataaaattagaaagattaatatgccaattgccagaattggcaaatgaaatctgaatagaattcaatcttctgcttgtactcggcatttctcctgagtcagtggatcacgtatagtttcactcaggatcattcttagattcccattgttcacgttttgccatgtcaaactcatgttgttaccaatgttggatattgattgggagctttaaatgtggtcgatcggccctttcattattgattttgtaagactttgaaaaaacaacatacctttttcttaatacatcatgaaaattcatctcgggtttcagcagccaaatttgatttggtattgttgtttctttactttatgagcaaggaactacctaacaactgaaatctgcaaaagctatgaaatctacctgaatcaaacttgtttctaaaatctaagtgctttcttagctacagtttgtacttctcctggccaagtaaaaactgatatgaaggtcaattcaacggttgtatcttttctccttccattttctacccttgtatgcattctttattcattatcttatctgaaattatcaacttgatagtcatcatacacctgccggtttctattgttcttgcagcgagtttgcagaccctgtcgttgctgaagcaactc

SEQ ID NO: 100730 - DNA, 878 bp, Mimulus guttatus
  Intron number 2 from transcript mgv1a024165m (locus mgv1a0 24165m.g) derived from phytozome v7.0 (chr-ID scaffold_207 ; pos 129066 to 129943 reverse strand)
ggttgctttcgctcgatctcttacgttttaactatgtaagtattgtttcattttttatttttttctttctaaatttcgtccttataattgtatatctttccatcatgtgtttgatttggttgaatttctacaagttacttggagtgtggcaatggccgaaagtcaagccttttcgatagaaaatgtatactcaatagctgatcttttcgatttttttgtaggattctgtttgataaaattgtcgcatatgcttcgagaattgtttttaaaaaataaaaatttgccttacgataaacgcacccggtaggatttgaatccccattactgatgcatatgcttcaagagttattatacttaggaacgagatttagtttattcgtttttgagaatgagaattagtttattcgtttacgagtgtagcttttttgtgaatgctccatttacgtgtggaagatttcagccatttaaagaaccttgagcaatctttcaaacaaataaactcgacgatttcccaaacaagaccatttcttttttctgtaaacactgaacatatgctttttttttcgtgaccaataatgcaatgtcattgtttagctgcttaggctgaatttgttatttgaactttttaatggtcacttaaggctccatttacgtgtggaagatttcaacctttatagaagcttgagcaatctttgaaacgaataaactcgtcgatttcccaaacgtgaccatttattttttctgcaaacactgaacagatgctttgtcgtgactgataatgcaatgtcattgtttagctgcttaggctgaatttgttatttgtactttcgtatggtcatttagggctgacgacgagcctgtagatccaaagagggagc

SEQ ID NO: 100731 - DNA, 498 bp, Mimulus guttatus
  Intron number 1 from transcript mgv1a000274m (locus mgv1a0 00274m.g) derived from phytozome v7.0 (chr-ID scaffold_29; pos 1443493 to 1443990)
ctctcatcgtcggccacaacggcgctggaaaaaccgtaaattaattcatctcaattttttttttttggtttttcagtttttaattgacgctgctttgatttcggtatagatttcttcgtatgtagagtttttttagttgcattattggtaccaatttagcatttttcaattttttgtgccttttgcttgagcatacagttgtggatggcagcagtcgtacactgtgcactagaaatattgtgttattgtacattgtgcattgtgaattgtactcttatgaactatgtagattttgattcgttatataaaattttatatgagttaaaaacttagaccatgctacaccttcttcaattgtttttttttttttttttttatcttctcgttttttccactttttcacaatgaggatgttatgctgtattcgttcttgaaaaaaaaaactaaccagtatgtttgtttctttctgcagactataattgagtgcttgaaagtagc

SEQ ID NO: 100732 - DNA, 536 bp, Mimulus guttatus
  Intron number 1 from transcript mgv1a003465m (locus mgv1a0 03465m.g) derived from phytozome v7.0 (chr-ID scaffold_4; pos 1929068 to 1929603)
agtagtaatcggaggagcagagtgaacacaaagaggtaataaaatattgctgcttcactcgcattaatttctcttctgcgtttttttttcttgttatgtgtggacaaagaaactgcatgctcgccacagaaattactattctgccattgttttcagcgtttgttcttgtctcaaactgcaccatttttttactgtatgtatatgcaagaaaaaattgttctagggtttggtttgtttttccacagcagaagaatctctgttctaacgtgtgttaacatggaatttgaaaagggttcttgataaaaacgtaatctttattaaaaaaatcgaggttatttattgcttactttcttctttcacttgtcgtgtatctaaacccggatcttttcatttttcagtcagtatcccaaattcccaatccaattcaattttgattccatttgtacaatttattgcaataatttgtcccaactcattatcttgtctgaaatatttgagtttccatttgacttgtcagaactctgtgaattccaaaa

SEQ ID NO: 100733 - DNA, 851 bp, Mimulus guttatus
  Intron number 1 from transcript mgv1a002200m (locus mgv1a0 02200m.g) derived from phytozome v7.0 (chr-ID scaffold_13; pos 1332097 to 1332947)
atcgaggtccgcgctctctctctctctctctctatcgttttgttttttaagcaaactaactacatctggaagtaagatgtgaagtgaaaagttgattttattttttttttccttttttttttagaattattagtaatctcattttttgtgcttctgttggggtgagtgatgaactttcgatttggctgtttctgtttgtcatggtggtttttgtagtatggtacggtctgattattggaatagtgtgggagagggtccaaagggattaagactcgagtaaaatgaacacgtgtcgtagtccatagtccgtgttgttatcagttataggctatttgtgtgatttccagtttggggatgcaaacttttcagtgattagtgagtggattatgttctgattttgtcatttgataatagctgtacgtcaactccacgagataacagcgggtagttattagttgttactcaacttgctaaaacacaactaatgatgcaattattgcgttttaaatatagtatttctttagttgattttgggccaatcacggctttatagacatctctggtttatcgtggattcataatgtccttcggcatttttggcgtgtatcaaatgtgatgttacttttgcctcgcttttccttatagaatttaatagaatggcaaaagataatatgacgttgtgcgtgaattttaagcaaaatcatgcatgaaatgttatgtacgggtgcaaggaaccacagaaaatattctttctatatgtagaagatatattttgaaggttatctgacataaataagttttattgtgtctaactaggaacctggaaagatatacattgttttggagtactg

SEQ ID NO: 100734 - DNA, 616 bp, Mimulus guttatus
  Intron number 1 from transcript mgv1a010820m (locus mgv1a0 10820m.g) derived from phytozome v7.0 (chr-ID scaffold_45; pos 126687 to 127302 reverse strand)
catcttctcaccaaaggtgattctatatctcaaatttttaaatcatttgattctaattttaagtactttcttgtatagttgtttaagatttcggcacatatatagattatatataagaaacatatcagatagtctccatttacgacaaaaaaacactcgagatcaattcactaacgtccatacaagaatattaatattcgaacaaaattatcgttattagctgtgaaaaaaactacgagttggagaaaaggtaaatttgattaaatgaaaattgattctgcattgacttaagaacttcataagttcttttcttattggatagatcatttaaggtttacatataaagattcaccgaaaaaaaaaactaatcaaatttttgcatgaaattcaaaattacccttcacacgaaacgagacgtacattttttcttttgaacaaaatcgaactagttgtgaaacttaagagttgataatataattaatggtgatagcataaagatcgaaaaaaattaacgagtttcggactagcgtttaattaattctttttaagtatatatgattgattattttaattaattgtatatgtaattttctttgcagggagatcttggaaaagt

SEQ ID NO: 100735 - DNA, 238 bp, Mimulus guttatus
  Intron number 4 from transcript mgv1a001887m (locus mgv1a0 01887m.g) derived from phytozome v7.0 (chr-ID scaffold_113 ; pos 506542 to 506779 reverse strand)
tttcagagacctggtaattgatagtaccctacctttatatttatttttctcatttcacttaccttttctttttttataaataattttcactctatttcaaatgttgttttagcttaaatttgaaaaaatatttcaaattcaacttttttcttcctcgtttttatccttcaatttgtcattttcagtttggtttttggtttttgaatcttggaatttggaatgctatttcaggtatatc

SEQ ID NO: 100736 - DNA, 784 bp, Mimulus guttatus
  Intron number 1 from transcript mgv1a001887m (locus mgv1a0 01887m.g) derived from phytozome v7.0 (chr-ID scaffold_113 ; pos 507654 to 508437 reverse strand)
acatctcatctctctctcttctctctcttcttcaggtattctctctctctaggatattcatattatcacataccgtatatcgattactgtgtggtatttttttgatttttgtttcgcgtgcgcattaagaggtagccatatacacatgtttttttttgcgatcggtatcgaattaatcgtattttatgtaaatatggacctcgattttgaggttattttagttgtttaagcttcaattggattttgattcgaattcgaggggtttctggtaggtttctgcttgttttgatgcgattctacttattttagggttttgtcggtccattcttacgttttttgggttttttttttaatttccttttcttttattttttgtattttgggggttgtacggatggagggaggacggtggtttggtgggttggggcgtttggtgttttatgagtacatatattacttgttggtgataaattgtgagcatgattatttgtgactgaactcttctatagaattgttctgtaaagaagttgtcaactggtgcaatttaaagttgaccatgtccagatttttgggagatttagtatgggaaagtgttctaggatctggtgccaacttcccgttgcaatttgattgtgtaattttctatttgttacattaggtttcttgatttatcgggcattatggttgatcctattgcgtctagtttcttgatgattcctgtagtattcctcttttaagtattgagttttaatgacctttacctatccatttgtttgtcagtggc

SEQ ID NO: 100737 - DNA, 843 bp, Mimulus guttatus
  Intron number 1 from transcript mgv1a003374m (locus mgv1a0 03374m.g) derived from phytozome v7.0 (chr-ID scaffold_1; pos 4239550 to 4240392 reverse strand)
gtctcgcctccattgcggctaattgcaggttactatcgaaaaacttcgattccaatattttatgttctgttttactatgttttggtttagctgcgatgatttggttgcattttgcttggattcagtgaatttttgagctctaagaagtaaacaatttgtcgtttcctgctgaatgcccatgtttatttagcatagtgtagtgttataacgttttagatttattagggtttattcgcagatgtgcaggctaatgcttagatttatgctggggtttacgcacaggcctagcgctagaactataagttcagcttaaatgaggagaccttttgttttttttttgctatagcttgtcgattcgccattcattactttgcggatgaattaattgtggactttgtgtaaattatgtatccgtttaacttggggatgtgcaagtaagatttatttgtatgtggggtgatttggtattgtctaaattttttcattactgcatagattctatgttctcctgctcttatgtaggtgcttttgaacaatcatccgtttcttctgttttcttccttcgatttttactcgttgtctgcagttctgtcagcttatgttctatatgatattgagatgggtcaacacacttgcattatgacttagtgaagtagtaggcatattgggaatagttatttactttgaaatggtacctctgtggactatcgactatgaccgtagttacttactgttatacttgtgaacttttagaaactctttttggacaactgaagtttctataatggttgtattatcttcaatgcaggaatctcagagacttagatttgagggagagtgaag

SEQ ID NO: 100738 - DNA, 755 bp, Mimulus guttatus
  Intron number 1 from transcript mgv1a012205m (locus mgv1a0 12172m.g) derived from phytozome v7.0 (chr-ID scaffold_55; pos 711843 to 712597)
aacttgaaaaggtaaacccaccttcttctgttcattatttttgctaaagaataggaaattttggggaaagatccgctatttatttttgttttatgatttttttccgggatttttaacccagaaaattgtttttgtgatttctgtgagaacatttagcagtgatctttatttgattagcttgggtaggagatgatttatgtggttaattttgtaagagaattatgattttctggtttatgtgtatcttctgtttatgtttatcttctgtttatttgttcacatttcagtggtgttgccgaattgcccacgaattttccgtaatctgtttgtcgaaaaaaatgattaatatatgcaggacaacatttatttcttgatgaccttgtgttacagagtgatcttagcaattaaaattgaaacttttgtgaagaaacacctctttgtcatgatcaatatcttcaaattggctgggtgtagtaagtcacttggagaagaaaaaactcgtatctttatcgatctctgtttgtttgtcagaaattgaattatttggtttaaagaatctgtcttattatttatgtatggctttggatttattgttgtcatttaggtgttttgacttccctgttctatgtaaaatcaaaattgcagtgaattagttcatttgtctattcccgagtggattaaatgttaagcgatgaagtaattagcaccagaacaacaagttgatttttttttttcttccctgtgttttcagatca

SEQ ID NO: 100739 - DNA, 820 bp, Mimulus guttatus
  Intron number 1 from transcript mgv1a020394m (locus mgv1a0 20394m.g) derived from phytozome v7.0 (chr-ID scaffold_3; pos 1691958 to 1692777 reverse strand)
acatcaagcatctcctgctggtaagttctctactcgtttcccccaaaggaaagaagttctacactacttcttcttttttttttttttttttttatatatatatttcacatttttttagctaaacttaatttgtcaactaggtttggaaataaaatcaaacttttcaatattaattcaacaaaatatgaataaaaaaagataatttggcaaaattttaaataaaatattaaataatttaaatggtaaatgggtacccgtgggtacccagatattcgtggtaatggttctgatatttctattaactttttaaataagtttagtatggtaataatttgagctatattaaatggtaatggttctgatattgcactctttcgagtgtacccgcttagctgccatcctaatataggtgcctacaaataaaagaaaataagtaccaaattgaagtcattatagtttatttttaaaatatataatttatcaaatgagtggtcttaattttatgattttatgaaattgggtgttcttatattttttaatttggaaagtaggtgaatttcaaaatttccaaaattctggaatatctatagcttttgaaatatgaatgaatttcaagaatccgaatattttagagttggaaatggaatcaattttatacttcagaaaaagatgatttcttccattagtttatctccgttgcatccgactttcaccaatctaaattatgaaaaaaacaagataaacttttgcatttgtatttgttgaacaaaatataccaaatacagacattgcaaaacgagagatttgatttattatttca

SEQ ID NO: 100740 - DNA, 525 bp, Mimulus guttatus
  Intron number 1 from transcript mgv1a024594m (locus mgv1a0 24594m.g) derived from phytozome v7.0 (chr-ID scaffold_32; pos 717867 to 718391)
tggtatggttttttaattttttaatttttttgatttgtttagtttatttcccctttcagcttttaattacaagttttgaattgatagatatggttttctttgacgaaattgttttctgcctgaatcttatgagaagttttaggagttgcggatgcatgattgtatctgttttgtgttgatgtggattgtttctgatttgattaattattagaaaaattgaagttcgagtttgatcgggtactacaacattggttgtggatgatcccaccgttatctgaatatctgcagttttaattttatattatgaattaattagttcgggatattctacatttcatgttcgggacgacgtaggtggaatgtaatttttttctttcccttgtctatttggtttttcttctacattttgtttaaagattgaagcaacggtgttcgggtttaggcattggtatccccacatatgaagtgtaggtacttggcagttttttaagaatgacgattgttggtatttgcagtcatttgatc

SEQ ID NO: 100741 - DNA, 692 bp, Mimulus guttatus
  Intron number 1 from transcript mgv1a015068m (locus mgv1a0 13843m.g) derived from phytozome v7.0 (chr-ID scaffold_60; pos 1166969 to 1167660)
tctagcttgaagattccgccgtccgtacagaactggtaacgccattttcaattttcaattttcaaattcaattttcaaatttcgtactaattgtgtgagaaatgaattctgtataaaactgaattctctcatctgctattttctgagtcctgcttagttttttttttatgtgtatttgtatatatttgagtagttcttatttatatctggctatataatttggataaatgcagagatctttgcagaaagttgttaatgacattataaattgtgataccagagctgctttaggttgtcagaatttaattcaagcatttttacaaacatgttgtgtgtgtgtgtgtgtttactgtgtgtgtgtgtttttagtgtgtgtgtgtgtttttagtgtgtgtgtgtgtgtgtgtgtgtgtgtgtgttgggaggaagagagagagtactttatttatttatttattaatttctgcttcatttattgttattgaactgagcccgtgagcaagagattcaatgcataacatttaaattacccacaaattatacatgtcatacctataaacaagttttttaatcttcactcacagatttcgcaacttgtcgaatcaaaattcatttataatatagcttgaggctctgtattttatttatgactcgcagtgctcgaatttccgcctgctgttaaaaacaaaaaa

SEQ ID NO: 100742 - DNA, 655 bp, Mimulus guttatus
  Intron number 2 from transcript mgv1a015068m (locus mgv1a0 13843m.g) derived from phytozome v7.0 (chr-ID scaffold_60; pos 1168003 to 1168657)
agaaggctgttgggcttggtggttggcattggctggtatatctttcgttatcttacaaatgatatgttcctaatttcattttttttttccgctttcttttagtagtagaagattgattccaaactgatattagtgttaagtcgtcttttttgtatgaactttcttggttaacaaaatcacaggaaaagctatgtccgatactgttaataataaattaatttataattaaattgtctttggtgatatatatatatagtaataaattaatttatacataaaaatagtagtattgaaataatcgtttcagatgattgtcttgtctaccttgctaaagttctagaaatttctacatccgaaattgatataatctcactttgatataatctcactttcgtttcctgataaatacaatagtgaagaagagttgaaattgaagattgcagaaactgtgaaagctagagttcgaattgtttgaaatcgaaaggttgccctttcgttaactttgctgttttagtgaatgtgcttttcgaagaaaaaaaatgattctcctttaatcgggcttcgttctttgtgttcttgattctcctttttcttttctgctaaacctttaaatgtttttgtcattacatgtgaaatgacgaacaggtactaaaga

SEQ ID NO: 100743 - DNA, 762 bp, Mimulus guttatus
  Intron number 1 from transcript mgv1a010390m (locus mgv1a0 10390m.g) derived from phytozome v7.0 (chr-ID scaffold_37; pos 1295847 to 1296608 reverse strand)
tacaaggaggtgcaactggattacgaagaatagcggtgagaagaaaacaaataatattcgtataaatattcttgaataaattcgtttgatctttttgttcgaaaaactttacgttttgtattggtgttgttggactatttggcggcctaggatattttaaattagcttagaaaaatcgaacttttctaaatgaatatgtgagaaacaaaatttgtgagataattttgcatgaagattaattccctgctgagcagactcgtgagctcgatgagctgattcgaaagatgctcgaactcgagttttccgagctcgactcgttcacatcgctacttgtaatgatatttgctaagagtagaaaagtcaaggtcaactactttgaagggattaccaatcattgcagaatttttttctgaactatatatattttagatgcttctttttagaatctttttttttagattaggttagtaatttaaactacttaataatggttatgattccaattccaatgatagttttatccaaaaattcatattttattttagacctggaaattaatattaaggttgttacaaccacactgattaatatacccgggctatatatatatatatatatatatatatatatatatatatatatatatatatatatatatataatatgtgtataattaatttataatatagtgttttcttgaaagtaatcgaaaaatgtttaataacagataaagtttacgtgcaatttcacgacgagtgctgg

SEQ ID NO: 100744 - DNA, 825 bp, Mimulus guttatus
  Intron number 2 from transcript mgv1a009825m (locus mgv1a0 09825m.g) derived from phytozome v7.0 (chr-ID scaffold_8; pos 2015856 to 2016680)
acgtaagtacttaccctctgcagtttggcgtaccattatggaacaaagataaatagaaggaatgactcttgtgcgaattccagctcataaagttcgattattaagtatcttttatggcgccacatgaatgtttttgttagtttttttatgagatcgagggggggattctgacttgttatataaatgcatgtgttcagaaataacttgtaatacaagattatgtaggtaatacatggattccactaatatttcaaattcaaaggtcggggcagggtccacggacctggagtttgtaatttactatagcagtaatatccgaaactacaaaatattctcgtggatatgcatactaattgctttgtattatatatgcatatattaatgtatgttacatttttctaaaattttgtttgcattgttttgatacggagcaatattttacatgtattatttttatcctaattcagcaaaagtttgttaatgtttacggcttactttttctttgaataggctacttattttatcttcatatatgttactgtgatacaggctgcatatatacatattcttggccattttttcacattgtttaatgatgtcatacattctgttcaacagtcttattgtgataatcttttatgtactagactatatctgcgccactcataggttaacatcctgcattatcgtttgtaagccgaatttatgggcattgaaattggcccgtttacatttgggatttttgttttcacgttcttgtgctataagacttctgtttccttacttgcagattcgcgtgaagtctgctcttaaccagcagtcgaa

SEQ ID NO: 100745 - DNA, 988 bp, Mimulus guttatus
  Intron number 1 from transcript mgv1a025048m (locus mgv1a0 25048m.g) derived from phytozome v7.0 (chr-ID scaffold_124 ; pos 351624 to 352611)
agtgataaagttcgcaagatgtaatctttctatcttctctgttttcttcttgcaaattttagttttcgggtttctgggttttcgggtttcggattttgggtttcggtttcaattgacttattttttattatttttatttttctgtgtgaactgattgattaatgtgtgctatgattgtggagtaattgcttgtgatgtgctgcattgagtaattttggtactaattggcctgtgtttcgacgatgcaatcgtaaataaaagattacctgctaatttcgatgatgggttttatgatcatataatgagaaatagggatatttttgatgatttagtgtcgaacaagttaaaatccgaactttcgtgtgcaattatattacaaaggtgtacaatcgtttgattcggtttggaggcaacgattcggttttatacattatattcctcttcaaaagtgtttcccgaaggttgcagctaagaatgacaagtgtaaggtgtcatttcccggcagaagtagtaatcggatatatataatttggaaataatttatatgtttgagccgttagataagatctcggtttttgtggtgttgtatttaaggatttgctaatagagttaactttgaccaacctctgtcaaaatatttgtttagggttagtggagttcttggtaattcttaatcttttcttgttaaccttttcgggtttgtcaaaaaaattcaaataaattcaaatatcgagatttcgtctaccatttatgttagaaagaccgaagtgtaacttagtggcagccgaaatctttttttggcatacgttttaaaccatagcaattaatgacatggtagatgtgtttatagggtattattacaactgtattttggcgtaggacgaaagaatttgaagtataggagcaaaagagaaagaccgaatataaactcttaaactttggttgaagtatatattaacttgtaccgttttttatatcaggttttacc

SEQ ID NO: 100746 - DNA, 459 bp, Mimulus guttatus
  Intron number 1 from transcript mgv1a011860m (locus mgv1a0 11860m.g) derived from phytozome v7.0 (chr-ID scaffold_11; pos 2476395 to 2476853)
aaaaaacccccatcacctttcctgtaagcttttcttctcttattatttatatttctttcagttatgtgtatatcatgagttgtattgtttatcactaaccatggttcttcatttatggagttctgattttattttattttttatttttatttttttttgagtttatttgctagggtttgtattttccccttttcacctactagaaaccgttgaaaatttaatttactgagtaatttgatgaagtttgattctgcttcgaaacgattatgccttgtttttcgtatataagatccggttcatcgataattccgttcgtaaatattggctagtttcgatctaccttcaatttgttacgaaatgatcaactgatcgtttaaatagcggttattttttttttaagctaaactaaaatattactttgcaggtacaatttaatacgagactgtgccacaaggcacg

SEQ ID NO: 100747 - DNA, 955 bp, Mimulus guttatus
  Intron number 2 from transcript mgv1a000736m (locus mgv1a0 00736m.g) derived from phytozome v7.0 (chr-ID scaffold_13; pos 2040156 to 2041110 reverse strand)
atcagtaggtattggaggaataggcgtgattcaaggttggtgacttcctcattcttttgagctttttggtttttattcttgtaccgtaggatagaagctcttcgtgctttgtttcactattttcgtcgcacactaatgagaagcattatgtgattcttcttgatggtttttggtgttgaatgtgaagggattgatgggtttacataataacattttgttgttgcgttcctaaaacagtagtgtttcaatcgtttgggtttttggtgtcagcatagtacgagcatgcggtcgtctccattcattatatccagaattaaggaatctcgtgcagatattgaaatttatagtagttgatcaactacatttatcatttttgcttgaagttaaaatatggtacattaatttccaacagtataaaccaaaagattacttgaagaactttgtattgctaccttattcaaggtgtaagattgacagaaaggagaataaaccgagggtgttccataattgtatggtacacagcttaaatccttctcctcgttctgctttggatggcctttctactgactaggtggctatcagtagactacaccattatccagttgaaatgttggagcctggaatacaagcgaggagacttagtggcaattacatcttaatgagaaaaatacaccaacggatgggacctggagaaatattagtatattactagctttgatcacgaaagagtgtctaaacacttataactgcatgccagaattttatccgtccttacttaagtgttgcctgaaagattgtgataaaatgttgactactatatatcccctcttaacgcttctttatgtaatcctttcatctttaattggcatgaccagatatttagatgtagtgctagatctgattatgttatgcctttgcagtggaattagcagtgaagaaaaagtgcacttacggc

SEQ ID NO: 100748 - DNA, 519 bp, Mimulus guttatus
  Intron number 1 from transcript mgv1a002950m (locus mgv1a0 02950m.g) derived from phytozome v7.0 (chr-ID scaffold_2; pos 3207250 to 3207768)
tttggttactccaagatcctagtacctgtcataaggtaactgctccgtatgtatgtatattgcttttaatgtttttttttttggtctgtttgctgtcagaattgttgaattaaattttttgcatactgagaaagttcgtagaaattcgttctttaaaaactttgaggtcatcgacatttgagtatgaacaagctatttgtttcagtaatggtctgatttgctgtgtaattagatgttattccatctctcattttgttaatgtctaattagtcgttgcattttgatttaatacccaccagtggctgataatcacgaattaatatagaatatgctaatgttactatctacatcatgataactttctaacatcagggattttcttgaaaaaaatatttagaaactaaaaatgaatttcggaagagaaagattagtatattctctttcgaacgatttctcttcattcaaatgggcaccaattttgcaggtaatccaatctgcgctacctgctctaattgacct

SEQ ID NO: 100749 - DNA, 473 bp, Mimulus guttatus
  Intron number 1 from transcript mgv1a008450m (locus mgv1a0 08450m.g) derived from phytozome v7.0 (chr-ID scaffold_223 ; pos 115714 to 116186 reverse strand)
gattgaggagtccctccgcttcgcttctctctctggttcgtccctaaatcttatacaatttacggataaacaaatatagattagattacagcggaaaacctaatttactgttcatcgtcgatttcatgccgagaatacacattaattccaatttgcaacatcaattttttctcataaatctgaaatcgtttagcatatatagtgttattcaagtactatatatatctaaatcagttattttcagatattacacaatttcagccatgatgaagattttgaattcaatgtaattccaatatctcactccaggaagagatgggagaagaacatgaacatcactcatttttttagcatcgatgtggatttaattaaaccacgcaccttccgattttttagttctctctttgtagatgttgatatttgctcacatttaatttcatcaatttttttttggggaatggaaaactttgcag

SEQ ID NO: 100750 - DNA, 726 bp, Mimulus guttatus
  Intron number 1 from transcript mgv1a013261m (locus mgv1a0 13261m.g) derived from phytozome v7.0 (chr-ID scaffold_75; pos 232095 to 232820)
cgcccctcgcgttctcctcgtcggatcttcagcaggtatctgtttcaaccaacgacaactccgcttctctttgattttttttttttttttttttttttttaaatcgaaattcagattgcgtttgaagttgggtttttgttacgaagtttttttggtggatacgattttgatttatggctgaatctgaactagatttgatctaacactagatacgaagtggtcgagttcaaattcaagtgtccacattttcgattcgaaggaaattaggttgtttgagctgttgaagcacattattgagctgtaactgaaattacaatatacagattgttggagctatacgattacttgatcttcttaaatgtatggaatcatgccagctaagcagttcttgagctaataattgatttgattagaccagattgttcgacctatgcgtttatcccagcttcttgaatttatggtgtcaacaaagttttttgtgatctataaccgaaatcaatatgcatttactccccgcagattgtttatacggccacacagcataaagaatcaacgcacacacaaatcacagtagattcgtattgcatagaactttctacctttaacgattaactttttttggatttgattttcttgcttgtggtacatgtccatgtttagtaaatgtattacgtcgttgtgttgttcccaggtgccccgattgctggctctgcagttgaccagatt

SEQ ID NO: 100751 - DNA, 514 bp, Mimulus guttatus
  Intron number 1 from transcript mgv1a003733m (locus mgv1a0 03733m.g) derived from phytozome v7.0 (chr-ID scaffold_37; pos 906165 to 906678 reverse strand)
tctctctagaataattcccaaatctcagataataggtatttggaattcaattcactaatttattgattgtatgtttgtttgtatacaaaacatgaaacattttgctcaaattttcgaagttttcatcttaattgaagtttttatttgtcggaattagttttctctattatgtttgatttgcctggatgcgtttttttttttggtatttaatttcttatgttagaattttgaatcttaacgaattccgttggtgctctgtctggttgaatgatcgataagcttttgatatgattttggcctaattgagtttcaatccaaaatagtctttcgaattagttatttgaagattttgtgatttttctgggtttcggaagagttacagctactcacaaatgattttgacattaatgttttgattttggaatttctactttctgggtgatttagttcctacatttttcgaacattttttaaattgagattttagcatactttactagatttggtgacggcg

SEQ ID NO: 100752 - DNA, 709 bp, Mimulus guttatus
  Intron number 3 from transcript mgv1a013940m (locus mgv1a0 13118m.g) derived from phytozome v7.0 (chr-ID scaffold_26; pos 1341944 to 1342652)
gctcttgccgaggcaaaggtacatcacattatttcaccatttcttctttctcaatcaagtatcagaacacagggtaaagaacatggggtaaattacggccacctttgaggtaaagtcaaaatacgaaaaaatccctcatatttgggtaattacaaccaccccttaactatgaatcttcttacacgtccaaccttctgatgtcaaatttagtggaatcttctagattatgtagaatatttatccactttgtacccgttttatcctattcgagctccacattttgaaacaagattgattataaaatgtgtttgtttggcggcttgtaaatatcagtttgtagtgcattagaaactttcatttttgcacaaacgagtatatattagagaatatttcacggaaatctagaattttgttgaatttgaccctataaggatggacatgtaagaagaggcatagtggaggggtggttgtaattacccaaaccagaggggtttttttcgtaatttaaccttatcttggggtggccttaatttaccctaaactatattcaccgaaatcgggttgtcaagttcaagttgtggggattttgtcattcatctgtttacagtagtggaattgttatttttatttcgcaaaattttcaatcttttagtgtgttatgcatttgcttgttaattacattttgtgtattgatttgtgcctcaggcag

SEQ ID NO: 100753 - DNA, 329 bp, Mimulus guttatus
  Intron number 1 from transcript mgv1a000901m (locus mgv1a0 00901m.g) derived from phytozome v7.0 (chr-ID scaffold_5; pos 51014 to 51342)
aaatctctatacccgtagaaaggtaccttctttcgctttcgattttgtttttgtttttatttaatttaaattctttgttgaaattcgttgtttgttgatctgttgattcgtctggtggacctgttgaaacacagtctgagatggatttaattttatgtttctttagggtttgtttttttatatatatacatatactggtttttggatgtatattacaaatctagggctattgagatgaaaataattagtattttttgctttgattattttcttctgattccaaatattcctcagattcctcggtgcaggtgtttttctttcgattgttt

SEQ ID NO: 100754 - DNA, 765 bp, Mimulus guttatus
  Intron number 1 from transcript mgv1a003713m (locus mgv1a0 03713m.g) derived from phytozome v7.0 (chr-ID scaffold_58; pos 28489 to 29253 reverse strand)
aaagttctcatactcgactctcaaacggtgcgttttttcctggtatcattgaattttatcataaattatgtttgggcatttgatttttacttgaattgtttttttttgtttttttttttttttgtctcattggttactgatcagctataatctcacacttttgatattataaattagaaataaatattagaaactcgaggatacatcgcagtgattcaaggtacaaattcgggatttctgttcttaagctctctgggaaattatgggagtattgggtactgagcatttagctcaagaagaatatctcagtctgtaaaatgggaattcgatttgttttggtaacagatccattgtcaaaatacgtgtattaggggagaaaaaagcttggtagcccgaatataaactgtgtattaggtgtggaatttgatagattttactatttttggtcgaaatttcagtttgctaatatacatttcaagaattttgtatatgtattaggatttgagattatacttaagttttaccaatcatcctttgtgcgaacttacatgttttttctattttcatgactgggttttcttatagcagcgcacttagtagtttaaaagtaaacattatttggtaggaaacaagatatcaaggataactcagaagttctcatgcaattttataaaaataaaattactttgtagtggaagagtgtttacctatttatttaattggattgcaggtcagtattgtgagtgtagtgtattcacagtcgga

SEQ ID NO: 100755 - DNA, 697 bp, Mimulus guttatus
  Intron number 3 from transcript mgv1a015807m (locus mgv1a0 15807m.g) derived from phytozome v7.0 (chr-ID scaffold_126 ; pos 254427 to 255123)
gttcgacagtaagtaaccacttttccgaggtgcagtcctttgtcactccgatttttttttttcttttttttttaattacatgcctgaatttataaataaatgcagtcggcagatttgattatgctaaaagagcagcatatataaaatttcttcaatgtattatgttttttcgaccttttgggttcatttaaaaatgcatcaagtggtactaaagttatcctgttaccgtttttaattaattttctggaaggtcaagcttaccttcaatgcaatagtatgtttggtagaaatttaggaaaattgttgcttttcgagttaatgctatggtgtgcacgagtgtctacacctatactcacgggcctacatgctaaagttatgcgtactatttattctaaagccttgtttgggagagttgatggggtgggtaagattgattgaactggctaggaattaggattgataatgttatatgtgaatatcgttttggttttagtgtgtaatacttggagttgagtttggagtaactatccttcatattgtctactaggcctaatcctgattcccaaacatatgacatagcttgattatattgtctatcaaacctaatcctaattccaaacaaggtcttattcgcatatatgatcattgtcctctaattgcagggaaaacaagcatcacttgcagacaaatttgagta

SEQ ID NO: 100756 - DNA, 507 bp, Mimulus guttatus
  Intron number 2 from transcript mgv11b020499m (locus mgv11 b020499m.g) derived from phytozome v7.0 (chr-ID scaffold_2 364; pos 202 to 708 reverse strand)
cacaaacgtacatgtaaaaaaacatgcgcaatagtgcattcccaacaacgttcttaaaaacgcgaaatacaacaataggactttaatacgcataaccaaacaacagcacgaacactagatacaaaagatacagtggagtgtagaaataacagtcaacgtttacgtttacgtggatttttttatggattaatttatatttccgttttaattggtggatttagtattttataggtacaaattgataatgaggtgtccatgaagccaaaatgatcaaagagtaagaaaagagtttttttttttgttaaataaaatcaaattagatgagaggatcccttaacatcttcggtagtgtcctcgaagtcgagcatcactttcgcaaccggactcgaaatcaactggttccggcggcattagaacgatatttcagctgactaaaattcctgtttaatgtcaaatttagaaattcccccccccccccatggtcaaaattagattcgaaaagtgatc

SEQ ID NO: 100757 - DNA, 535 bp, Mimulus guttatus
  Intron number 1 from transcript mgv11b020499m (locus mgv11 b020499m.g) derived from phytozome v7.0 (chr-ID scaffold_2 364; pos 903 to 1437 reverse strand)
cacaaacgtacatgtaaaaaaacatgtacaaaagtgcattagaaaaaacgttcttaaaatcacgaaatacaacactaggactttaatacgcataaccaaacaacagcaagaacactagatacaaaagatacagtggagtgtagaaataacactaaacgttttcgtctacgtggacttttttatggattaatttatatttccgtttgaattggtggatttagtattctataggtacaaattgataatgaggtgtccatgaagcaaaaatgatcaaagagtaagaaaggagtagcaattaggaaaataatatcaaattagaagagaggatccctcaacatcttcggtagtgtccacgaagtcgagcataactttctcatccgaactacaaatcatgtgattttggcggcattagaaagctatttcagctggctataattcctgtctaatgtcaaatttctaaatttggactcgaacatggtcaaaattggattccaaaagcgatcatgaaaatacccgcaacagttcgaggacacga

SEQ ID NO: 100758 - DNA, 648 bp, Mimulus guttatus
  Intron number 1 from transcript mgv1a011161m (locus mgv1a0 11161m.g) derived from phytozome v7.0 (chr-ID scaffold_169 ; pos 432519 to 433166)
ctaactttctgtcgtggaatttttgcattatacaggtactgattcctcgtttacgctttacaatttttgtaattcgtttgatttttggggtttttattttttgtttggggacctctattcaatttggtgtagcaattatcttaccagaaagtgatattagttttaattaattgatgaatataattgatattatctccagttaaattttctactttctggagttatttttatgaatataattgttctgaatcatggaatttggaactgagatgtagattaaacaaagagaagcggtaattattcttttgatacaataggattattttgtggctactagtgaacagaaatcgaaacctaatttcgcaatctaaacggaagaatcgtcacatttcgttgcttcagtcattattatttcttagtgttgaactgtagctaataaaatcgaaggctaaagaaaaatggaaaaaaaacatgaatctgctttagtgaagccttgtggacagaagcagaactaaatttatttgttataatttgagatttacaagcccggaataaagtcgtgcagtcttataattcgtgtttaacccgattctgtaaagtgctggacttgacctaacaaatgttttatgttcttggcagggattgaca

SEQ ID NO: 100759 - DNA, 955 bp, Mimulus guttatus
  Intron number 2 from transcript mgv1a017013m (locus mgv1a0 17013m.g) derived from phytozome v7.0 (chr-ID scaffold_85; pos 972360 to 973314 reverse strand)
tacaggaatcgagcctcagctttgggctagatgtaatttcctcaatcttcattttcagatccctatttcttattcgaataatgctggaatttacggtggattaatttatacattttttatttttgtgtcttatttgctgattttcaattttggtttgagtgagctctgtttctagggttgattagtgcattttcagctacataaaattgaagtcctttaaaaaagcacacgaatgtgaatgtataatatacatctttgatttatttgatttatctgaattattatcattctttataaactatattgccttgtttcaagagagatgcccgtgttagtagaaactccttagtatcatgtaatgtggagtattttatgttggtgtcgaaatttcggacacgaaaatatttctcacagtgcattgatattttcagccactcacttttgcattgttggatagccactttggtagcatagatttagatcttttgcaacgagaataatgttttataataaaagtagaaatggtggaaagatttgtcctttacgtccgaatcaaaatcaggcggcctgtcgagtgttcgtggaattagggacaatttttttctcaattctaatcgattagtcattttattagttagtggtaaatcccccccaggcttcacaaatcgaaagggccacatgtttatctcttataaatactgataacgtaaggaaatatgcattaggcatcaaatttatatcaaaccaatttccacttcactggtagtacaaaaaactagtgtcgtattgactacgattttttttgaactttttccttttgaaagtcgatcttgagcgctttgtgatcttgttttcttgggatttgcagaaaagaaacactcgatatcaagcttatattcatttttagtttactatagaatctgttaacgaattttctccattgatatatgcagac

SEQ ID NO: 100760 - DNA, 681 bp, Mimulus guttatus
  Intron number 1 from transcript mgv1a002793m (locus mgv1a0 02793m.g) derived from phytozome v7.0 (chr-ID scaffold_22; pos 571997 to 572677)
tcaacaacatctctctcggcggccgtggaggaaccgtacgtattcctcttcttctttatcaattcatatcgattccgaaaatcctctcttccttatcagcaattctgtggttgcatttttttttcccgatatgttgcctttttataattcttcagacaatttgtttatgtaacttgtgatgatttgaatctgaatctacgtttcttccccgtttttgttcgattaggcttcgtcatttttccatgggttctgtgtggaatttttttgttctgtgattttggttgggacgacgtcgtttttgtcagttattgattttcaaggaatttttttagtgttttcggatatccacctggaaaattcatctatttccccataccttgcggctactagaaaaagattagttttaagaaaatgaagaatataatattcaattcctgcaaaaaaatcttcaatttattaaaaaaaaaaggagagcaacttttaacagttgatttattctgtttcttctttgatataagagattttgactggtattagatgcattcgagaacgattgttcggttgacctctagtgggggtggaaattttgagtttttctttctttcggatgattttttattttattttttttaattcggggtttcgaaatgtagaatccagggcagcttaaagttcattcag

SEQ ID NO: 100761 - DNA, 343 bp, Mimulus guttatus
  Intron number 2 from transcript mgv1a008448m (locus mgv1a0 08370m.g) derived from phytozome v7.0 (chr-ID scaffold_47; pos 1490775 to 1491117 reverse strand)
gaaatcaaggttttatttcttgttattgaattcaaacttatgttttatatacttatagtttcttttcagtaacattgttccctgcaaattaatatagtcatgtaactgctttaacatatcacacttatcacctaaaagtattaaagtgatggtttatcaaatgataatccgcaacttaaataaataaactgtttctttgtcatttcttcaagtagggcgctattgagtttctcttgtgttagtttcattatataaaaaagactcctgttgttctgtttctttactctgcagatctgatatttttgcattttgtatgctgacgtaggaactggagaaattacag

SEQ ID NO: 100762 - DNA, 556 bp, Mimulus guttatus
  Intron number 1 from transcript mgv1a008448m (locus mgv1a0 08370m.g) derived from phytozome v7.0 (chr-ID scaffold_47; pos 1491166 to 1491721 reverse strand)
ttacagtgggcaattggtacttccttttttgtttcttcttttacacctctctctctctctctctctctctctctctctctctctctctctcaatgagtcaattcattcaattactgctgggctggctgctttcatacattatttatttgtgaaattcgttctggaaataatatttttatttaaaattgatagttctaggttgaggttctccattgaactcatgatcaatatgtttctggttattggctttctttttttctatttcttgagattcagtaattcgttatctaaaacctatataagaatgaatgcctattttgaatttatccaagaataattatctcgttggactaaatcatgagtgaataattaattactgtggttccagttaaatgcgaaaagtcgccaaataactaagttagattatttaatgtatgtaacataatcggagatgtgaaataaacattcttttagtctatactataattcagttttgtttttattatgtttgatttcggtaggtcattcagatccagcaaagttaaaagaaactaca

SEQ ID NO: 100763 - DNA, 961 bp, Mimulus guttatus
  Intron number 1 from transcript mgv1a025299m (locus mgv1a0 25299m.g) derived from phytozome v7.0 (chr-ID scaffold_66; pos 1260746 to 1261706)
tttatctatcctatacccggtgaaggttacacctggtgattttttaccgttgatctacatataccaatgtgggtgtgtgtgtgtttgtgtgtatataaatggtaaagatgtacccggtgtatttcacccggtgtaggatctcaaaagccgacaacctctcatcctcccatatttccatgcacttaatttaaccaagggtgcatttggatggaaggatttggggaagggatttcaaatccataataacaaatcccttgtacttgtttggattgagggatttggggatggatttcaaatccacccccctcctttttagttatgttttgagcaattgaggtggatttcaaataactccaaaattggagtcatttcaaattccttccccaaatcaaatccctccccaaatccttccatccaaactcactccaatattatatactaatattaactaattactctttttttcttcccataccattattaataatcataaactatacaaaaacaaacaaaaccatagatccccgcaaaatcaacacaacatatcacatgaccaaggaatatttatcatgtactaataaagattattttcttaaatacaaattggccacatttagtaaattcaaaaattattacaaaaatgaatagaaaaaatataatatgtgcactaatataattatttttaaataaaaaataaaaataggatgcttcttagaattatcaatcacatgtgtctcttaaatactctccattcgtacatcttctctctattgatgtcagccaactccccaccccaccccaccctactctcatcgtctctacacatcaaccacctgcatttgaatcttgatctccaacaatgttaatggcatttaattcatcccatttgtctgttttcttcacttttctttttttcctactcgcagtcgtcatcccacattcctccgccgccgccgatcac

SEQ ID NO: 100764 - DNA, 595 bp, Mimulus guttatus
  Intron number 1 from transcript mgv1a003067m (locus mgv1a0 03067m.g) derived from phytozome v7.0 (chr-ID scaffold_27; pos 1765131 to 1765725 reverse strand)
acgctttgccgtctattgccgttgtcggcggccaggtctgattattttctcttttcttttacatctctctgtttttaatttcttagaaatatatgtgtttcaactgtgatgctgatctatggcatctgagagctttgggatttttactggtttctgtagatcgtggtgaatgttgatttgattggtaaattcaagtgttttcattatggattggagtgtagatctgcttctgattgttgtgaatttgaattttcttttgtcttatattattctctcaccttatttagtgttgttttcatattaatattggcttttaggatgaattaggatttgattttctagcatctcaaaactaattcaaccgtatctttacattggtgatggaatttaaaacttgattaaatatgttggaagattactgttcatgcctaatgaccgtgtgtcagtacttgaagttgattttgattttaacaagtagatgatgttattgatatattgttattgaatcggtcgtgcaactattgctgtccagttgattgattcacttttttgctttatagagttctgggaagtcgtcagtacttgaaagtattgt

SEQ ID NO: 100765 - DNA, 820 bp, Mimulus guttatus
  Intron number 1 from transcript mgv1a023386m (locus mgv1a0 23386m.g) derived from phytozome v7.0 (chr-ID scaffold_229 ; pos 292052 to 292871)
ggtagcttccgtcagttttttcgtgaaacttaatcgcttgtgtcaaacgtcaaagtatttttttttccagatgaacccttgtgttttcattttccctttcatattttcagatgaccccttgaagtttgacacacgcgattaagttagacggaaaaactagcataagctacccgataaactacaagggggttatatgctgatattacgagcacaagggagtcatctgcaagagcttgtaaccaaaggggttatgtgctatttaccctaattattaaaatcaaacccaatttctgatttatttatgatatatctaaaatcgatttttatttcagctacaatataaaaaaaaacagtaatcccaaaagtttgcaaattggacccaacaagcaaaattcattagaaaagggggcaacttagaaagaaaaaaaactcaaattcagccctaattcatcctttgattgttagttgttgacggtcaaatgtgaagtgtatatttttacacttaattatatcttttaattggaacttctagagtattttattgataattggtgcttaatgtttcgatttattgtgttttagtcacaaattgaagaattgaataagttatgggtcaaaattacaatttagaaaaaaaggtggactaaattggagaagtcaaatatcctagaaggaaagacgcggtaaagaaacttccaaaaattacaacgaaacgaaatttcgcttattattaataatacatcatgttgttctacatttgaagtaatcgattttcccatacaaagaaacaccgaaaaaatcgattttcttgtccaacatc

SEQ ID NO: 100766 - DNA, 956 bp, Mimulus guttatus
  Intron number 1 from transcript mgv1a026266m (locus mgv1a0 26266m.g) derived from phytozome v7.0 (chr-ID scaffold_394 ; pos 18468 to 19423 reverse strand)
tatcagtgtctctgtcggtaagcaaggctggctgctgtattgtacacaaaatattatgtatgatgttatattttacatctcaacgttgctgcaatagattattctttggtggcacagtttataatgagtgacagaattgtagcttgtcctttgtttgaaacttattctcctcaaacaatatttatgcccaagccgcatgaggaagtcaatattttatgtttagatgtttgacatacatcttggtgcatatgtttctttataaatctgaaactcgcgtagctatataatttgaaacttgcattgttgtcagtgttacttggattctgtaactacaaacccatttgatttctggccacgtaattggaacatgaatatgtataagtgtacggaacttggaaaaggtagaaaactctgttctctgacaaaatggtgggacattgcgtgagtttttgtcagtgtattattcaatctactcttgtttacaagttctaatacattttatgtaccttctccctgaatatttggggtaaagtccacgtttaaaaattctctaatagaataatatatatttttcgatcaagtaatgcttttttaactcttaatatattgactgcactaatttaatcttgaataaacatggtattgttgtcactatgatctcttataatgatacatatccatcaatttttgtattcaagtatccagtgtctgttaggattttgatcttaaatgctgtctcgtgtacatgatgatgatgtgcttaatgcgacacctatctttttgtatgccttttcgttttatttcatatactagatagatagcttctttatgttaaaagtgaaacaacttttatggatcaggtaaacagatactgtttctttgcgtctgcatctgctttttattgactttagccttttgcaatttaatgtaggtaaacagatcaggtaaactattaa

SEQ ID NO: 100767 - DNA, 406 bp, Mimulus guttatus
  Intron number 2 from transcript mgv1a007261m (locus mgv1a0 07261m.g) derived from phytozome v7.0 (chr-ID scaffold_17; pos 459732 to 460137)
ggtttagatacttctgttattgtaccgtggcttcggtatgtatgtttattcatctctcatattctaatggacgattgattcatcatcctttcgtctttcatacttcaacggattcatctctagtgtttgttgattcaccgattttttcttgcgttgttttgtcaaaatactatatagaaaagcgacttttgattctcttgttatgcattcatgtctacacttaccttttttttttttcttcttttcgttttcttttccggttgatgatcttcttccatcatgtaattatatgtagtagctcaagttctggaaaagcctaagattgtatgtagagaaagataagatttctgttgtcatttgtttagtttttcatttgtgtgctgtttggttgattgcagggagaact

SEQ ID NO: 100768 - DNA, 784 bp, Mimulus guttatus
  Intron number 1 from transcript mgv1a015771m (locus mgv1a0 15771m.g) derived from phytozome v7.0 (chr-ID scaffold_92; pos 249567 to 250350 reverse strand)
tccttcagaatcaaaggagtaatctctctttcttttttatgtatgtttatatgtgtgtttatatgtgtgtttgtgtgtgaagtcttgatttttttaatagtctctgttttcgtatgtaagtaattgatttttctggtttgtttgctttcattttcaattgcaacaatggaggatcgatcactttgattcttgattacaatcatcttccaggattttcccaaatccgatgatttatttatttattttatttagggcaattacggtcgacgacctgatgtatggccaaattacggaaaaccccctcttgtttggataattacaaccacccctttgtttaaatatttttacataaaatttatataattcggttatttaccgaaccaaatcatatattcagttcggtaaactgtatgaaatgtaaatgttgacataccgaaatttcggtttggttttacggatttaacatccctcaatttacctctggaggggttttttcgtaagattatacatagttgaggagggtggctgtaattacccaaacatgaggtttttttttgtaatttgaccataactcaggggtggccgtaatttgcccttttatttatatataattggcatggattttcttagattgtggtttcatgtagaaatttcattacaacatatgatatatattctttgtgattcctgtttctagtttgttggtaaatataataattaatatatgtttagtaaatattttatataattgtgatgatgaacttggattggattggccagcaaa

SEQ ID NO: 100769 - DNA, 550 bp, Mimulus guttatus
  Intron number 1 from transcript mgv1a016807m (locus mgv1a0 16807m.g) derived from phytozome v7.0 (chr-ID scaffold_64; pos 1279938 to 1280487)
tctctgtaagtaaccttcttcttcttcttcttcttcataccttcaaagattgaatttttttttgtgattttcaagtaagtgttgctaattggttgaagtgggatcgaaattgttgaaaccctgttgctgaatttgattagtcgtttgattgctgaattaaaaattgtttcttgatgaaaattgagggggtttttacaattggtttcagatttgtattagtgataatttgccctattttttttttgttattgttgtgatttttaagaaagtgttgctaattggttgaagtatgataaaaaattgttgaaaccctgttgctgaaattgattagttgtttgattgctgcattaaaaattgtttcttgataaaaataaagggggtttcttcaattgctttcggatttgcactagtgataatttgccctaatttttatgtgtaagaacaatctagtaaaaagttttctaactgtccattgttgtatatgtaaactggggccttgaattccatttttctgcacttggcaggatacgtttcttcctcgaaacccgac

SEQ ID NO: 100770 - DNA, 742 bp, Mimulus guttatus
  Intron number 1 from transcript mgv1a002507m (locus mgv1a0 02507m.g) derived from phytozome v7.0 (chr-ID scaffold_2; pos 382639 to 383380 reverse strand)
ccgacccacttccgccgtacccagcttccatcaaggtttcttcctctctcccacaccttaataatgtgcccgccatgtgtttgtttatattactttctatgtggaagacgttaatttgttgggtgtaggtgttttaagttattggtttatgttggttggaatattttcttcagattgaattttctggaatgaattattatataattgttctgttagtgtttttttagggtttttcttgggggtggggggaataaattgcaccaaataagtactgaacaactagtaaaattgaagctttgagtagcatttcttaagcttagcctaacttcctaggtttttcagtttccttctttgagctaaagctacctcgactagtattcgacgaatgttttgtcatactgtttcaatttttattgatagcacaagtttttttgaatattttaagctcctaatttacgattcagtctactgccgctaatggtaacacctatcataccctaaaactcgtttaaaacgtatggcatcggttcgaggttaactgtatatccattgtcagtcttcgtcttccttttactgatcccgctttttttcctagtacaaagaaaattcttagttatcttagttcatagaacatattcttccagcactaattcttcgatcgttgagtttaatagatattaaatttattcatgagtttctatttgatggttttgctgaaaatcattattctgttcttggtagg

SEQ ID NO: 100771 - DNA, 908 bp, Mimulus guttatus
  Intron number 1 from transcript mgv1a025014m (locus mgv1a0 25014m.g) derived from phytozome v7.0 (chr-ID scaffold_15; pos 627066 to 627973 reverse strand)
agcggtttcagatagaccgtgggagataaagggcggtttcgagcttgaatcatttaaaaaactatcaaagttaaattggatagatagtttaaataattaaagaaattccaatgttaaatatcaaaattgaattatcaattattgatttgatatttgagataatattttgatattgattaaaattcttctactccaactatggttatcaaattaattattaattggaagtttatgggtgattttgtttgtaattgccacatgtcaatttgtgattgaatctttagatcgttacattttttttataaattcccagcaagtatatttacatcccaacaagtgaattatcaaaatagaaccctcatttgataactccattggaattaaaaatttatatattttaatgcgaaaatggtggttaaaggtttgaatagcatgtttgataatcccattggagttgctattagggaaatttgacgaaaccctccatcagacatgtagccccaatttatttggtatttttaagatgaattcaaaaggtcttttattaataaaaaataattaagtatgaccattatatccttactttattctaacaaattagggttgaaaatacattatatttaatatattttctatttatatcacattctcaatcgatccacaaatctcgcttcttaatattagactaccatttcattgtagtgggaattttaattctaaaacggttccacgatagtgtagcatgagtaggaaggcgacatttcgattatatagagtgattttggtgatttgtgtctgtttcgattccagtacctacagcgattccacctatcatattttcaaacgataactgataaatttgataactgcttttttgttggttatccgacagacgaccaacgagatcc

SEQ ID NO: 100772 - DNA, 643 bp, Mimulus guttatus
  Intron number 2 from transcript mgv1a013337m (locus mgv1a0 13337m.g) derived from phytozome v7.0 (chr-ID scaffold_48; pos 846894 to 847536 reverse strand)
cagagataaagaaaagcgccaagcaaggacaggtaagtcaattgttttgttgtatttagaaatctgctaggtggctccttttttctttgcacgtttttagtatcgagttaaaaatattattctctcttataagtgaagactctttaagtttttaaggaaaacaagctgaagaaggttgatccatggattcttgtattttacgtttttttgtcttcttaaatttcctcgaaggaatttatagaacacatgcttctacaatgagaaaatatgcctcaataagtaatatacttacagacatataaaataaacattgaaataacgatctgtgtaaagtgtaaaacctttctccaagttcagaataattaaaacttgatgtgcagccgactttaataatttccgttaacactttgctgaatctttaattttcagcacatctcaatccttcatctttgactggatgcttcattccggactttgcactgtataaattgctaatttctctcattggacactgtccttagacctgctgcaatttttgttttcttctctattttgctaattctgtttgcagaaatgaatgtgctcacttacttgaatgtgtatttgatttatagtgtatttgttacagggagctgttaaggtg

SEQ ID NO: 100773 - DNA, 750 bp, Mimulus guttatus
  Intron number 1 from transcript mgv1a013337m (locus mgv1a0 13337m.g) derived from phytozome v7.0 (chr-ID scaffold_48; pos 847613 to 848362 reverse strand)
gagtttccttttcggaaagaagaagactcccgcaggtctgtttccagatttaatttttgttttttctttttttttgttgttgttattgaatcatacttcatgtaacgagtttttatcagatgggagagaaaatttgggttttggattgtctcgaatttagattggatcatcggaaagataaataattctttaattacttgattagggaactaggggaaggtccaatttctagattgagttaaataattagagattggagcagagatttcaagcatgattaatcgaattgttggaaaaataatggtaatacggataagtttacgagaattgctggcgaaacgttcgtttactgcattgagcatttgtctgtgtttaatttaactgttgtttgaagaattcctcttgcttgagttatgggttttgtgacttgaataacaatctgtcgacggaatgggatcattagacgtgtggactcaatattactttcattctcacatgactgatgtgaattatgaattcaatgagaaaaatgtagttcaataagagttacttttccgttttctaatttttgagaaattcgagtgttttagtctcgtaaattgattcaaatgtctgagagaataagagggcggttcatacactggttcaagattgcatatgattttgtgtttgttcgtcttgattcttgcatatttgatttgctacatgtgacgtttgtatcttgcagagcttctgcgggaaaataagaga

SEQ ID NO: 100774 - DNA, 782 bp, Mimulus guttatus
  Intron number 1 from transcript mgv1a003561m (locus mgv1a0 03561m.g) derived from phytozome v7.0 (chr-ID scaffold_114 ; pos 441117 to 441898)
ggtacaaactggagaatattcaacataatctataagattccactaaatttgacacagtaaggggatggacgtgtaagaacattcatagttgaagggcgaagttgcaattacacaaacattatggattttttttataattaccgccacgcctaagacaagatcaaattacaaagcaacccttgatgtttggacaattaaaaccaggtccctcaactatggatctttcttacacgaccacccttatggtgtaaaattcaataaaatcttctagattccgtggaatgttctctggtttgtactcgttttgtgcaaaaatgcagtttctaatacacaatagtctcatctcatgatatttacaagccaagagacacaactcatgattatcttgtttcaaaatatatagctcgaataggttaaaacatgtacaaaatgaaaaatattcaacataatttagaagattctacataagttggccgtaatttacccatattaaaaaattaaaaggaatcgtggtcggcaggattcgaacctgcgcgggcaaagcccacatgatttctagtcatgcccgataaccactccggcacgaccacaattgataagttaagtccaatcatctaattccacctgtaacttttgttacctccttttatcttcaattcggtggtagtttgctgcagccccattccatgtttgaggtctgtaaaatatttacttgcatttatttaaaaaacgttgcgccattgttgaaactactgtcgtttcatttaagaactgtattcttt

SEQ ID NO: 100775 - DNA, 894 bp, Mimulus guttatus
  Intron number 1 from transcript mgv1a017626m (locus mgv1a0 17626m.g) derived from phytozome v7.0 (chr-ID scaffold_30; pos 1185165 to 1186058 reverse strand)
tccacgtctggattgcccttcaccaggacgaaaaggtaatttatttatattccttctttgattttccgcttcacgatacctagattccgctctgatttttattttcgcgtgttttaatttaatgggtaattttttgcgagtggaaaggaattgttgctggtgattttgctttgttattttttttttatttggatccgattatgtgcgtgccagttttccgtatctgttttctattgattttgggttttatctgtttatcgtagctaagatcgtcatgggtttctgtttatatttttaattgggttgattttgttcattgtggaaaaggattttggggatttaggttttggatttggggattttttttttatcgaatagcacaataatcgattatgttttggggcgatactgcgatttccagattatgtgtaaagaaaactaactctactgcaatttattattcgtagtacattgtttatacggttttctaagtaatattttgtgaatatcctctgttttgtgaatgaatttggaattggaattggaattcggaaaattgtactgcaatttctccaacccgtattttgtggcaactgctactacgttccaaaggtgcgggtcgagttatacgggcgtgcatacaaatcacgaagatttttggttgatgcaaacattcactctcaaagtggctttaattttattcccgtgttgatactagtgcttggatccgtgtcttacctttgtactattgtacttcggatttttatctgtgcaatgaaatgtatatgtttcgatgtcaaaccatggataaattttatcggaaaaacgtgatcgcataattgctaaattggctcttttctcccgtaatattcttgtatcgtgcagaaagagaga

SEQ ID NO: 100776 - DNA, 659 bp, Mimulus guttatus
  Intron number 2 from transcript mgv1a012207m (locus mgv1a0 12207m.g) derived from phytozome v7.0 (chr-ID scaffold_7; pos 3330144 to 3330802)
ttgctggccatcgcgcatcccgacgacgagtctatgtaaggtttgaatttgcagtagtgcaatttgattacaagtaaatattgcaggcttacgaattactacattaaacgcatcgattgtgataacttattctcatgaatttaatttgtgttttctgttagttatggtggcttgatagtcctttgatttggtggaaattattatcaatagttgatcccagtttcgtattcttaccaaaaatcacgtgtcttgattaagattgctcgctgagctacagcgacgctaggacaattaatgcattccgtaatttttgttggaaatatatctttgaggtcaatagttacgaaaatgtggtttattttttgacaagcatgtacgggtgaaatactctgtaatttttttttccgataatgcttaaaactgtgttttactttgtgtctgaaagtgtacttctgaactcaaaattgatagaatagcataaaagtatgtgctgaactgaattgaactaatataaactatctttccaaaatcatcttcgattaagttgtgttttattcaatctagtttttcaacaatttttcaaggttgcaaaccttctttatacgttttattttgcttgtgcaggttctttgctccagttatcaattacttaatttcaa

SEQ ID NO: 100777 - DNA, 997 bp, Mimulus guttatus
  Intron number 1 from transcript mgv1a001465m (locus mgv1a0 01465m.g) derived from phytozome v7.0 (chr-ID scaffold_113 7; pos 662 to 1658)
ttggcctctcacgtcaccgtgcattgctttttaaggtaagatcaagatttcacagatttttttcaaataaaagtttcaagtgtctttttaatgataggtttggtttagtgaagtatcattgattatttagcgggaccctctagtttcgtcaaataacttattacctattttatatgggactcatgcttctcttatggttagctaaagttaactagaagtaaccagatatgcctgatgaatacgagtaaaaaactgttaaacaacagcaagttgccaaaacaaaagaaaacaagcagaaactaaaaacaactggtcctaagtcctaacacattctactggaagttggaaaaagaaaatcttggtgttaagaaaaatgaggagcactgtgtagatcaagatgttgagggttaaccagacttcttgaacacagctgtttggtgaaaggttggcttgcttagttctttggtagctgtggaactagagtgatcagatgggagtgaggtatagagagatggaattaggtaaataggaattgcgaagtcaaaggtgcgaaaatgagatcattttgaagagagcaagatactgaaatacaactttttagatgtgacagataaatttgtctcgttactttatggtcaaatgcaaactattcaattgaagtaaaaaaattacttcaaactggctctcttggggcatttgcttcagcgaaattcccaaaagccaaaacacatgcccagacatttattttatgagtgggtaaacatttgcggtttccattttgtctcgaatattcaattatttcttgtcttggaagacttatgtagatgacatgttataattatctgctgaagttcttttttctatgaaaataaattagatctcatgtaaatgttattaaatgcccttatttcagatcttgcatttagctgttcctgtaatttatttattttctgggaatgcaggcattagctgatagtgttgggataccttgtaaact

SEQ ID NO: 100778 - DNA, 716 bp, Mimulus guttatus
  Intron number 1 from transcript mgv1a011848m (locus mgv1a0 11848m.g) derived from phytozome v7.0 (chr-ID scaffold_4; pos 40955 to 41670 reverse strand)
ctgatttcttcgctgcccatctctctcctgttcaggtttttttaaattttaatttttttattatttctttattaaattataattaatggagtttaaggaaattgcttatttctttcaaattcaatcattaaattacaaaattaaattgatttaaattaacaaaataagattaactgtaacttcagttcacctgcctccttaaaaatccagtctgtaatcctgctctgtttcttgaatcttccctaatggtgggtcccttttatcattttttgtcatctgtaataaaaatccctgtctccactaatgagtttacacaaaggcaccgttcggtcaccataatttacattaatcaaatactcgtcgggtagagatttcgcctttactggtgcaagagtttcaagcataatatttttttccatctttacccccaacattaataataaattaacaaattaatggatatagattaattgaagtgaaaaagaaaagatgaaagtcacaaaggggcaatttggactttttgccccggaaattaagatcatatattgtattctgaaagatataaatatataaagttgttttagtagtggccgaaaggtatcctattcctatgctctataactgtcttaatcacattttgatgatctaattctaatatattctttttgaaaaatcttattcgggccgggctacagtcgggttgctgcaagcctccg

SEQ ID NO: 100779 - DNA, 782 bp, Mimulus guttatus
  Intron number 1 from transcript mgv1a004831m (locus mgv1a0 04831m.g) derived from phytozome v7.0 (chr-ID scaffold_12; pos 1262608 to 1263389)
catcatccaccgtcaaaaccaccttcttcctcttggtatgtatataatatttttcattatattgataaattaactcatttagtttggtattaatattttagtttcttagaataattttttagcacttaaaatttctgtatatattcctatttgagcaagatttttttacttgttaggacgaagtgtgaaattggtagaagataaatctaggattcgagcccttcctagctaccttaaatacttcattcgtttcaaattaatatcgtcgtttaagttttcggaatcatgcattaaaataactaatgaacatatacaagtgtttcattttatacattatataactcattttatgaatgtgaaatgaaataacttataagtaataagtgcaaaaattgaaacaaaaataattaatgcaatattgttattcaaaagtgagacaatatgtaaccaaaagaataattcaaaagtcatgtatagttgatttgaaataaagttaattagcacttgtttatgactacgagtaataattaacttattcaaatccataaacgaggtgagctggaaacaactcatatttgaataagtttggcccaccacaaaacaagtccaaatgttccggagttagttaatccggtaccaaaagacgaaaaccttcgccccgtcccgaaagagttagttaatcttgttggagtttgtagtataatttccatagaagttcaattatctcttatcttgttttaaaaacaggtagaactctttcagtcacggtgctcgtgatcaag

SEQ ID NO: 100780 - DNA, 946 bp, Mimulus guttatus
  Intron number 2 from transcript mgv1a011431m (locus mgv1a0 11431m.g) derived from phytozome v7.0 (chr-ID scaffold_13; pos 2568381 to 2569326 reverse strand)
agttcttcccacctgtaccagactcttgaatcaaggttcattctttcccccccttctttttttgttacgaggaattggatctaggttttcgtcactatttaactacactttgggtgattgtttgcttttatatctactgtttggatctgtaaacattctgttacttcactaaatgctatatgccacttactgcaaactcttttctgctgtaattatacatgcatccatgtggcttgatatgcaaaagtggagctttatttcctagagcttatcttctctactgaaactccattacacagatgcatctgagcttctagataccattcagtgttcttggggctgttattcatcaacgggaacacagacctctttgagtttgttgcttccgacagtcctgattgcatataagatcaaatgacattggataattcccctttaagctgtccgtatccatctggttgatacttgatactgtttgtatgtgtcgttgtgacaaagacaatattttttatttacttgcaacactcctgcaaatgtaaagttactacataacatactcatttttctttaatctcatctaaggattccctttatttggtaaatgattctctccatcgtatatatagataaaagattcataacatacttaatcttttgaacttgcgtgatgatttggttagttatcgttttgaatagaaagagtgtatctttatgttagttatagcattaaactgttgtcagtttgctttgtttgagaatgtatgtggtctgattattggattttcgaattctattattcagaatattaatgtcagtgtaatatcttgattgtataaatatccctttgttcttgtttctttgaaaattgtatcttgttggtaaaatatataattcattctcacattttaattctgcaatctttccagagatcttacgggttactggt

SEQ ID NO: 100781 - DNA, 786 bp, Mimulus guttatus
  Intron number 1 from transcript mgv1a003573m (locus mgv1a0 03573m.g) derived from phytozome v7.0 (chr-ID scaffold_90; pos 604958 to 605743)
atcccattgccatccttaccagcttaataattattgtaaattaatttaactaatatttatatttttggaactcctaatagtaatgttcatacaagcatttaagaaaccatgtatcataatatataaactcaccaatacacttgacacttaacaaaacttcattaaaatcaagtaaaaaatgtcgaaggggataataaaggcgaaatccctcgcccccgtcccttgacccgttaagtatttgatggagaaatgtaaattcgaacttctttgcaaaaaacgtctaagtccttaaaatttacctaataatatatttatggataaattatctcctgcaatttgtagaatttttacattaaatcccgtttatagaggggtggatataagaaatttacaaactgcaagatgctcgatgtaatttctcaaaataatggttttttttttgttactacattttacttgggtaggtgtttctaatttattctatatttattagagtcagtgaggaataaaataaaataaaataaaaagtacctcgtaattttgccctaatgcagttagtcaacgccccaaactaggctcccttgtccgagtctcgactctccactacacaaaacaaatacacataataaaaaaagaaaaaaagaaaaaaagaaaagggagagattgaaataccaaaaatagcccttactactctttcaccctacttttaatgctccaccaaacaaacaaaacacattcccactacccaaagcaaagcaactccacatttcccccctcacacaacaa

SEQ ID NO: 100782 - DNA, 602 bp, Mimulus guttatus
  Intron number 3 from transcript mgv1a011299m (locus mgv1a0 11299m.g) derived from phytozome v7.0 (chr-ID scaffold_148 ; pos 607942 to 608543)
ctaaagaggtatagcttttgttggtgatttagtctatttcctcgtttatatctaaacaagtttcgggtgcccttttaatatgcatttggcatctgattttattgagcttgcgatatcactcagtctggaacattcttggtaaacagatgaaactatataccggtggctgctagaatagatttgaattgttgatagtgttcaaatgtgaaggcaatcattgcttctgtagtggcataatacattatttcttacccgacatgccgttgatatgtgttggttgatatgaccggtaggatgtaagcttagattgtgaatacgtgatattgctttatcattcattcactctcgtcgacccgagagaactgttatttttctgtcctacccttttcttttcctaaaggtttttgtccttggggatcaaggctatttgtttatttatccaagtccttatttctatgaaatgctatacttggtccgttcggttttgttaattagatcatttaccttttaaagtgtatgtgctatatttgtcctttgcagatctgttctaatttttaccattttggaaactgcaggtttcgacgttgcttagtggactgaat

SEQ ID NO: 100783 - DNA, 470 bp, Mimulus guttatus
  Intron number 1 from transcript mgv1a008470m (locus mgv1a0 08470m.g) derived from phytozome v7.0 (chr-ID scaffold_346 ; pos 34570 to 35039 reverse strand)
cggctaaccccaaagagttcgccaagaaaaagagggtacgccgattctgtaaatttgagatttttttttcttctcttcacctccattaaagctgcgcttatatttctggattgcctttaatctttctcttcacgtttcctgtaatttcaaatttgttttcgggaattgttttttttgttgaatttgattggggaaagtttttgattttatctaattgcttcaatacgtttccgtgtgtggttacaattattttatcaattatcttcatatttttcctcttctaatttattgtgtcccctaaaatttgcccctcttttaatgaccttgttgtcagtttctgatattagatatttatcgccagcttgaaaagtatgcaattttttccttttcgtcgtttctaatactagatattttttctatcaatttaaaatttaggcgaatcggtcggcgaagttgaagcagtgcaagct

SEQ ID NO: 100784 - DNA, 794 bp, Mimulus guttatus
  Intron number 2 from transcript mgv1a013718m (locus mgv1a0 13718m.g) derived from phytozome v7.0 (chr-ID scaffold_92; pos 344135 to 344928 reverse strand)
ccactagaggtttttccttttaacgtattttacatttatgtactactagttcttatttggctttcttttgattttccccaaattgaatttactgtacatttctttagattaggtttatgtggggataattctgcttccttacggcttaatttgaaaatactatcagttcatggagatggatgtgttataatactaatgcctgcaagatgatggagatcatgaattttatctatggtaattcagtgcccttaggtatagaagcaggcagaactaattttacagtgtgttattgggcatgttagtctctcacagaaaaattaaagttcgataatcgggaaaagatgagatttttttttgtcctcaccatttcatataagagatgcatgactaaaggcccaatcattatcttcttgcttttctctttacctacgtttgaatgctatgcatgtgtgtacctacatgcttgtgtcgtatttgtgttcctttaggtttaatatacgtctaatatcttaggatcttaattctcgtttcatttcagtgcaaaattagtttctttaatataaattgttgtaggagcggctaatgaagcaccgagtttttaaaatatgctaccctggaactttggtttcatgcaaatagtgaacaagtagtatttatatatcacatgaagcaaaagttcaactccatttttgacatgcttgcttgacccggaactgatactaactcgtgtacattatttggtctgtgattttggttcaggtatagaaagggaaattaatacattacagttagag

SEQ ID NO: 100785 - DNA, 576 bp, Mimulus guttatus
  Intron number 2 from transcript mgv1a009705m (locus mgv1a0 09705m.g) derived from phytozome v7.0 (chr-ID scaffold_523 ; pos 35173 to 35748 reverse strand)
cttcaggttctattactcagcctaactccatctttattacttttttgtcttgcattaaattgaataaacactggatgatgtttccgatattgagcaataattgacggcatggagacattttcaatatgccttgacacagaggcaaatgaggtctaaatgttacagtttggagaattaaccaattttgttttttgtcgaacggataatgtaacatcaatttatcttccgtcggatgtcaatatagtttacttgaaatagacttaaggggtggttgggaggctaagtcatgtgaaacgaagtttaattttgaggtcaaaaagcgggaattgagttaaattgtgaagaatacagactggacagattttaatgtaaatgtgcatgtgaaacttgctaaaaagcaaccagatactgtgatgcatcctagttgtgccggtcatcattatttaattgcggattaccgttacccatcccctctcattacacaaggcaattttgggtagttgtaattttttttccttcctttctgcttgttttgtttcagttgccacaacaagaaaactggttcgactgtggcct

SEQ ID NO: 100786 - DNA, 547 bp, Mimulus guttatus
  Intron number 1 from transcript mgv1a009705m (locus mgv1a0 09705m.g) derived from phytozome v7.0 (chr-ID scaffold_523 ; pos 35819 to 36365 reverse strand)
ccagccgttgccgtcgccgacagccctccttcaaggtaattttgcttttttttaaatctttgtttgtttatgtctaaaagcttgtatgtgtttgattattgcgaattatttttgggttttttctcggaattatgtgtttgtttgttttatgttgatttgatgagcctgtgttgctcggaattattgaatacattcacaatgtgcatgttttcaattattagttaactggaacgtgttgtgagtgctattactgaatctgtagtttctgtaaacgagagcatctatggaaataaattcatcacgtcttctctcctatgattaatttaaggattttcttcaagttaatcttgaattatcggtttacccaaaattcgctcttatatgattatttttctccaagtactactttctataaactttcacctctctttgcttgtggattcctggttaggtttatctagcatcagcaaaagagattgacacattaaacaacaaccccactctcaacttcttttcttatgttaaaatatagttatttatcagaaga

SEQ ID NO: 100787 - DNA, 891 bp, Mimulus guttatus
  Intron number 1 from transcript mgv1a018455m (locus mgv1a0 18455m.g) derived from phytozome v7.0 (chr-ID scaffold_26; pos 1126321 to 1127211 reverse strand)
acggtcctcgtaccaacgaaattctactcggcaaggtgcttctctctctctctctctctctctctctctctctctctctctctctctctctctctctctctctctctctctctctctctctctctctctctctctctctctcttctctctctctctctctctctctctctctctctctctctctctctctctctcaatactttactagatatttggtaaagggtctgaatttgattccaaacaaactagggttcaaatatgatcgattttgagttgcagttatggttgagttgtaaatatggtttttttttttttgcaaaactacccatgtgtaatcctctaattgttaaaaagaccctttgttaaaaaaattaacaagaacagccctgtgaaaaatagaaggccaaaaaagaaacctaacagcttatcttgtaatgcacgcgcgaattgtgaggtagaagtgtatttttttttttttttttgaaataccctatgaaattctttttgggtttttttttgtttttttaatgtttatgttgtaagggtaatttggtcatttcacacaagtaaacaataaattcgaaataaggaccggtgtgctttaacttaaaaaaaaaaagcacaatatgaggggcttcttgctaaaaattttaaggtaggggttttttcgacaattagaaacaacacaaggaggtgtgtgctattggcgtttctaattatgtttaaaatcaggagatttttcatgcacaagatatatatttatctcatttaagtttttgattttagtttccataatgatcgaaatttcgattggttgtccctcttcttgatctgcacttgggattctcatccttatattcggtggtgatgatgcaggctttgaaaggtgga

SEQ ID NO: 100788 - DNA, 677 bp, Mimulus guttatus
  Intron number 2 from transcript mgv1a019326m (locus mgv1a0 19326m.g) derived from phytozome v7.0 (chr-ID scaffold_132 ; pos 374717 to 375393 reverse strand)
cttattatcaggcttcataagctcttgggaaacaggttatttattctaaattatatatatatatatatatatatatatatatatatatatatatatatatatatatatatataataatgtattatattttatataatatatatttatatatatgcctttttttttatgttttactaattcttgataataattatagtagttatttatatgtgtggacatatgagattttagagagaaaatgtaagtttatgaaatattaaagtacaatgaaatttaattaatggggttttgaggatatataaatgcatttattaaatattaattggaattcaaataatatatagtaatatatagcttgttgttttcttgaaatattaattggctaatttaatttcttctaaacaattactaacaattctgagattttaatcaagctgtacatttttatttttgctatatttaaaatgcaagcatgatttaattattaatataaaaatcttagtaataaatttactcaaaaaaaaaaaaaaaaaacttgttaataaatagatccaaagagatttatattaatcataaacactgccatatttttttgaaaatctatatatatatatatatatatatatatatatatatatatatatatatatatatatatgaattaattttggacgcag

SEQ ID NO: 100789 - DNA, 635 bp, Mimulus guttatus
  Intron number 4 from transcript mgv1a011769m (locus mgv1a0 11769m.g) derived from phytozome v7.0 (chr-ID scaffold_16; pos 895463 to 896097 reverse strand)
ccgcctccgatctctccgctgagctctccgttccggtgagcaccgacacttttctcatattaaagaacccttttttattgtctctcccattatgttaattgcttcccacacatgttttccatgtttttttttgtgacattagtttcggttgttttggcaaattgtcgttgttttttggtgagctataaagagtaatgttagctacaaaatcaaactcaaatcctcctttgatcggtctaatttaatttgtttcggaaaaaggcgaaaaaaccgagggaagtttaatcaatgccgtggtggaattgccaatttttttgttgtgttttcgtttaattttttggtttgattttgatgttttgccaaatttgttatggtttggtcacatatcatgatactcttaaaattaaaatgacatttatgacatccctcttgcaaacggaaattataaatatcgtttcgattttacttgtaccgttccgaattcacaagtgattttgaccatttttcagtcttaaaattggcaaaattggcaaaagtcaaaacacaatgtaaattcatatgcttcacttgcaattcctcttctcatacattttctttaattctctcttgcagtacgaggatattgtgcaactcga

SEQ ID NO: 100790 - DNA, 848 bp, Mimulus guttatus
  Intron number 1 from transcript mgv1a011528m (locus mgv1a0 11528m.g) derived from phytozome v7.0 (chr-ID scaffold_300 ; pos 17444 to 18291)
aggacgaagattcttcatcgtctgagaagaacgaggttgaaagatttaatttttaattttactgggttcaaagattttactcttatcatattaaacatttgaattttatcattttttttctgttcctaagtttgattaattgtctgttggtttaattttgcatatttatatatatggtaaattacgaaaaaccccctcatgtttgggtaattaaaaccaccctcgactatggatcttcttacgcgtccacccttatggtgtcgaattcaacagaatgtagaagattatgtggcatgttgtctagtttgtactcgttttgtgcaaaaatgttgtttctattgcaccacaatatgatatttatgagttaagagatacattttatgatcattttgtttcgaaatgtggagttcgaatgggataaaacgggtacaaactggagaatattccacataatctagaagattctactaaatttgataccgaaagagtggacgtgtaagaaaattcatagtagaggggttttttcgtaatttgaccttacctcggggtgaccgtaatttaacctatttatgtatagaacagtatcactttagtagtttgtaggcttaattgtgggggggaaaagataagctatgaatatcactaatctatgcaatattgcattatttaaacgtgttcttatttatatatttgtccgaacatctcaagaaaaatcgagtagcagcaattggtttcggcatttatttcgaattacatatttatctatttttaatatatctcaagtatgatctaaaaagagaaatattggtccaggtgaagagaaacacttctacttctaagaaacgagg

SEQ ID NO: 100791 - DNA, 1024 bp, Mimulus guttatus
  Intron number 1 from transcript mgv1a015681m (locus mgv1a0 15681m.g) derived from phytozome v7.0 (chr-ID scaffold_1; pos 1528741 to 1529764)
gcgacggttggcccccctaatttccacacgcttacaaatttacttttttttttttggtgtagatctgctgctcatgttgtaaatttctgtttatttctcagctgctcttagtttccttacgttaattgcgcgtgatctgtactgtaacgaggtgtggatggctcaaccgattgccacgctctgtaatggaaattatgtgtgtgttttacgcgcggtgttgttgatgcgtgattgcgtatgatttggtttctgaagaaaaaaaaatggttttatattatcccgtgaatgaatttgaagttttttttttttttttttttattaattaagagtctcttggtgttaaccttttaatttgtgttgattttttttttttttttttttttccgatttttacgaccctcgcttgttaatatagctattcgggggtacaatggattacgattgttgaatttaagatgccacgagaatcggagattcgacgatgtttgttgtggttgatacatagcatttatgttactggaagattatttgatgtttgttggtgaaatatttagttgtgttttactactattggcatttaagtgaggcaaggtgttgcatttgatatttatgttgaattataatgagacaggtatctatagcattaggtgttacctaactttacgattttgaatttcaagtctgaagttcgttgaaagtgacagcctaagtagttcaaaacatgaatgtaatatgtttacatagagtccgttgatacttggcgtttacagttctattagtttctcaatgtgtcatttgcctttgatgcatgtcccattaatttcacgggatatattcatcagaatatgattttttttttttatcttctagcattttccgaattgttgtttctgttagcaaaaattttacatgtcttgatcatttttgctacggactcgaaacttattaaacttcatggttttgttataactgaattttgaattttccaacaggctgcatcactaccaaggagctgggaactgtg

SEQ ID NO: 100792 - DNA, 260 bp, Mimulus guttatus
  Intron number 1 from transcript mgv1a008112m (locus mgv1a0 06267m.g) derived from phytozome v7.0 (chr-ID scaffold_1; pos 4044978 to 4045237)
ttccatgtaactacataaaccctaattgcatttgaaaatgagtttctatatattttatttaacatttatttgggttatgcatttcagacacgaagattgactgggatgcttacatgtcacaggtgatcacaacaccatttctcttttctttcttcatttgatttcgaaaggacgaatacaaataattagtttatgcttctttctcatcaaaatttgatttagcaggttagtggttttctgggaggagagagagattacag

SEQ ID NO: 100793 - DNA, 972 bp, Mimulus guttatus
  Intron number 1 from transcript mgv1a001329m (locus mgv1a0 01329m.g) derived from phytozome v7.0 (chr-ID scaffold_102 ; pos 233659 to 234630 reverse strand)
gaaggtacgcgtatcagtatcgggagttttattcgagaaaatttgtagaattgtttgatgttttccgagcagtcaactctcgaattgtgaattcttagggtttagtacgcttttatcattaacctgagtctctgacagtttcgattttaattccaggttataatgtgtgttttaactttctggtttagtagcgaagtagtagaaaatgaagatgttatctgttgttagaaattgaatttccttacaacttcaaatactcctacatttggaaatcaggggaatggagttctaatagtcaatgctaggtagttcctactgagagttgatttaattttactttgtacttggtatacaagcagttgaaattggttagtggcaatattaagctgttaagaacaagtttttggtcggcggtcaaaggacaagaaaactaataagtaatatattaatttggaactgaaatcaatgggcgttcaccgcgtggagaatggagataaaaaggttgaaaagataacaagagaacaacaaacattccatgtaatttttagcactttaatatacattatgtgcagaataccccataccataatgcaacattgcagaggaatgaacaaccccatctgatatagtatccataaatgttattgcaatatggttcaagtcatacgacccacagatgatatacgtggatctgaatgtacttgattttttttcacgagaacatttctattgaatcgttgtatatcaatttagaatcctgattgaaaagttacattttggtctacacttttaagaggtatatgtccccatagtctattttcttttgcttatgtaagtggctgtagtatcactgtgcttattaatacaataaccacatagtaaacagcgtgtgtccacaattgtattcatttttagtactttttgtgaactgttggatctttttttacctgtacagatttggattttgtcaat

SEQ ID NO: 100794 - DNA, 574 bp, Mimulus guttatus
  Intron number 1 from transcript mgv1a014148m (locus mgv1a0 14148m.g) derived from phytozome v7.0 (chr-ID scaffold_4; pos 576247 to 576820 reverse strand)
ggctccgtttttggctacggtaatcatatgctttttttgattccctcctgataattaattagttattgcttccttcatttggtattttgtttggtttgaaataatgcaatttcactgtgtaattaggcgcctaattgtaggtttcagtaattctggaggctaattttttatcttgtttgaatttgtcggtgatttcttaatgttgtgttaaatattagttttttttttctttctcagaatgcatttatatttagttggtgcttgtttggatttgttcaactagagttaattataacaacatctgtttaaagaagcagctgggattgtggtcaaatcaatcatccgctttcaagtaaaatagaaaattaccgaactccgtcggttgattttcttgtattggattgtattgccgactcgtgtaatgatcgtcatgcttagagttacgtgaacttatgactcgtgtaatgattctcgtgtcgtagtttcggaataagatttatcgaagcttaccgttgggattcttcgtctttgtgtattaggttctggattaatccagaggaagggctttaaagga

SEQ ID NO: 100795 - DNA, 366 bp, Mimulus guttatus
  Intron number 1 from transcript mgv1a018190m (locus mgv1a0 18190m.g) derived from phytozome v7.0 (chr-ID scaffold_100 ; pos 537836 to 538201)
tccgttgtcacacctccgccgacgctaatcaattggtatggtcttactattttttttttctttcctatatttttttcaaatattttatttgtggttattattattttttgtttccaaaattaatatattgtggcttacagttgcaaaaccaactattttaatttatggttctctactgttcttcaatttttatttttttggttttttttgtcttgtttttttttaatgtgttttactggtatttgattattttcttattgtacaaaatacaaactattctgattgttttttggatgtagatactggacacaaacccccaactatttttccatctctaacagcaaaggctgatagaattgatccgca

SEQ ID NO: 100796 - DNA, 868 bp, Mimulus guttatus
  Intron number 3 from transcript mgv1a018190m (locus mgv1a0 18190m.g) derived from phytozome v7.0 (chr-ID scaffold_100 ; pos 538488 to 539355)
tgctgctattctcaccagtcaaagccacgagaaaggtttgtcaatagtcccttctctattaataaaatcctggaattatttaattcaatttacgggggatgtttctagatttaaaaacgctaaaaatacttgtgttaatgcattcttaataccccgagctcgttaaactagctaacgaattagaaaccagactctaataatagatgagataaagggtgggttgtctcatttgtggtgggatgcactgattatcaacacttaagcttttagtttcaaagcattcttggtatcgtaggatcaatgtatatcggttaataattcaaagctacctctgctgaggtttggtttaatcacaacgagacccattcatgcttggaaaatgacacaaacctcctctaatgtttggttgtaccttgggttgtcgggtataatatgtttcaaagggttcttctgtcacgttgttacgtttttcaccaattgaatgtttgaattccatattttgtgaccttcatctggttcgttgcttttaccacttgaaatagatgattctgttatgaaatttgattatgcatgatatatttacaatcatttcggtgatatattaaaaaatcacggaaaattagaacaaacagctggaggactcgtatgctggttgaacccgattatcttttttcttccgtcgtgttgagatctcatacgacacttgatttcaacgatacataatcttattttcaacttgtgtaattgaaaatatttttatatatgttcttagttgtatgatagttatttatatttcactcaccatgttcttgtttttgctacaatatgtgtaggggattttcgattagcttcaggaaagataacgagt

SEQ ID NO: 100797 - DNA, 806 bp, Mimulus guttatus
  Intron number 1 from transcript mgv1a000827m (locus mgv1a0 00827m.g) derived from phytozome v7.0 (chr-ID scaffold_75; pos 1037316 to 1038121)
ctgtaaggattattacatccgacagatatcaagaggtgagtaattattctctgtttgttgttcttcttcttaactttatttgttaatttatactgttgttactttgattatgtaatttggtttctggaatgtggctcaatttgtgtgtttaattgtgaaaaatgaacctcaatgatgattagggaagcactcattttcatctaaatgagtgtaatatgctttgggaactgtgattttcgaggttttgttatgtcggaatgtttggaaagaggtagttcagaaaaaggcttttaagtttcgataaatattactaggcaattcagttgttcctaccgataaaatttggattacgaaaagtcgatcgaattggagtttggtacacaaatgtgctagcgtggacattgtcgtgtcttttagaagttgtaagattcggattcgacattgcttattcgtgaaagatataaccggtcattagtcacgaagagaaattcacaatttaccgacttactcgttgcagtattcctggtttcttgcagcgcctgtatacatgctcgatatttttgcccctacttgtttgctttttactgcccattcatttacggggaaggagttagttcacttttatacgagcgacatcgcacttttagatcacgtttaaatcatgctccagtttctttgatggaacaatttgtaaagaattttactcgtcccacaacgttatcttatcttttagttgttatatactcaatgactacaacagctttcgtttcgtcttttcagaattttgtacaagttgcgacaacact

SEQ ID NO: 100798 - DNA, 527 bp, Mimulus guttatus
  Intron number 1 from transcript mgv1a014004m (locus mgv1a0 14004m.g) derived from phytozome v7.0 (chr-ID scaffold_87; pos 735326 to 735852 reverse strand)
cgctaccaggttaatttctcctccaatcataatttccatcctctttggtttttgaatcatttgatgtgtattttttatttgaaagcacaaaaatttcgccattgtttcgatgcttgtacccttggtctaaattcttagctctggtgttggtttgttgatgcttctgataaaaaaagttactgttagagattgatttttgatttagttaatgtggaaggtggtttcgatggtttcggtttcggtttcctttccgaggtttcgagaatgccacattatgttttatgtggcacaacaaaacttgagaacaatgtaatcagttaaaacttctacctttgttcggttcttcatcaagaaaatcgaatagtgtagtaattttccgaaagatttcactgtaaaaaatatgtccgcgttaaaagaaaaacacgttttgattgtcttacgacttgcaataatctgtggtctccacttgatttaaatgaacaactaggttataatctaaacattttgtcggttgatatggatatagg

SEQ ID NO: 100799 - DNA, 1043 bp, Mimulus guttatus
  Intron number 1 from transcript mgv1a002284m (locus mgv1a0 02284m.g) derived from phytozome v7.0 (chr-ID scaffold_65; pos 580283 to 581325 reverse strand)
cctctccccggctttcgtggaattctcaagcagaggtttctccctttctacttttgctgcttcttttaccattgtcttatcacatttcatcctcgcgtttttttttttttttttttttccaattaagaattcgagatgcaaacaaatttcctttatatctttctcttcgactttgtaagtgtttgcctgatctaattgtttgtggctgtaaaattttaagtagaaaatttcgtatacggagtggaatttggttgcttttcagggttagagtgtttttgcagaatgagatttttggaatgttgtcccttcatttgatacgtttacagaggaaatactatagcacaaccgtggttatcctttttcgagtttttgttttttctcatagataattcgccctacctgtttagggataaccgataccttcgatatttgggtcaaatgtaattgcagtgccgttccggctacccatgtttggatcaattacactcgcagttttgattgaccagctaatcttacgaaattgaagtgagcaattacagtgcacaacttcatttagaatacattgatgtgacgggaaggaattgatggacattgaatgttatatgaagctcaaaacctccactaaacatatgagaccttctctgaagtttatataaccgggtagtagcctgagcttagttaagatgaagttatgaataattttactatagatagccgtatatgttacattagttcgaatgaaatatatgctgacaaacttgagcttgaagaagtttatcacatggcaacactggtggtgcctataaagtgcggtccttttcctctgataggaggagaataagtcgtcgagttaagttatttggccagaatttaggcagttgctcaaggtagtgtaacaagtattgctaataccaaggtttcatatgtacgttatccataattgatatatttattaatgagtatttgagctacgacttctggagaaaatgagtacaagcctttatcttattggttccttttcaggtattcggattttattgtaa

SEQ ID NO: 100800 - DNA, 474 bp, Mimulus guttatus
  Intron number 1 from transcript mgv1a023442m (locus mgv1a0 23442m.g) derived from phytozome v7.0 (chr-ID scaffold_5; pos 1802400 to 1802873 reverse strand)
gcataaccatttacgccccgatatcaaggtttctcgtttgttttttttttttttttttttttttcttaatcttatatgaacaaggaatcaccttgtttttaattttagttttatgtaggtatacaccatttttttgctatttaatgcttcttttctagggtttgctaatttcaatttacattttttttttcttcagataaagcattaattcttgattttgtttttactgataataaagcatcatattttgttactaaggcactgacttttatgttttcatggaagaaatcagctggagttgtttgcatgcccttttcaccccccacccccacccccaccccctaattaatttcactactttttgggcaaaatccataagatagattatattatatacaattatgaatatgtatatatgtaatttttgtttgattaatgtttcagaaaagtcttgtttggaccgacgaagaagaa

SEQ ID NO: 100801 - DNA, 858 bp, Mimulus guttatus
  Intron number 1 from transcript mgv1a003288m (locus mgv1a0 03288m.g) derived from phytozome v7.0 (chr-ID scaffold_177 ; pos 100028 to 100885 reverse strand)
ccgagcgcctcgttcaggtcccggttcgcgatcaggttgttttgctagggaagatcttccttttccccctttctgttttgtgcacattttgtcttattgattttattcctaattgatttgattgtttgacgacttaacgagcgctgaaattaacaatctcgtatgaatttttgcgctgaaattaacagtcataataccattttgagctaataagaattgaaacatcaatccagaacaattattgttctaagggtctatatgtatttcacatactaactagacaaagaacattttggcgtattgaagtcctccacctcttgggaggtgggagttcggtgggtggtattcacctcctatggtctagatacaattatgcctctcttttgtactgcataaaatgcgattcttcttttcaccatcagactgatgctaccctgagttagctacattaattaggaaaagaagcaagtattaggttgttagattttagcttattacctggccttgactaatagagttggttcaaattctcctcctgagaaaaaagaaagagaagtccctcctctcctaatttccggtttgttaatatttgaataaaaaaaataaaaaaatcaaaggtggttcctaatgagaattttatgctgtagagctttcatggacagaatacattggtaaaacttaaataatgtattaatttaaataagaaactgtcaaggcatattatgcagcgacgtaaccatatagtatttaactttcttataccagtaataaaatggggacagaaacaattcattttttcttaatgtttcttcggtccatccattatgcaggcttatcattattctggaaacacagcga

SEQ ID NO: 100802 - DNA, 973 bp, Mimulus guttatus
  Intron number 1 from transcript mgv1a016016m (locus mgv1a0 16016m.g) derived from phytozome v7.0 (chr-ID scaffold_126 ; pos 104016 to 104988 reverse strand)
agctttttgggctcctctccaatctcctccaacaggtccgccactctaatatgtttaccactgtgttgtgtttacatatacatggttctctattcatatattcatatattttttcgcttttaatttccaaaattgactgatgattatggatcataggttcgataataacatatggaattttctctgtaattgattgtacgcttgattcgattttgagattttcgatctgtttaaatcggaatagtttgtgcaatgtaatttgggatgatgagctggtgaaatttgaatattacgattacacttttttgttgtgtgtgtgtgtgtgtgtgtgtgtgtgtgtgtgtgtgtgtgtgtgtgtgtgtgtgtgtgtgtgtgtgttttagaatttttgaattttgaattttggtggtaatgtagatagtattgcaatttacttcggcctcgtttgcttacctacctatatcggattagattggattagattagattggattaataattggattgattcctttcaggttaattaattggattcgtcgaggaattttgtgatgattctttcaatttttcttggatttcttagcataaggatttgatccgttacatttgagtcttgaagttgagataacgcttgtaatttttgaagcatcgagtaaataataatagttttatcttctgaaaatcggagaaaaacaatgaaaaagttagtttgaatcagcagttgaataccaactgatgtttaaagccgtacagaactggtgaaaacggtaaacaacgcgttttgatgaccatatttaagtcatgtttgggtgatttgtgagcagggttgtcgatataacattgtcatcattcgtttctaatcagcagcagaatttagagctttaagatcactccgaaaaaagtcgttccccatcttttatatgtatattattttacaggtggaatcactaaccaatcaagaagaagtggagtt

SEQ ID NO: 100803 - DNA, 366 bp, Mimulus guttatus
  Intron number 1 from transcript mgv1a023927m (locus mgv1a0 23927m.g) derived from phytozome v7.0 (chr-ID scaffold_17; pos 439006 to 439371)
tcaagatttttgcgttgcagatttcactagcacaggtaatttaataagtactatcagtagcgggttcagaaatttgtgttcatgaccgttttttcttctttgaattaataaggacataatcataaaatagaaaaaaaaataataataaataaaaattaatagaactttttgtgcattaaattagttttgggtaaactaaaataattaaaattgagtgagctaaataaaaatatatgtatatataatttgatttggaaaaaattgtaattgaggggaaacatgtgtaagtcctaagtttctatatatattttttattaattttgtattattttttaataattacattttttgggctagtgagaatca

SEQ ID NO: 100804 - DNA, 668 bp, Mimulus guttatus
  Intron number 2 from transcript mgv1a014378m (locus mgv1a0 14378m.g) derived from phytozome v7.0 (chr-ID scaffold_287 ; pos 225865 to 226532 reverse strand)
gtttccacaacttgaaggtactaatttattctctgtatacatttttttttatatagaaaaaatggttttttattttcgtatctgtgatgctcgtagggtggtagattatattaagcgtaaattacggtcaggtcaaattacgaaaacccccctcatgtttgggtaattacaacaacccatcaactatgaatcttcttacacgtccacgcttgcagtgtcaaatttggtggaatctcttagattatgtgaaatattctccagtttgtactcgtttttttacctcattcgagctttacattttgaatcaagatgatcgtaagatgtgtcttttggcttgtaaatatcatactgtggtgcattagaaactgtatattggcataaaacgagtacaaactagacaattctgttgaatttgacgccataatggtgtacgtgtaagaagattcatagttgatgggtggttgtaattaatcaaacataaggtgtttattcgtaatttgaccttacctcataaggtagccgtaatttacccttatattaatcatgtttcggtattaatggtggtagctataaacctatcaaagattatacgagtaaatcttgatttggcttctgattgcaccgacttttcaggagataaaggcagtggagctcgttaaaccaactgg

SEQ ID NO: 100805 - DNA, 455 bp, Mimulus guttatus
  Intron number 1 from transcript mgv1a025239m (locus mgv1a0 25239m.g) derived from phytozome v7.0 (chr-ID scaffold_228 ; pos 122135 to 122589 reverse strand)
cggcattgtttcacccgctacattgagtttcaccggtttgattaaattatttacagaaataaccttgcataaaattgtttgaataatttcggatgattattgattttatttttttgctatttatttagagaaataaccttgcatatctgatgagagagaattcaatttgtgtgcttgtttttgtttcggtccttatattttgctcaatcacgaatgttttttattatataattttttagctcggtttagtactttagttggaatgtaatgccaccattttgattgttcgaagaaagcatatactaatcgagatgtgcattcgctagacagagtcgatagaatatcacgaaaccgtacgacattgatatacattttctatttacctcgagcagtgaaataatttaaattttacggtgttaggtgcgtgactgctaagggtgaagattctggcgatt

SEQ ID NO: 100806 - DNA, 913 bp, Mimulus guttatus
  Intron number 1 from transcript mgv1a004529m (locus mgv1a0 04529m.g) derived from phytozome v7.0 (chr-ID scaffold_44; pos 16009 to 16921)
tacggttggcttgcttttcgacctggcaaatcaaggtgaagttttttggtgtgtttatgctcattaaatgcattaattggagttatttttatttattttctgggttttacaaatagttaatttcgggtttatcatgtgattgagaagtttatatgcgtggagggtgtttgctgctactaagtttctgctgaatccaacacgattcaggcgtgcatattcgattgattgcacgatatctgtgattttttttttcgagtttttgttttgtgcggcaaatttaggagcttaagtaaggttttgctttcttaggtcttcatcatttgattcttcagtctagctgatgaactggcatgcaagttgcatatgtattagatgaattttgtggtttggattgtctggttgcaagatacctttctgttttggattctctgacttttgtcttatgttattttctcattggttttgtttcaatttctcattttttataggtttcttattgtcttttttgtttggttttgtctccaattctcatttatgtttggtatggttttctgcgtcaatggaagaagttttatcgtaatctggatgtgtgatcatggtagtattcaattatttgctgaaaatttttatgcttcggatgatgattaatctgtcgaaaaagacggtattaaaatggcactagaatcgtggaaaagtagtaagatgcagctatttgtttagatttttttggtggggactgtgtctttttgccatgatcaataaggccccccttaaagtgttgttgccatgaataagtgccgtatcagatattctagctctatcattaaggtatttcctatttctattttctctctgaagtcttacatttgattttgcagcccaaggcaacctatatattctagagcttacattg

SEQ ID NO: 100807 - DNA, 655 bp, Mimulus guttatus
  Intron number 2 from transcript mgv1a003475m (locus mgv1a0 03475m.g) derived from phytozome v7.0 (chr-ID scaffold_1; pos 1373357 to 1374011 reverse strand)
acgagcagtttttgcaagaagggaagctgttggaggtatgatcatactgttactgtttgtccccccgttcactgtccgtttccttttttgcaccttaggctttatactgaaagcaacttcctttttctatatgatatcattttaaatttgcacatctatagagtgtttaggatgatgcttgcctgaaatgttgttcttcttctttatgtgttggcaccttcagcgactttgataaagagttctaaggatttagctactagattttctcattctgttgactcgagttgaggcccaatatctttggagtgtttctctgtggttaagctgataacacaatgtaattacgatttcttcgtcaaataaagtgattttttcccactacatctggttttaatctatgcttggatggattgatttcggaatatgagttctttgatttgttctgatatctctagaaaaagttgtcgttctaattctacatatctgcaaactacttttttttcctactgactcatattttcttgtactactgagctggttagtgctatgtagattgtatttccgtgagtgtgtattgttattgtgcaatttgatgcattttcactcatgtattcatggtttacatgtcattagggagaagatttagattttgctt

SEQ ID NO: 100808 - DNA, 648 bp, Mimulus guttatus
  Intron number 1 from transcript mgv1a003475m (locus mgv1a0 03475m.g) derived from phytozome v7.0 (chr-ID scaffold_1; pos 1373979 to 1374626 reverse strand)
tcctctcccactctgaactttcccagtaactactctcctctcaccttccatttcacttttcttcacttttgaactcaattagcaaaatcattgcagataaatttaattttttttttctcgttaaatccttgaaattttgggagaaaaatggtattaaattgtcctttttgaagttatgttctctttgtgtttagttgcctgctcttttgggcatacattcatttgattataagatattgagtgaagcagttgtttaagtgctttctgaattctcatgggtagaaatttcatgcccatcatgtttgatttcattttctagtgtttttttccaggaaactctggacttgaatagttacatataatttctgattatggattatattgtagccaccaattgtcaggaccaaagtattgagaaaataaaacctcgtgatgtataaacgatcgtctttttttttttttttttgtgttgtttgaaatagttagtgttattgccatattcctttttcatgctgtgtacattctttatggttcgattaaatttgtgtgttaagattttgcttgatatgattgacatttcttttcgataatcattttcctttcttgtttctaggtacgagcagtttttgcaagaagggaagctgttgg

SEQ ID NO: 100809 - DNA, 687 bp, Mimulus guttatus
  Intron number 1 from transcript mgv1a008213m (locus mgv1a0 08201m.g) derived from phytozome v7.0 (chr-ID scaffold_25; pos 992381 to 993067 reverse strand)
tcgccgttgccattcttgctcggccttcatccaaggtgctattttttttccctttttcatttaaattagattttatatgctgctaattcgtggaatatagtgaatttgctgaaacccatccatggttattatttttttaatttctttgtaacttgctgcttgggcttaggttttccccaattagttttcgtaattgatattcatgatttctaagaattgcaattatttattgttattaaattgcttgcaataatttgttgttatgtgttgcaatttttttgatttcactgtagatatagtatgatttcggaattatgaaaatgccagcaaaatagagccatgatatatctgttttctgcttcacagtctgttttttttttttttttttttttttttttttgcataaatcgaactttttgttgcacgacgctttctcaggccgtaatttccccttccgaacttagttcttagacgctgcacaaaattataacacttcacattattcattactatttatgttatacggattagcgcttcattctacactttctccccatcccactcttttcgttacaatcccgattgttttttttcaattaaaaaagtgaagttcagacagttcagtgaattttgcagtaattttctcttccagcaacccaagaagaacatctgcttttctacaaatta

SEQ ID NO: 100810 - DNA, 727 bp, Mimulus guttatus
  Intron number 3 from transcript mgv1a020631m (locus mgv1a0 20631m.g) derived from phytozome v7.0 (chr-ID scaffold_26; pos 1581088 to 1581814 reverse strand)
tggcgaagacgtaattatcggagttcttgacacaggtttatgttcgttcgatatattttacgcacaaattaaattacaatattaaattaaaaactcttaatctaagtacagttctcatgcagtaatatctagcaagtcgaaaaaacgaaacatctcgataaacacacacacatagaaggcctatgcatttatctacatttgccattagtctaaataaattagtaattcagtgtacaatagtacctcgataaattaataacctcgcctaaataatattttcttccagcaccccaattcggtaaaaccgtattaaattatcagttccataatttaatatttcgataaattaatagaatttcattagtcccagttgtactaatttaaagaggtttaaccgtacgtacatgcaaaaatagaatattccatcatgcaagtacaatcctactataaattaatcacctcgagtaaataatagtttctctcgatcccaactcggtgaaaacgtgttaaattattaactcgataatttaataaatcgttaaattaatagaatttccctagtcatgattgtattattttatagaggtttaactgtattttgaatttcatttttttcacaaatttgtgtgtgtatatatatatatatatatatatatatgaaagaaaaaacaaattaaattgggaatgaatagggatttggccggaatctgctagtttcagagaagaa

SEQ ID NO: 100811 - DNA, 875 bp, Mimulus guttatus
  Intron number 1 from transcript mgv1a021403m (locus mgv1a0 21403m.g) derived from phytozome v7.0 (chr-ID scaffold_292 ; pos 176988 to 177862 reverse strand)
acaaagtgctcgacgaattgcccgaggcaatcaaggtttatgttctacagcattttgctacttagtagtttgttggaagtttaatggttgtatactgtgcccggtgcccggtttgcttgtagctatcttgttttgtgaatactttgttcgaatttgattaatttattcatattatagattgtggcttatagtatttagatgtgctattaggttgatatgttgcattgctatgcttttgggaagcttataaaaaatgactacttaaaatggatttgaattgttgtatgcgactgtatggtactaatagtttatttgtttgggttgaaggaaatggtcaattcatatgttttttttcatatcaattgctgaatactgctaatataaacagattgcgccgccattgcggtagtcatattattaaccaaaaccttccgattgattggtaaagataagttatgtgtaggaattggagttctgacttcataggctcaaagaaggtagttcaatatgatcgaaaggaaaaatactaaagttgtagttatgtattacatggtaatagaatttttttggtttacatccatcttatgaactatttactgaacttgttgtacttataaatccatccgtgctgccgtagtatgtttagttttattttgggttttagaaaatgtattggataatctgtgtatctggtgggacatgtattgaagaacatgaaatgtttgcgttcgttttggcggagtgaagaatgtcttcttagaacaagggctgcacttcattgataaagatctgcctagattctggtatcttcttgcagttaatatatgctgtcttatattttaattttgtttttcaggtagcttttcaagaacacg

SEQ ID NO: 100812 - DNA, 592 bp, Mimulus guttatus
  Intron number 1 from transcript mgv1a018446m (locus mgv1a0 18446m.g) derived from phytozome v7.0 (chr-ID scaffold_13; pos 1983604 to 1984195 reverse strand)
cagccgatccgacggaaccattgacaaccttagtaatttttttttttaataatttcgtaagaaatttctgaaactgcagaagattcaaagcatatgaatctacgacgttgttcgattaatttcgaaagcattttccgtttttgtaatttgtaggatttgctctgctaatttagttatccgtagtgttttcccccctaacgatagctacagatagtattttgtcaaacgattcagcattttatcagctgttcatttaacagcttgcatgtggtgaacttaagctaagcagaagtttgagtattggatatttcagaaggattgcttgatgtaggatttgctgctatttagctaatttcgaaccatacattagattcatttctattgaagataatctttgtaaaggaaaaagagttggagttggggtgtgttattcggagtaaattaatgtgaatttcgaggaagaatattgtaatttttttcttctcttttttcttaatgggtaaattcagtttataatctctctctgatgcagtcgactatttttttttcggttataggtgacgattcttctgaggttccttctaaagtctcg

SEQ ID NO: 100813 - DNA, 650 bp, Mimulus guttatus
  Intron number 3 from transcript mgv1a008805m (locus mgv1a0 08805m.g) derived from phytozome v7.0 (chr-ID scaffold_142 ; pos 389473 to 390122)
ctactacacgaagctgtctcttcatttggtatctctctctctctctctctctctctctctctctctctctctctctctctctgtgacacacacacatacacacacaatataatgtaaaatttggtagaatgaatacgtagtattgagctgaaaatacgacattcactcaaacattgagatgatttatttgctagctattatatatctcaaagtaagttactttgggaaattaaaaagattaaagataagaaagaaagagaaagcagtcgtagattcgtagtttcttggaactgttgatatgcattttttttaattctgaataaagctattttcgatcactgtctaactaatggtgaatagtgatgtcattttgcttgctaaaacagaaggggcaatcaagaaggccgatttcttaaatgcgaaaaaaagttcgatcaacttttttaaattaagaagtacaatttatattaccacccctcgttaagagagttggtaagataaaaaaaatcttgccactcccctatttgatgtaggatttaaatttcgatccgtctattaagccctccattctttttaaaagttaaataattttgtttcttgtaaatgaatttacaggattgccatcgaacaaaacacagaaactctcaatt

SEQ ID NO: 100814 - DNA, 812 bp, Mimulus guttatus
  Intron number 1 from transcript mgv1a001319m (locus mgv1a0 01319m.g) derived from phytozome v7.0 (chr-ID scaffold_163 ; pos 438360 to 439171 reverse strand)
agaggtggccccatcgctaccagaaaattaatgtatctattataatcatttatctgcatttgctgttcaattcgtgtgtcttttatatatatataaaatatatattcaattagttttccaagatttgttttttattagagaagaaatcaaaatacctaatgtaggctaaattgattttacaagactggattgagttaaattctgagtaagcggtgttgggaagaagagtaccagctgtcatcgcatatctaaatactattacctaaatgcgataatgcgcaattatatcatagtgtcgtgaaacagcccggacatttatgtgagtatgagtatgcactaaaaaaataatactcttttattgtagaaatttgtaagaaagcagaggctttattgatgaagtgacctcggtattaccaatcgattaatatattcctaacattttccatcattttttcataacttatggattattgcatttggcacccctgtattttctgtaattgttgtatacttccagattattttatcagcaaaacccccatataattcaattacttttagctaacaaccctaaaataattactttttagggggttctgtgctataaaaacgcattattacggtgtttttgctaatatttacgacagtgagagtttctaagaattcgaaataacacagggtactaaatgcaataaactcttttcttaaacacatgttctggaaactaacggaagatatttttttgagcaaatcgtactgtataacttatgttattggtggtctgtataaatacaggaagttgtgcaagctag

SEQ ID NO: 100815 - DNA, 808 bp, Mimulus guttatus
  Intron number 1 from transcript mgv1a001895m (locus mgv1a0 01895m.g) derived from phytozome v7.0 (chr-ID scaffold_16; pos 677923 to 678730 reverse strand)
aatccgcctcctgtagcgacgtttgatcacaagaggtgtgttcaattctgtcggtggtgttttttttcattttattggacttgattggactaactctttatttatttatttattttgttaaatgggttattgcattgatttctttttgatctgttactttgtagtttaaatcttaagtgtttttgagggaaatatagatttattttagattttttttagtcgatttcgggttctaccgacattaccaaagagatcatgtgtgactatggaaaaagaagataaaataaaaattaattagaaaaaatgtggtttactgacagtgattaatgtttgtgttataaatttgtgatacgcatgttagtatcgttcccgtgttttgagtttgcccgttttctgtgttatcttgatgatttgaatgagtttataatcttcactttgctgtatcggtgtattcaagaattagtatttgtttaaactggttgtatttcgtcggactaatgtccgaaatgtaaacgtggaatgtcgaattaggcgtcgtcgcaaaaatgctaaacgaacgcagttatgtactgatatacgtgtcttgttatttggtgagattctcttttatgtttctatttatcttaaaataaaatcgggttcaaggtaaacgaatgcagctatataccgatatacgtgtcttgtatgtgcctcgattattttgatttttctttgttaaaaaaattgctcgttggcttgaattttgcaactgttttttgaacttatataaacagggattcgtacgggtttgcagtaaggcctcaacatt

SEQ ID NO: 100816 - DNA, 762 bp, Mimulus guttatus
  Intron number 1 from transcript mgv1a014187m (locus mgv1a0 14187m.g) derived from phytozome v7.0 (chr-ID scaffold_64; pos 100533 to 101294)
gcggagaaatctaattctactatttatataggtatgtcccttctcctctctctctctctctctctctctctctctctctctctctctctcttttggttccttttatagtaatttatttggtttttcttttattctaaatctcagttgcttttattggtcctattatttggtgctctagaacgattgtcttttgggcttcaatggaggatctcttctctttcacgattttgaaccttgtttggtttctgttttgattttttttatatgttctatcttttatttagggatagttttgtaagatattcctcaaagcttcaatgttatgttgtatagtatactgaagcacctctaatttggtatattctaacttgtttagttggtttttcttcaagcatgccgttgtaaagagtttcctgcaagtccttctgcttggctaatttgccctttttccagtaaaataataaataaataaaacaatttcaatgtgtagttctgtttccataaaattgtgatgcttcttgtacttgacttaaacatcaaatttccttttaatactccaagtaaataggagatgtgaattccatgtaaaaaaatcaaatataataattgcaattatagtaatgtttggtttagattctgatgatactgttattccaatttagtataaacaggaatttctgttgaaagttgtgtaattattaacttcgactcgaatttccttttgcaggaagcctggacgaaagagtgagtgacaaggtgctg

SEQ ID NO: 100817 - DNA, 667 bp, Mimulus guttatus
  Intron number 1 from transcript mgv1a010203m (locus mgv1a0 10070m.g) derived from phytozome v7.0 (chr-ID scaffold_122 ; pos 542718 to 543384 reverse strand)
ggccacgctcgatccctcgagcaagccaaaaaatcgtacgtttcatgatctgtttttcggatttttttttttcatttttttttaattttaattcgtgctcgttttctgttttttttccctgctatgaaatacggcgtgcaattgaaaatttgttgtttacgaggtgtttgattttatgtccgtgtggtgttatccctctttctgaatcgaattttgggagaatatgtatcgaattgtttttcgttttgcttgtcttttctgtccttgagatcacccttgatacgggagctgggagctgaatttcggtttttattttgattcttctgaatttattccgtcttgtttccacttttccagtgtaataattccattcaccgggtgttttgtatattcattgtttagattgttatgggagtctcaaatatcatgtttcagttgggcctttgattaacaatgtcaatcaatttgattttcccatacgaaattatgcgttgatctgcaccggtttgcaaatatctctggatcatgggttattttttttttcttcggaatttggaatcgtttttgttctcggtgttctaatagtaaatatttgctgatgttgtgatacccgatgccgaatatctatgtaggttccccaatacgtacttgctcgtcggctgctgca

SEQ ID NO: 100818 - DNA, 1011 bp, Mimulus guttatus
  Intron number 1 from transcript mgv1a024774m (locus mgv1a0 24774m.g) derived from phytozome v7.0 (chr-ID scaffold_57; pos 1397400 to 1398410)
cgacgagtataatccgacatggaaacaaattataaattgacataaaaaaggaggtacatctcaatctacaattttttttctctactagttttctaactataattttcaactattatcaatctcatatttttcatcgatatatctcaattcttagagatgaagatagaaattcgatttgtttaaatcttaatacgtaagatttaaaaaaactaatgttatataaaatatgaataatattatattattaaatttttactatattttcttattatgtattaaatttattatttttttctcacttttaaaataagatctcgtgcatcatacaggaaaaaaatactagttatttttaattgtacttaatttattataattatactactcataattaaatttgtaatataaaaaaaaaagaaattaactaaacaaattattttttattatgttaatattatttttaatgatactacttataattaaatatttaataatcaacaaaaaaacgaactaaaaaatattcatttatactagtataattataaaaattgattataaggcatatagaaaaaaaaaaggcatttgaggttgccgacaaacccagtgaatgaatattgacttgcagtaataaagatcaagtggtggtgaatgcacacacataagagccacatatcccacaattttggtcttcaactcttcttcttgctacacagtttttagctgttagtgtatgaaattcaagtctgatgaagcaaaaatttagtattggtcggagataaagaattatccagagagagatggctgcagcttatgcagctttagtttctctcactcacactcttgatcagatcctcctccacccacctcccacccttcatatcatttttgatagaaaaaatattgaaactctacaacaaaaggccgacttgttgatcgattttctcgagacaatcaagtaactacggcggcggcgacaaagaaatcgaacatttggagacgagaatcagggtggca

SEQ ID NO: 100819 - DNA, 796 bp, Mimulus guttatus
  Intron number 1 from transcript mgv1a011404m (locus mgv1a0 11404m.g) derived from phytozome v7.0 (chr-ID scaffold_108 ; pos 482906 to 483701 reverse strand)
cacaaaattaaggtaccgccgccttctcatctttcattttctccgaccaactctcatatatactcggatttatctcttaatttcttgtttttcgatttgatatcatatatatatatatatatatatatatatatatatcctcgtatttaattgttctatttatttatgcttccgagatgcatatatatatatatatatatatatatatatatatatatatatatatatatatatatatatatatatatatatatatatatatatatatatatgttcatgtgtatgtatatcagattaatcatgtatgaacatcaatcactattgaaataaattgtcatctgctaattgaaatgatttcacaaattagatgatctgggaaactgatcacaacaattaggcactatatatatatatatatatatatatatatatatatatatatagagagagagagagaatcaaacgactgtggttgatcgaggccaaatctttttcttgatctttttgttttttttttttgatgatttttttcttgattattttaaattagctacttatcattgatatacacgacgatactgtatgtattagtaattagactattaggccaagcatgtattaaagaacaataaacattactccaattacattttttcaaacctctatataacatacaaatcttgtttttcgaaacaatggaggtcattgcccccggccttatcttcgttcgagttatatggttgctcgattttgttatgcaggagaaagtaggtataagtgcaccaccgtccgagac

SEQ ID NO: 100820 - DNA, 835 bp, Mimulus guttatus
  Intron number 2 from transcript mgv1a015347m (locus mgv1a0 15347m.g) derived from phytozome v7.0 (chr-ID scaffold_4; pos 818438 to 819272 reverse strand)
ctcgattgctagtccaattacatcactgtctgttggtatgtagaatgtagataatccatcaattgtctaaagttgatgaaattgaatgttgtttatcaaaatgtaactagcaatgaatttcacttgtgtttttgttgacaagagtatctaggtttttttttttttttttttttttatgagaatgatgggctaccttgtgtattcacatcttcgtacgtgtcactatcttactcttcatacatagaaatggtcgtcgtgttctttttttttttactgtttggagcacataactctagtttaggcttaagatgccaagtgtgcattggtatagcgtaaaaatggtcatttgacttctgtagaaagtatcgaatgaacattaaatctttctcggtagagaactttttgaatgttgggaccatagttattgagataacaaatatattttattctatgctttgagaagtctctttctggatgtgttattaagctggttgattagttctatgcattaaagtgattgcagtggatatgatgcagttgaatcgtgattgcagtggatatgatgcagttgaagcgtcctcatactctaattaagtttacgaggacaagttactgcctgtgagctatctaagaatgacgataataaatagttatattgttcttgtaatgtggcgtttgctgtttcatggttttcaatgctgttaattaactgcgtatcgtttgaaaacatgatttggaatacgttctgtttcttttccccttgtatgggcattatagacggattttgtttgtcttttcagtacgctcagaagataggtgtttgaagcaaccaaag

SEQ ID NO: 100821 - DNA, 446 bp, Mimulus guttatus
  Intron number 1 from transcript mgv1a015347m (locus mgv1a0 15347m.g) derived from phytozome v7.0 (chr-ID scaffold_4; pos 819287 to 819732 reverse strand)
cggcaagctgttctgctcctccggccgattttaaggtgaaatccagacctcaagttttacatgtaattgaaattcattgtattatgatgatttatttagctttcgctcttaattgttctaatatgcacctctttttatgaattcaaaaatcatttctggatgtttgtgaaaattgcactcgattaacggggatttatcttgtttcgaagataaaatccggttctatttggttctcgatagctagttctcagagaaaaaagaattttgtttttttttggttcttatttttattgaaaataaaaataaaaaaagatttgcgtgtctgtaatttgggaataattaaattgtttaattgtgttgattgatgtgactgtattcctgctatctatgatatatatctggtggtgtgttgttgttttcaggtgataccttgaataagcagtgag

SEQ ID NO: 100822 - DNA, 823 bp, Mimulus guttatus
  Intron number 1 from transcript mgv1a009433m (locus mgv1a0 09433m.g) derived from phytozome v7.0 (chr-ID scaffold_12; pos 2630548 to 2631370)
acgaaatacaagacgtttcctcacaggtaatttttcgtactgtgtttgtgtttgtgtgtgtgtgtgtgtgtgtgtgtggatctgcactgtggatgatcgattcgaaattgttcgttagaagctcgtttgagtgagctcggtttgttagcatgaagaacacgttcaataagctatgagctcgattagaaataaaaatatgataaaatcgtccctaatcgtgtgaaatttgcgtttcatgagtattactaggttgctgattaattttgacatgtgggcttagttgagattttgttatgttcttagtgattgatcaatggggggttttttgtacgaagtcttgaggaggtgtgtttcgtaatttgtttcgagtgatgttgtacgaatggctacagtggaagtgttctaacttttagttctgcatctattgttcttgatatcatgttcatcacttgcactcttctttcgatcatgaaatcgagttggagattttgttatgtttttggtgattaatcaaaagggtttcgtaagcattcttgagaagctggttggttttttttttttttttttcaataatttgcaaagtgtttgaacttttagtttccgcagcaatttttcgatcatttatgctctgttttggatcttgaaatcgagtaagcaaaaagtatttgttaaggagggtttgtttgatttataatgaagaagtttgtaggcttttcgattgtgggagttacttgccaaacttgaccttaatagttcgtctcctttttcttgattttcctttgtaatattacaattgaatggtacaacagatctgaagcagact

SEQ ID NO: 100823 - DNA, 981 bp, Mimulus guttatus
  Intron number 1 from transcript mgv1a003012m (locus mgv1a0 03012m.g) derived from phytozome v7.0 (chr-ID scaffold_137 ; pos 257049 to 258029 reverse strand)
ctcactaccaaccagaacttcctccttgcctccaggtttccgattctgcttttattttatctccattttgctttttcatggtttctctgctattctataggttttgattattagtggattgtttttttctgaaaatgtgatttcttggcgttttttgcggataaatctgtgctaactgtgcgttatgtgtttgctaatagatctgtgtgcaccgtgttgatttggtatttttcttttttcctcgggttttgatgcaatgtagtttcttgctttcaatccaatgtgattggcaataacaaatgatactgggattttgtatttttcaatttcgttagttaatatagttctatggttagtcgaaaatcaatgcatacacatatacatactgctattttgtattttcaatttctttagtttaatatagttctatggctagtctaaaatcgatgcatacatatccatttcctaattttgaattaaaatctcaaatttcatcaacatggctgataatgcttttttttattgatgccatttgagcaataaaagtatttctctgttttcagttcgctatattttttttttttgagtaaattcaagtccattacaaggggaagtaggggaggggggactcgaaccctagacctttaccctattggtaagggctaggtaccaactctcctaatgagggttggtagttcgctatatttaatatgattaattttttcatgcaaaattaaaattggtaattttttatttttattttgatccctcattttggatcttgtttgtagatttctgttatcgtggatagatcatatcattgtttttgcatgcaaattggtaatttgttattttgacatctttgcccctcacttgtagatttaagcacaagcggctcaggctatattatagaccatattcttaatctctgttgcctaatatgtcttggacagggtactacagtttccgtagagtttggtg

SEQ ID NO: 100824 - DNA, 517 bp, Mimulus guttatus
  Intron number 1 from transcript mgv1a012998m (locus mgv1a0 12998m.g) derived from phytozome v7.0 (chr-ID scaffold_8; pos 1651026 to 1651542 reverse strand)
tactgaaacaaaaatcctcaattacagtttcgaaggttgtgattctcgtctcttctattttcgatgccttctagtttttctgcaattttgtttttgactttttttttaatctgcctcgttatcttcgtctgtgtaatttctatatcattcggttgtgaattattgctcgtttggtgcttgtttgcggtacgatacttaccgtgctaggaattttcaatttcgtcaagtttttgatggggatgtttataattttgacttcatgatttagggttaatgttttctggcatcattgatgttatacgatccagtagaatacccaattatatgctcgtatatctgtatattgtcatgttgatttgtatttcataccacatgatctgttcttttggctgggatagaatgtattttaatttgctggagtacagttttttttgtttaatatgattagattattaattgctgctgcttatcgaattttttaggtcaatttaggacatattgtcggggctagagggtt

SEQ ID NO: 100825 - DNA, 241 bp, Mimulus guttatus
  Intron number 1 from transcript mgv1a006571m (locus mgv1a0 06571m.g) derived from phytozome v7.0 (chr-ID scaffold_92; pos 683934 to 684174 reverse strand)
ctgctgtttttcaacgcaattgcgctgagtgaaaggtaatttagtgtcattttgatctgtttgcggaaaaagtactttaatttggtgattttagaaactaatttgtaattttctgttaaattaactctgaaattgtgtttaccgtgctgattagggaggaagatcttacaatttacggcttttactgtgttttttttttataacagaactgaagaaattaggcagcggaagagcttgagaa

SEQ ID NO: 100826 - DNA, 452 bp, Mimulus guttatus
  Intron number 2 from transcript mgv1a003828m (locus mgv1a0 03828m.g) derived from phytozome v7.0 (chr-ID scaffold_257 ; pos 100602 to 101053)
ctgctctccgaagtgtcaacttaaccgagccgcaggtaattacgtttttatctatatctatatgttggctttaatctctattttttcgggttatatactgagaaaggagattgtgaattcacatttcacgactcttattgacgatattcgatcttctgcttcttgtgtaacggaggttgagtttacgttttttggtaatgtttttctctgaattagaaagatgtcaagttatgtacaattttttaatgtatttattcgcaaaatttagttactacactgaatttgcgcagaatttattgcttttggttgttaacaatgttcactagatttaataaaacgaaatcgaatcctttgccatttttagatgcatgtggctgttgatgaattttccttttcgaaaggtttgaattgttaagccaaataattgcctaatgtttcgttgttcaggtcaa

SEQ ID NO: 100827 - DNA, 896 bp, Mimulus guttatus
  Intron number 2 from transcript mgv11b008016m (locus mgv11 b008016m.g) derived from phytozome v7.0 (chr-ID scaffold_1 74; pos 509515 to 510410 reverse strand)
ttattagcatgtgagttttttttttttttttttatttatttatttattattattattattattattattattattattattattattattattattattattatttgaagttatggattggggataagatgtattgatagggtgggccataaatcataagattgggtgaaactatgttgaagatttgtaataagattttaatttaaggtagctgaagatgtttcaattaattacctaaactgtttaatgtagaaatttcaaatttctatatagtaggcttgacttggatcctaggcctagctataccctcgtaggaaaaacaaaagtttgaaaaaaaaatatgtatagtgtttaagattgtgatttttgttttaacataaaatgtcttgtatttactaaaattcgtcgagtatttgttactttttagagtccgtttgactaaacttattttaaagagctgataatctcttacatctcatattaagagctgattagttgttacatattatcttttagatttatttttaaattgtatggattatgaacttacaagtatttttactcattataaaatctttaataaaaaatatggtagatacttatcaaaaacggtcttaaaagctcaccaacaagttatttattgaatttttttagaaatattaccaaatactttagaagagtttgtaaagatgttaaatatgttataagctatttttaacttgttttgttatatgatatttgcagcatgactagtaacagaaaacagaaaattgtaactgtgttttattagtttataaaattgtaattataattataattgattaattaattagtccatttttctggtgagtgggattgcagaattctaaaagcccagaacctgcaaggtacagtcc

SEQ ID NO: 100828 - DNA, 888 bp, Mimulus guttatus
  Intron number 1 from transcript mgv1a014803m (locus mgv1a0 14803m.g) derived from phytozome v7.0 (chr-ID scaffold_12; pos 2200941 to 2201828 reverse strand)
ctccgccctagcctagatcttctccgccgatcgttctctctctctctctctcctctctctctctttctctttctctcacacacacaaacacgcacgcatacgcagcaaaatatttactctgataatttttttcatgctgataagaaatgctgtaaatctgttactgtataaccttgggcatgctgttatttcagtggcaccacctgtatccgctgatctctccagaaaattctctatttttttttttttttaaattattattgtttatttatattttagcctcttttttgtcgatcatagctggattcagttattccttaaaactcattcctaaacttatcaacccgaggctcgcaaaagttcaatttgtatatctgaagcatggattttagattagttgaaattcgataatcagtgtttctgttttagaatttacttgaattatatatatatttttttatcataaatcccttgcacgaatttctatggtgttgctgattataatttataagtaattatgattattttttttggtttcttttagtcattgctgctgttaattatttatgtgaatgagcctcctctaattatctcaaattaaggtggtgttaatagctgtagtctctgtttattaaaataagaaaatgggaaatgaagattgtattgtactgttgaaaagattacgaggaatagacagcactcgaacacagcaacccgaaaattttaattttgtgtggatcgtattttgtagtgcatgcaaccttgacatataactaaaaataatattatcctaattctcatatttacagttttacaatgatttttcgtatattgagaaatttacttttaccaggatttgtgcccgtctgtgaagaatattctccttct

SEQ ID NO: 100829 - DNA, 948 bp, Mimulus guttatus
  Intron number 1 from transcript mgv1a011617m (locus mgv1a0 11617m.g) derived from phytozome v7.0 (chr-ID scaffold_115 ; pos 314925 to 315872)
tgattcgattcctcaagggttttctcaactgttaggtatggcgaagatattgctctgtgtaattggggttattagtttgcgatttctgttgattatttgcgtgtttgtaatgattgttctgtcgattaatggtgcgatccccaattgcatttcccaatttttttattttttttatctggcggaaagggctaaatatgctaaccgtgattgaaactgtgatatacatcgtgctttgtgcgttttacttgcaaacttgaagctggtctgagatcggattttttagggtttctgttcctaggattttttagtggtgctgaagtttctgttcttcaatattatggattctgcaccttgctatctttttttttcttctagatttgatctaaatttgaaccatttgtgctctgtagcacggagtgacatgtgttaatcatcttatgtgaagaaatgtgttatttattgtgtttaccataaatattaacgagctctccattattactatatttatagatggtaatccaacttaaatgtaatcttactgttttagatctcatcttttggcaacacgcggcagatttccttactgctttaacgtgggttttgttcaattacgccatatcacccctatctgtttcgtggaagatgttatttgaatttgttacctttctccactcgttcggtcattatttttggagcatgattatttaatccgaaaggaatagtgtatggtgcagcaaatagttatcacattttatttatcttagttcgtattgagaggtcatgaatttgtcccttacaaacaacatcgtgttgtctttgccacaccttctatctattgattttgagggcaatgtttatggaaatcgtagcttaaatttatcttgtttcccttacagattttttttctgagtgtttgctaatttgttttcaggaagccggagggttatc

SEQ ID NO: 100830 - DNA, 639 bp, Mimulus guttatus
  Intron number 1 from transcript mgv1a003418m (locus mgv1a0 03418m.g) derived from phytozome v7.0 (chr-ID scaffold_24; pos 1621172 to 1621810 reverse strand)
ttgaatcaattccgccagattacactttgtcccaggtaagaagtatgcatctgtttcatatctctgttagtaattattttcctccttctttttgctgctgcgtagtatcagttcacttggtttagatctcgttcgcgatgctattgcgtgtttgttatggttttagtggactcgtttatctgcttctttgatcttcgttcgtttaaatttattgaattgaacattcagttttttcatttcttctgttttcgtgtctgctttggttgttcctgtttcctgagttgaagcctggtatatgcttgattgcttgttgaaattagatggtcagaaatgtttgtttttctctttggtccccaattttgacttttttttgaagtttcaaaccccaattttgactttttcccccctgatgtaggcaggattctgcaaaagcccgaaaaggtctcatgaaattacctgaatgattctttttaaaaatacaaatctcgttttttttttttgcatattaggctgtttacttcgtttgatttctattttgaaataagtatttccaatttcatggcgtttccaccttcagtagagaggttgctgagtgaaatttacctttttgcccctccagattatagagggcaatcttgg

SEQ ID NO: 100831 - DNA, 870 bp, Mimulus guttatus
  Intron number 2 from transcript mgv1a010520m (locus mgv1a0 10480m.g) derived from phytozome v7.0 (chr-ID scaffold_100 ; pos 735640 to 736509 reverse strand)
gttgttatcatctcggattaaacggatcgagcaaggtcagcttttttttagtttttttttttttttacaactaataattaatttttaaagttgtttgcaatgttctgcttgtaatacacctgttgcaaattcataaagatttgtgttttgtgtatttgtaaagtgattttatttgtacttgtgtttatagttcttgcaatgctgattaatagcatatcaggtggttgcattaaattgttctttctatcaatccgaagcaaacgtttcttacgatgaaagatttggtcaacgcggtggccttttgaccattcgttgaaagcgttagaatctttgtgaacatagtcttttttagcaatggcgaaatagatgtattgattgtgcacgacggttcgtgtgcattatttattcagtggagattcatggtaaaagatcattcgtttttctgatattctcgatttttatatatggagaaggtatttcttttgatattgtgcatattatatacacgtttgttttaaatgtattcacgtgtatatattactgtaaaaagaagtaaaaaagatggcttagtcgctaaatttgctatcgtttaaaaagaagtgaaaagatgacctcgttcgaattcagatgagtgtctgtaattcgtaaagtgaatacgaaagcatcaattgtcttgtgcttgttaatttgtatcgacaattctatacatttttctggtggttgaaatcagacaaatttattaccggaatacgttttttgttttaaatttaagtcaaatttatgaatttagataattttcaaatatataaatcttctcgagactaattatttatattttcttgtggggaaaaaatgtatatatatttgcag

SEQ ID NO: 100832 - DNA, 538 bp, Mimulus guttatus
  Intron number 1 from transcript mgv1a010520m (locus mgv1a0 10480m.g) derived from phytozome v7.0 (chr-ID scaffold_100 ; pos 736520 to 737057 reverse strand)
ccatcaactccggccgcatttcccttacccactccgtactgcttctctctctctctctctctctctctctctctctctctctagagttcaaattcctatatgtttgtcgtgtcatagatttcactcatgtggctctgaatttcagccaagattcgttttttcgttctgtgtttgttaattaatttatttaattttaacctatctccaccgccaaccacttattgcattctatacgcatagaaaaacaacattatcgtctgcttcttcccactccacgatttgggcaggcgagccaacattttgcccaatcttttgatttttcaattcggtccaatcgaaaccctaactaatcccctttcggtatttttttctttcttttatcgtaaacctgctacagcagattataacatctaaatcatttatatattaattgaggcctgcaatttagccccccgattggctgtgtttcttttctgattttgtttttcttttttaaatcccagattgcgatttctagggtttctgcgcaaaggggcgt

SEQ ID NO: 100833 - DNA, 610 bp, Mimulus guttatus
  Intron number 1 from transcript mgv1a006456m (locus mgv1a0 06456m.g) derived from phytozome v7.0 (chr-ID scaffold_209 ; pos 304441 to 305050 reverse strand)
cagtaccagttttcttacagaacaatcccgacgaggtcttaattaattcgattctttgatttatttagtgtcgttttttctgtgttttctgctattgttcgtcgccgattatgtggaaatttcagtgtttgtatgagataattttttatcagtgaaaaaaaatgatgggaaaaatcagtggcattattgatattagagcatttttttgagctgcttaatttctgggatcgtttttatttttggtttacctaaattttttctaggacaaaaatcacgcattcccttcttttatatgttttgaaattttatttcatgtgtgtgtgtgtgtgtgtgtgtgtatttaataatttacagaaatgcatgtctattaagccaagaacatagttttgtattactgcagctttttatctgattgtgcagataatcatctgttctaatctgaatacactggaagaaactccgttcgaaagcgtcctgttatataatatactcgaatatccaacatctccgtttcgtaatatatttgaataaccgattttgttagctatatcacattgcatattcaaatcgtttatttcatattcccgttttgattatatcaggtggctat

SEQ ID NO: 100834 - DNA, 982 bp, Mimulus guttatus
  Intron number 2 from transcript mgv1a006318m (locus mgv1a0 06318m.g) derived from phytozome v7.0 (chr-ID scaffold_23; pos 927835 to 928816)
cgtattcgccccactcatttccttcaagcgagtcggtgagaaaccggcactgattttttttttttttaattcagaaccccaatctctaagtttcccgtatatatatgtatatatgtatatatgtgtatgtgtgcgtgtgtgtagactatgattcgaataaaccatctctaatgaaattttttgtgtcatttgattgtccataccatcaaaaaaaagattacccgatagtgtaacactattgcaatgatgtcagcatgaaagtaatgtttggggagaagggcagagcaaagattatgattcgtttcagtcttataggttaaattttgaagtttgcgtgttgatgaattttcagaactaaggccccgtttggttggcaagataagattagccaagataagattaaatagtctaatgaaacccaattattttattggagcttgcgatgtccaacaaaaaaacacactagaaggcaagataagtcatgattacataattttggcgggtcgacccagcaatttattggggataccaaacatcaaattaagtccaactatttagttaatcttgtcttatcttggcaaccaaacggggcctaagaagattacgcaaagtaattcaacaaatataattccatcctctcttcgttttatgtgcgggtatgccgtttgtgtgtttaaaacaaatcccatctattccaaaaagtgactgtcttagtttctttataatgatgtttcgcgagattagattcgtctataactagggttgataagctatagagaacctgccatttagctgttatcttggagaaaactgtatgctatttcacttgattcttgaatctgtgtttttatcggttgattcttccagagatataaaacgacctctcttgttcgatgcgtgcttttagttacaacgtaagttaatcatttaattgtttttggtttaagattcattgcggtacacgtcggctttgtctgtggta

SEQ ID NO: 100835 - DNA, 911 bp, Mimulus guttatus
  Intron number 4 from transcript mgv1a020577m (locus mgv1a0 20577m.g) derived from phytozome v7.0 (chr-ID scaffold_122 ; pos 343332 to 344242)
aggtattaagtcagacttaatatgcacctgcaagatatgcaatttactgtttgtctttggatttattttttaatcttatttgccggcataatttgcctctctatctacattatgcaaaagaggagattaagatcgtttcattgcagcacgaaatctaccatctttgttatgccttgcatcatgtttttgtattttccgtccttgataagatagttctggccttctgggtgttaaacccatttgtttcacgctgctgctagtatttatcaagtaactagtatgtgcttgtagatagactttggtaaagttcaatattctctgtctttctaaatgggctgcattgcagattaattaattagtatatgttttaagcccactgcacaccggcctctgcatccaattgatgcattatatacggaaggaattgtaagaaagaaatcttcatcaccacatgcagaatgccacagccaacttgtggtggtattatcacttcaatccggacacagcatctgtgacataggcatgttgtatccgtaacacagggctggtttattagctggtaaattcatgggttcaatttaatacaaaagatggacttgctagtatgaaagcctaagctctgtttgtttggtttggtttctctatttttggccttaagtcaaaagttcagattatacctgaaagagcagatgtggcaagctccaagagtactatctgggtttttgattggtgttatgtgtttagtgctatgagctattaacgtctagttatgacaactacttatttgtgtgtgtaaacatctagatactgttttctatcatattgtattgaatgtattattgtcaagatattttgtaaattttagaagctaagcttcggtgtaacacacaacttatgattccaggtttgcc

SEQ ID NO: 100836 - DNA, 945 bp, Mimulus guttatus
  Intron number 2 from transcript mgv1a005573m (locus mgv1a0 05550m.g) derived from phytozome v7.0 (chr-ID scaffold_42; pos 728433 to 729377 reverse strand)
tactcaccaacggttatcctcctattctcagagaagtaagttgggtgggtaatttttttcgttcaagtattgtgtgaatgaaggaagaataattgactaccacctttaaaataaaaaataaaatatttgttgtgcttacatctcgcgcattgagaacgatgtggtgaattttgtttggatagttgaatttactgtaaatatggggcatgaaggtgtcgttttcattcttgagtgagttggcgtaaataggatgttgatttgtttggctcagctctgagcccagaattttgatgccatctcaggaatgtggcttctcatattttctcacttaacttctgaatttcaatcatttatatattatggtgcttggttggaaagatatacttcattattgacactaaaaaagaacaatcatcaatcgttaaattgggtttcggttaagagttgtttttggcggtttgacattggacgtcgaatttagaatatgaactgatatttcttgagttctggccttcttttttctttttactcggtcctagttaaatatagagaagaatgatgaccattttcaagtaaaatcgcattattcgaaaaggtttatccatgtcagcgtgtttttttgaaacactcataggatgaaatagcaaagtaaagctctataagtgaatatcgattggtgttttaactatagaatcggaagctgttagctagcttttgcgtctatagtatattaacaaatttaggaattcgatgtagctccattaaagcttatgcttagtgaggttacatcttttcatgtttttgtgatattgttgatgatagaactaagataagaataccattttgtatttactgaatatagttattgaacccgccgtccttgtttctcatcttattgtgtttgcttttttcctaggatcattttattgctcaacgaattgctca

SEQ ID NO: 100837 - DNA, 798 bp, Mimulus guttatus
  Intron number 2 from transcript mgv1a001080m (locus mgv1a0 01076m.g) derived from phytozome v7.0 (chr-ID scaffold_64; pos 374781 to 375578)
cttttggaggtactctttttctttcttttacttggcattgcatcgaggctttataattgtgaaattatgcatgtttagtgttcactttttaggattagcaaacttggttatttcgactttacagcatcatatatgtatctccaataagtctacttgatgcttcagtctgaaaattgatttgaaaagaatcatgttatcttagtaaccgagctggatggtgtataacaagaaaaacaccagccttagtggaagcttatctgaaaagtttgtcttacttagagaaatagtctggcttgctatttgtcacttatcctcgagcatgtggctagcacacaaccttgttgcaggttctgcagaaatttctgcatattaaaacgatagttgcgactatttagaaaggaatgtgaatggacaataaaaagagatgtttagtttttgaagagaagtggagaaagtaattactcccatctgctggtcagaaacgaatttgatctccccaacactcaaaattttgtcctattacgtgaaatttcattgtcataatgtccaaatgttgacccttaatcagacttattaggtgatattgttttcttgtctcactccctaccccccccccccttttctctctcgtgtgtgtgtgtggaacattttttttgcaagtggttagcaattttgtgtctttctgtggattgtttattgtatcctcaactagatctttagaccatgtttttgagaacttacaaatctgcctccaaaatcccaggtaaaaagaagaaagatttcataatatctgaggca

SEQ ID NO: 100838 - DNA, 686 bp, Mimulus guttatus
  Intron number 1 from transcript mgv1a011401m (locus mgv1a0 11401m.g) derived from phytozome v7.0 (chr-ID scaffold_1; pos 620359 to 621044)
ttaacaaggaggtatgcttttgattattcttgaatatttgtttcttaaatcactgtcaaattaggaataatttgatttctgtctgatgattggggaataattcaatctaaatgtagaagaaaaaaaaaaccaaatttgaaggtgggagagattatttgaagcaccaaattatagctacattgatgcttgtgtatatgttagtcgtttttgtcggtcaaattataccaagagcaacgggctgtacggtgaaagtcgtgaatttaatttcgatgaagacgactaaattatagtaggtgattgttcttctgatatcttggcactaaaacaaatgaagctgatttcggtaattattgaccctatcatggctatataagatgacaatatctcgtaatcgtattcaatgaggaacaaccgtcaaatagggcaatgtctatagctaattcatttgctagaatcgtagttgaactggacagtaactcgagatggaagatatgttagtagaaggtggttgtgcaatatatcttatagaaaaggttgcttatggggtttcatagccgtttatattactactttcatgcagtttattttacgttcatgattcaaattgaagaaactggcaattacggataatgcctttcgttttatgttgctattgttgcctgcaggctggtgctcaggaaaaattt

SEQ ID NO: 100839 - DNA, 856 bp, Mimulus guttatus
  Intron number 2 from transcript mgv1a003752m (locus mgv1a0 03752m.g) derived from phytozome v7.0 (chr-ID scaffold_101 ; pos 780580 to 781435 reverse strand)
agtctgttgatcccggtctgaaagcctcaagtgttgtaagatttcttttatcccatttgatcttttttcttaataagaaaatctacgccgtgttgcattattttgggaatgccaagttatagctaatagtgatgttgttaattgtaatttttaacgtgtgttatttgagtttatcaatcttggttgctagaccaaagtcacggttgttagggcttgattgatgtaatataaaatttgccaggagaattgaaatcaggtacatgtttggttacccatgaaataattggtctatttgatgcacgtcttaccaaagaatacaaacttaatgacatattcagagttgaaatacttgtaatatattaagtccaagaatctgaaagtggacatgattctctggttcaaagtttcaagaatgcgttggatgttattgttttttttttcttgcatggagtgtaggttttttagctgttttaaaattgaaatacttattttctcatttcttgaatcaaggcgttgtttaaaatataaccccattacctaacccgagccaaaaataatagcgcaatgactagtatttaatactaggccttaaaaataagaataatcttcctattaaaattcttcagcgtaaggttgatcctacaatttgccggtagtctacaccatataatatattcaagtcaactgttaaggttgtctagtaatttctcaactgttcctttcttatcttcactcactgaactccatacttgaatatttttaatttattcctcgtttgcctttcatgttgcttctgttaatgtttgatcaaattttgctagggccggtatagtgttattggagctcagccaacaat

SEQ ID NO: 100840 - DNA, 601 bp, Mimulus guttatus
  Intron number 1 from transcript mgv1a003752m (locus mgv1a0 03752m.g) derived from phytozome v7.0 (chr-ID scaffold_101 ; pos 781551 to 782151 reverse strand)
ttcaatctcgccgccatccctgggttagtcttaattcttctatactcatcaattcaattactgccgtttttctcacattgattttgattgtttgattcaaatcctatttcctattaataattcaatcaatttttttatctgtttttggaggatgtatattatgcttttccagaggtttacgtattggatgaaatttaggaacatcgattgtgtttgcatatatgctaattatttcaattataatgtacccttagatacggaatagagtgttccatcaatgttaataccaaaaaaagaaaaaaaatacctctttcttgctatttgaatatacagttaaacctctataaattaatacagtcgagttattaatttagcgaattattaaattatcgagttaataatttaacacgttttcaccgagtcgggaccgagagaaactattatttaatcgaggttattaatttatcgaggttctactgtagtgaatgaatgggaaatttgaacagagtatcaattgatatttttttttttgctttgtttgacgttgtcgataataatgggtgcagtggaccactctgtgaagttcaaggaggctgcaaag

SEQ ID NO: 100841 - DNA, 439 bp, Mimulus guttatus
  Intron number 1 from transcript mgv1a014770m (locus mgv1a0 14770m.g) derived from phytozome v7.0 (chr-ID scaffold_9; pos 3082285 to 3082723)
ttcgaggtagatttcgtcaattgtaaaatatcaaggtgccaactaaaaatcaatactattgccagggtgcaaaacgcaattttacaacctcatttaaataataataataatccgacacaaacacgaaatccagccttctacagcaaatcaaaaataagacaaacgtaaaactcacacaaaaacacaaaacctttctctctctacccctctctctctctctctctctctctctctcttctttctctctcttcctcaaatatcatcagtttcaggttttttcatctgaattttcattccaatttctgtagcctctactgattattagtacataatatacactcgtcgtttggtcaaacccctagtttgacttttccttgttcttaattgcccaatatatatgttagattcctcgaaattcacttcaaaagattgggaaatt

SEQ ID NO: 100842 - DNA, 525 bp, Mimulus guttatus
  Intron number 2 from transcript mgv1a017436m (locus mgv1a0 17436m.g) derived from phytozome v7.0 (chr-ID scaffold_130 ; pos 412387 to 412911)
gcatatacgctttatctcttttgcaatttttacaagtaatattattgtttgagtattatacatcactgattagacgctatctcttttgcaatttttacaagtaatattgttttttgagtattatacatcactgattagacgccgctacgataatttaaaggttatttgaatatcaattgcttgacttctatgctaccgtgtttattgttaaatcagttattgtattttctgaaataattataccatatgttttatatgatttcatttaattttcatattacgttttgcttttgcattttcttctttgtaatatttaattgtatgtcatatgttatcactttgcgttaaaaataaagtttatctttctttgaattccttttattttgtgttgcttgaattaaatttgttacaaagagataatcactatatattttctcatcttaagcttaaaaaaaaacattccacaagtaaatatatagtttcattaaaggaaaaaaaaaagaaactcaggatgaatcgaaggtg

SEQ ID NO: 100843 - DNA, 985 bp, Mimulus guttatus
  Intron number 1 from transcript mgv1a010425m (locus mgv1a0 10425m.g) derived from phytozome v7.0 (chr-ID scaffold_3; pos 3851220 to 3852204)
ggtcaactaatcaaagtttcgacgaaaaacaagtaagaagaaaaaaaaaatcaaatgtcagctagtactgaagttaacgcttgggcttatctagtaatcttagacaaaatatgaggcgattattttgagaattcatatttatgtagccctatttgaaataaaacttaaataatgagctgatttgtaataaaactccatcccatgggcctatattaatttttcaccctgaaaaataatgaacgagcgaggacctatcttatatataaaagaaagaaacgctcggcaaccctggaaaaccttaatggtatttctgtaattaaatattttaatatttttttctctactaatttctaaatataatttttaacaattattaaaattgaaactaaatcctgaataatcctatctaatggtatttttgtaactatttatttataatattttttgtctagtaattttttaactataattttcaacaattatcaatctcctatttttcatcaatatatctcaaattttaacagataaaattttcatcaatatatctcaaattttaagagataaagatagaaattcgattcgttaaatcttaatctatatatttggattataaatcttaatacgtaagagttaaaaaaagtaatgttatataaaatatgaataatactacattattaaattttactatgttagtatactatattttcttattatatattaaattgatatttttttcacttttaaaataatatcccgtgcatcgcacagggaaaaaaatgctagtttaaaaaaaataaaaattattattttttaatttttgatttctttaaaacagaatataattccaaggtcaaggtgctgactagttgcattgcatgtagtacctcccacataaatagtagtaccttcttcacccaatactccacgccagtggcacaactgtaaaatagttccctccatatttatcgattcatccaatttctct

SEQ ID NO: 100844 - DNA, 667 bp, Mimulus guttatus
  Intron number 1 from transcript mgv1a007136m (locus mgv1a0 07136m.g) derived from phytozome v7.0 (chr-ID scaffold_102 ; pos 644307 to 644973 reverse strand)
tttctctactgaagccattctgctgcatttgttaggtatgttttttaaagctttattactacattttaagttaaataagaagttgtaaaaaaaaaaaaatagtacatttgtttcaagaataagtagagacaggtttttgaggttgtttgttgtccccatttcaacttaaatgcattgctttttcctcaatgtattttcttgatctttcacacatttccatcaaattgagtagagatagggttttaaggttgtttgtttccttgtgtgcaactatgtttctgtgattcttcagtcattactcgaaacccaattttacgtgtcgttaaaaacatgcctagaaagcaagataatgcatgataacataatatttgcgggcgggtcgacccgataagttattggaggttatcaaacatgaaacaaagtccaaatgtttagttaatcacggctaatctccccaaccaaacaaggcctaaagcagcattttgacacttttgttaatcttcttgtgtggggaaaaaagttgcggaagaaaaaaaaatgccgacttaatgaagaatcaagaaatctgtaattcaaatattcgtgtgaaaaaatcgatctgcatataagtattgtatgtatttaattattggatggtgaaattttcacacgcagggtgaggtgaaaa

SEQ ID NO: 100845 - DNA, 563 bp, Mimulus guttatus
  Intron number 3 from transcript mgv1a018845m (locus mgv1a0 18845m.g) derived from phytozome v7.0 (chr-ID scaffold_79; pos 803820 to 804382)
cgggactcggagtagcctttgaagatctgatccaggtttcttttttaatttctttgtgttcatatttcttttccgtttgaactatttgccgtcttatcataatatgttttcacgatagtatcgacatgcttctgagcagatttagtataattgaaaggggtggatgttggagaggggggccacggcccccctaataacacactactggaaaattaataaatgttaatgattttgagaaatattaggggggccatggcccctccaagccctacactgcctttttgttgcgttttacccaatagattggaaatgaattaacctagtttcttaacctcaaaatttctcggccaggcctcactacattatgtgcttataactaactatttgtgaaactcaaattattaagctctaccaatgacaaagctaagaatatcaacggcaaatgtttttcaagaaatgtttgcacatgcaaatgatttacgttttttccaatccaaagtttgactttgtggtctcgatggtcaacaggcaggaaatataggcgtcttgcaaggtgcagaaag

SEQ ID NO: 100846 - DNA, 962 bp, Mimulus guttatus
  Intron number 2 from transcript mgv1a003877m (locus mgv1a0 03877m.g) derived from phytozome v7.0 (chr-ID scaffold_104 ; pos 51012 to 51973)
aattacaagactgccatcactctatatctcaacaggtcttttttcttttcttctttactgttcgaaatgaatttcgatttcgtgtttttcttcaattgattgatgcttagaaattgaaaactgtcggtgggattgaagctgtgtgtaaattacccagcctgaaatttattgtaaaattcatttgaatctgcagtcgacactcgataggcaaatatcagattgatgaaattaaaaaaatatatatatatttgaggatgatgatacagtgccaaatataaataatagtttgcctttggtgttgattttagtgaaatattaaacggaaaatcatacaagtacagatttttagtaaagtgtattgtttgtattcagttgactttgtggaagatgaattgataagggttctgaaacagtgaaactagattttggttagctaatatgttttcgatcacacttgagccgataattaactgtacgtaattgacgaaatttgcatctcccttttaaaggaaaaattagttgatcatggttgttacacaagctcgatagttgctacacagcttcatcgatcgaaacgagctatttgtttttatgcagctcttcagcggctttgcctgcaaatttgttttcaccaaatgccgtatcatttctttttttacagttttctatcgttctagtgaattcgttttcttcctatctttgtgttttacttcgtatttattctttcgaagaatttcctttgtatcatattgctcctgtctttccgacaaatttgaatgtaaagtattagagtcctctactttagtttgcatgtattaggtaacgaatatatgatctgaaatttgttatatttcccgtcgagaaagacaaacaaacattgctgaattcattctctcaatttgtttgttcatttttttccccaatcagagtgagaaagaagaggagagagagatccgacacca

SEQ ID NO: 100847 - DNA, 481 bp, Mimulus guttatus
  Intron number 4 from transcript mgv1a012680m (locus mgv1a0 12680m.g) derived from phytozome v7.0 (chr-ID scaffold_7; pos 146145 to 146625 reverse strand)
caaagaagattctgcagctattgcgtcttcgacaggtcaagatttacattattgtgtgttattataattgttcttcgaggcacctatctggcaggatgagcactattactctttgaatgtcttttcctttgttgatggaaattggaagaatatttttttactattgcctatcaattctgtgatactggttaaaaatggtagtgtctccatgaatggtttgttataagtactgcactatacgcttaattcattttttttggtcatgttttaataatcttgtttggaattgtatgtgcattaggcttgctaaattagtggtaacatgtatgtctacatactgtggttttgatatggcattcatttgatgttatatatagttagtactccaattgcgtgtttctttccggaaattaatttaatatcattttattgtgacatgaatgcagatttttaacggtgtgttcctaaaagttaacaaggc

SEQ ID NO: 100848 - DNA, 683 bp, Mimulus guttatus
  Intron number 1 from transcript mgv1a012680m (locus mgv1a0 12680m.g) derived from phytozome v7.0 (chr-ID scaffold_7; pos 147122 to 147804 reverse strand)
acaccaccaccgccggatcttcttcaaaccacaccgtaagctcatttcattttttccatttccccattttcagcatagattctatacgtgtgttcatatatctacgcatgtatgtgtatgtttgcttaatttcaatgtacggatgtctgttcttcatttggtcatttgttttttggtaatgtgtaatctattttttataacgaaatgaaattgttagatttatgaaattcggtgttagtggccatgggagctctgttcatgcatttggaactaatctattaatatatttaaattttaatgtagctatttttaatttcatggggttttgattgttgatgctggccatttaatttgtgttcggatcctggtttattgtaatgaaaacgctgagaaggttgtttcactgtccaactcatgtagttttatgctttatatcttaatgtattttatttgccacttgcacttccttgctggtaatcctaaagctatataaatcgggtaggggaagaggaaagaaataagtcggtaggatagtttaacgatattttgaaacatgtgtatttgaagatatagtttcttcatggatatgcttgtatatcagtggcattttggttgttatatttttaatcaaatatcgattttttagaaaaagtaatcaatttttggttatgttccttgcagta

SEQ ID NO: 100849 - DNA, 658 bp, Mimulus guttatus
  Intron number 1 from transcript mgv1a000544m (locus mgv1a0 00544m.g) derived from phytozome v7.0 (chr-ID scaffold_266 ; pos 66651 to 67308)
attctgatagtggggtatgtctttattttctttttgtggatttgcatttttgggttttagttcttgaaattatttatttaatttgtttttcgtttttctatttttaattgtgcaattgggtttagatctgattgatagctgatagtgttgtagtgattcttggagcataaagtttggatcttgatgtggtttgagaaatgggttcggtcaattttttcgattttgagcaaatttatgctgtttttagatctgtgtgttggaattggagtgaaagagcttacatttaatatgggatcagactaaatagacttccttttgactaacactactgagatcttcaaaggtttattttttgtgtaatggtttgactgatttgtagtttctgatttacatgaattggaagaacacccaattctcgaatcatatgccgattgcccccgactctttgtgtaaactcttgatgatgtaccctcatttgtatatctcatcgatgattgtttaactttctttgattaagtttatctaaagtatttaaacttttgatatggattaaattgattcactggatcgtaacgaagggaaatcttgagaatctatcttgattcagtgttctatacattgtgcagccgaagcccttgaagaatataaacgggcagat

SEQ ID NO: 100850 - DNA, 348 bp, Mimulus guttatus
  Intron number 1 from transcript mgv1a020234m (locus mgv1a0 20234m.g) derived from phytozome v7.0 (chr-ID scaffold_1; pos 3888322 to 3888669 reverse strand)
tgttgctgctgcaacggccgttactcatccgttaggttttcttcatctacttagcccttttatccccgattttgatatatctgcttaatcttcgtctatagcctttgttttctactaattagaaaagaagtatactgaagagttggtagcatagcaatattgatatgaagaaaaattactaaagaactcattatcgtatttggttctttactaattgcattcaaattatgcatgctactttttaatttctgtatgttgctgcttattttagatcaccaactagtaagttcagtttgagatttttgaactttgctgtgaagtatgtgattcagtttatattggatacag

SEQ ID NO: 100851 - DNA, 854 bp, Mimulus guttatus
  Intron number 1 from transcript mgv1a011783m (locus mgv1a0 11783m.g) derived from phytozome v7.0 (chr-ID scaffold_79; pos 962848 to 963701 reverse strand)
agaaccaacagcagtaaacagtcagtttcagataggtgagttgtttctgattatgattatctaggtttattattcgagttttcttatctctggttgaagttatatatgtgtttatctgtcttgctagtaactcctcttgatgtgctttgattttaatcatcagctttgtacgattattatatctcgttttgtttgattttcagtctcgttgcccttgattggaacctattcgcctagttttgttaattgtctatctgtttagtaattcgagtgagctgcggtcggaaatattagagttgtagaaaatcgaaagagttggagtttctgcacgaatatactccaccatccatattagctaaactgtaaaaagaaatagaagaatcctatcaatttatataactatatatataagaattaaattcaagaatggcttatgtagtcctctttcttgttgcatgctcactgtattaatgtttctacagtatgtcgggttattacttattagctatcgaaaatggatctgtagactaagatataaataccataacgagaagtatacgtttttctgctctctggtcatggaagactcgagcgctactttatattagaagttaataacgtctagatacataatagaatcattcgtaagtggacggaataaataacattgcgactgattgtcattatagggcaatccgagttcttgtaaagcaaatgcaagaatcggaaacatctgatttcccaccatgatatattaataacatgctctactattctttaggtaaaacgtgtttttgttcgggtctacttatatttgaaactgtgtttctttgtcttcttgggaatttttctag

SEQ ID NO: 100852 - DNA, 765 bp, Mimulus guttatus
  Intron number 1 from transcript mgv1a019295m (locus mgv1a0 19295m.g) derived from phytozome v7.0 (chr-ID scaffold_39; pos 77822 to 78586 reverse strand)
agcgccagatttctacccctgctcccggcaccagtgtacgtttttcttctctctggcttttattttaatttctcattttctcgttattttttttttcctgttctggattaggtttagcattttgaaatttagggctagatcggttcgttcgactgaattagggctcgtgtttcgtgtattgggaatgctttatttggaatttgggtttaattttgagttaggttctggaaaactaactacagtataattgctttgaaataattgattttacaaagttgtgtgatgagggatgattataattaaccctattctactactacattgccgttacgaaatttgtatggttatcgagtgatttgagtttatgttgcccgtatgcctctgcagctgaacacatggtgccaaatggatagtaggtacataaacaaaacccgtgtcgtaagctttagtgaactcggagttagtttttagaatgatgaggaatatgcatacaaatgttgatgtatgaatcttgggtaaaaaccactttcttgttatgttaattttaaggggcgaatgtggaatataaagaattcgtggtggatgagcttcaaaatttcgttacgcaggtaggggcagaattggaagtttgaactatgttggaatcttctttgatgaaacacaacagattagcatattgagcttatagttatactatgccattgttcatcatttttactgactctcctaggttcactgtgccagaagattttacgagaacatagt

SEQ ID NO: 100853 - DNA, 448 bp, Mimulus guttatus
  Intron number 1 from transcript mgv1a002996m (locus mgv1a0 02996m.g) derived from phytozome v7.0 (chr-ID scaffold_207 ; pos 70156 to 70603 reverse strand)
ctgaaggtgtgtttgtttcttgttcaattaattgttttataatttattattattattcttcttttttttctttcgatttctcggtttggttaattttattgtaatgaatttgcacgttgacttcagctgagttcagttttttggtcaatttctaggttaattcaagattagggattgtttaatgaatgtgtggcctttatcaattgaattgatgattgcaattgaagcatatcttgtagtaactctcaaccatgaacagtgtttttatatataattcttttttttttttaattttgctttttgttttgagctgaaagttgaaaaacggtatgtataacggtgaaaaaatatataagaaaattgttagtttaactagtgtctgaaaaattggagtttagtgtaataacaaattttatatgtgtgtactttgtgctaggcgacgcgttga

SEQ ID NO: 100854 - DNA, 644 bp, Mimulus guttatus
  Intron number 1 from transcript mgv1a004376m (locus mgv1a0 04376m.g) derived from phytozome v7.0 (chr-ID scaffold_164 ; pos 428836 to 429479)
cctattattaaggtctttcaatttctctctcttcttataattcaattgcatatctcgaacatggtttgaatattttttactaaggtcaaattacgaaagtacccctcatgtttgggtaatgtcaaatttagtggaatattctccagtttgtactcgttttacctgattcgacttacacattttgtaagaagatgatcataagatgtgtctcttggtttgtaaatatcagattgtgttgcgtcagactgcatttttgcacaaaatttgtacttgtacaaagtacagaagataccatggaatctagaagattatgttgaatttgacatcataaaagggtggacgtgtaagaagattcatagttgaggggtggttgcaattaccaaaacctgaggggttttttcgtaatttgacacgtacctaagggagtggcagtaatttacccgctaaacgaatttacaagatacaaaccagaatagagtttgcttcctattagaatccatgtatgaatatattatcagtttcggtccgctgataatcgacttatttattgatttgagttttgaatatctatggacaattaagaattggggattgggattaaagataactgacttcttatatacacactattttaggttggaaga

SEQ ID NO: 100855 - DNA, 922 bp, Mimulus guttatus
  Intron number 3 from transcript mgv1a005402m (locus mgv1a0 05402m.g) derived from phytozome v7.0 (chr-ID scaffold_28; pos 562686 to 563607)
ctcttaaggattttcaacaagtgggatttcttcattttgttgttgttgttttttttttttttttttttttttttttttttcctttttaatctgcttgctgaagttgtgataatattttggtattgtttttactaatattttttgtgtgttggggtatctatggagttgcatgtgagaaatttcagtctagatggcaggatatcatatgcattgacagtgcaaaaaatgaaaaagaaaaaaaagtagtatatgactttgtgtatgtacgtttgtgtcgtgtgccctggctaaatattgtatgcagtactacagaaaaatacgactcggtcgcccaataagtattaatgtaaccgacactaacattctacaaataaagtagagaccatttcccttttttgaataagcaccatgaattattagttggccttttaatgctttgactttggataagtgcttctgctttcgtttggccaccatgtttagcatcacgagaaagtttctaagggttttttatacaatgatttgaagttgaaatatctattgctttgtccgcatttttttgcttatctttcatctttagtttggccttgtgtacacaagcctaatttttgcatacaagtccttcctttgctggtttattcatgaaaacctacttgacaaaatagtctgtaatgcagatggagaaccattcagctttgtttagctcttttataatttattctgtacttaacgttactagtgtggtctcgtgcggaatcccactcgtgggatcttacatgtttttaatgttcttacgaaagatcttctgcttctttgtatgaacttcatatatttcttttgagaaataaaaaaaggattttatcctattgatccatatgtaactatcgacttcttgttatacaggtaaaaagaatttgtccaa

SEQ ID NO: 100856 - DNA, 803 bp, Mimulus guttatus
  Intron number 3 from transcript mgv1a008884m (locus mgv1a0 08904m.g) derived from phytozome v7.0 (chr-ID scaffold_278 ; pos 74202 to 75004 reverse strand)
ccaggacaacattcagccgtgtattactgaactaggtagttttattggtttaattacagatgtttattgctgataaatcctcgaataccaataaaacgttactcagctcgcactaacactaaaccgattaaatcttagggtcattatattagctattcgatttcttgcagttcaagagaatcgaaatatgagttttgatttgcttaaatctcaagtcttacagatttcgtccttcgagcacgtagtgtgattccccagtcgaaaatataagattatttttttaaccactcttgtttattttctgaactttcctcttaatattaaattcacgtgtgccttacggagctagaactcatattttcaccgtcatattgttttacttgtagaatattgttttgatttgtccttccaaattcaactgtagagtgttgaagtacttgcaatatgtgtccaatcatgattagatatatattgaaacctaattttcaaatgatttagattaatagaaataactgctccaggaatagcaaataggtatactatagttcccagtattatactatcatacactcttattcaaagatgaatcatccgtttgctcttctattagaggagtattgccaatcttaatgtttggtttgtccacaaatttcatgtctcgcttgtcttgtgcttttttcgtgtcttgtaagaatcttggggttctgtacgtttacattttacacgcatatccctccagttagtagtatttgctgcttgattttccagtttggcagaggcttgaagaagaaaatcaagaattt

SEQ ID NO: 100857 - DNA, 432 bp, Mimulus guttatus
  Intron number 1 from transcript mgv1a026634m (locus mgv1a0 26634m.g) derived from phytozome v7.0 (chr-ID scaffold_130 ; pos 777257 to 777688 reverse strand)
atcgtacgacgcgttttttgactttgtaaatatcagactgtgatgcatctcaatctgttttttctgtgcacaaaacgaatacaaactcaagaacatttcacgaaaactagaagattttattgaatttgacaccataagggaggacgtgtaaaataattcataattgacgaaagtaattttaattacataaacataaatagattttttcgtaatttcatcttacctcatggatgatcgtaatttaccctaaattcagtcggatactcatctagatctaaagtaaattctaattttggaagtgaaaattacgttgtgatgtgtggggatcaattattgacactatagtagtgagaattctgtaccaacttgcatgaaaatggagaattctgatgcgaagccctcctccactccatcttctccgctgcagacgac

SEQ ID NO: 100858 - DNA, 605 bp, Mimulus guttatus
  Intron number 1 from transcript mgv1a010583m (locus mgv1a0 10583m.g) derived from phytozome v7.0 (chr-ID scaffold_1; pos 1154687 to 1155291 reverse strand)
cattccgtacgaagaaattagccgcgaggcactcagttagtgctgctttttctctttggttttttgttcgttttcaatatgattcatgtttttgtggtttgacctctacttccaattaaactgattcatttttttacccgcagttatttctgattatgtatttcagtttctggaacttcgttgctttattttgtgttttgttttaaaagtgccgatcacaaatgctggcaactataatcgagcttgtattattgttctcgttatgaatggaggaacatacctcttttggatgattggatatccgattgccattctatatgattagcttgtgtttcttttctgaattttactttatttctcatggaatcatcttagaattgaccctgttaatcttggaattttgtcgaggatagaaattattcaagagattcacattttttaatagggtttgtcatatgtaattagtaccaaatctatgaaggataaccttttattgttttgctattgcccggaaaagctttttgtgagtgaaggtatgcattcaaaattctaaactatgtttgttattgttgccagtgtcgttgaagccagagctttttgaggga

SEQ ID NO: 100859 - DNA, 421 bp, Mimulus guttatus
  Intron number 1 from transcript mgv1a016111m (locus mgv1a0 16111m.g) derived from phytozome v7.0 (chr-ID scaffold_40; pos 675355 to 675775 reverse strand)
gctccgtttgggctcagagctccgccttccctcaggtttttctcacttacatctttcaatcgaatcaaatacacctccacaatgaaaaacgttcttgcacgaaaggcgaaatcctctggcctgacaagtttaattggaggatgtaaatcatgttgactcaacagcccgttaggatagtggacccaatgaaacgtactattgattatatatttatatctattgtatgatgaaatgatatctcgcgtatttcatcagatgtagaatctatataagaagaccttgtagaacatatggaatcataagatttagtattcttttttcttttttaaaaaacgacaacccttgtttttctcgcattatatttatttatgtcatgggaattaatatatgatttgtttgagatgaatgcagttgaagcccg

SEQ ID NO: 100860 - DNA, 716 bp, Mimulus guttatus
  Intron number 2 from transcript mgv1a017126m (locus mgv1a0 16230m.g) derived from phytozome v7.0 (chr-ID scaffold_7; pos 2430252 to 2430967)
gggtatgcatttctgattaccaacataccctaatatttttttttataatgttctggtattccatttaattcggctttggaattggatttctatcagcttttttatttgtgtttttgtttggaaaagtaagatttttttatttgctgataccatttttgtttcttatatttgagattgattattcttatataggtgtttatgcgtttgttgtgtttaagtttatgtgctctaggaagaaaaaaaatgcattttcttgagagaattgtattcgattgagtgctgattcggaagttggatatgttgatttatcggagttggtattcggagtttgatttgtcgttttaattcgatatctacttgtcttttatagttaagtttttcaagtacttccgataaattgttgtcgcacgaattctgcatctagttattttatttaatgaatttgaagccatgctgatgtccattcttgatgtccattctgcttcttcgattacaaatgaaatgacaaatatatccctctattttggtaacatttattattacgcatggacaaatttggaaattagaaaataatctcaacgtctaatacatgctatcaaaatgtcggtttttgtcgacatcaacgaacggatatgattgcttctatcatgtagtttgactatatactgttaattggaacagagcagtgtttttcttgggtgtgctactaagctcaa

SEQ ID NO: 100861 - DNA, 537 bp, Mimulus guttatus
  Intron number 1 from transcript mgv1a009075m (locus mgv1a0 09075m.g) derived from phytozome v7.0 (chr-ID scaffold_305 4; pos 3823 to 4359 reverse strand)
gggccttacggacccgcttccactgattttctaaggtacaagatacacattaatttcaaacacaaactttacccgattgtacacttagccggttttaagggtgaaatcggacagatcgaatcgaaatcaacattttcggaagaaaatcaatttttttcgaagtgaaaaactaattttaattttgttaaaaaaaacatcggaatttcggaaattgtaatgaaaaggctgaattcggaaaattccaactttttagtcacttcaaatatcaaaatgcataacaatattcatattataagtgtaattttcggataagaaaaaaatcggagttttcaaaattacttttgaaaattgaattggatcggaaattggaatctcctatatattccaatttcgataaaaaaaaatcgtaaaaaaaaaaagaaaagggaatcggattttcagaatgaaaaatactgttccaaaatcgaaaaatttcggaccagaatcaacgaaaattaacaacacgttctgtttctatataggcacgaccttttggta

SEQ ID NO: 100862 - DNA, 374 bp, Mimulus guttatus
  Intron number 1 from transcript mgv1a026299m (locus mgv1a0 26299m.g) derived from phytozome v7.0 (chr-ID scaffold_1; pos 2554856 to 2555229 reverse strand)
ggtcctaaagtaaggggcatcatttttaaaattttgttaattagcattgttgaatgtgattatacgatagctaatttctcgttcatgattttacttatgtgttatatttgttttcaatcaagtcctcaaagtgaaacttaatctttggctgttggttgttgcgtcacattgtcgaacgtagtatttaatggtaaacttgtgaactttgaaaggtttgtctaaaattgttggttgaaggttaaatcagatgtatcttctgttattgtttgtttgattgtataactggttgattatgttttttcttttttttttggtttcttgtttcatttcttatgttgttgtttcaatggtgttttcttgcgccaagggtcgta

SEQ ID NO: 100863 - DNA, 573 bp, Mimulus guttatus
  Intron number 1 from transcript mgv1a015227m (locus mgv1a0 15241m.g) derived from phytozome v7.0 (chr-ID scaffold_102 ; pos 670967 to 671539 reverse strand)
gatcgagagctcatcgtcctccaaattcaggtacttcctgatttcttttcttcatgttttttttctggaattcaattgacgtattacccattcagttaattctccgttcaattttatttggcgattgcatattttttcctgaatgtacaacgattttctgtgttcttgacggagttgtacttcccctctgcttgttaagcatgattattatctgaaaattagggtttattaattcgtgtgatagtattcttgtcacatttagatcatttgccactctgtgctttgctttttcttttggaattatttgggggttttagggttggggttagattttgtttgttcatctgttttaagtggtgatatgctagtatgttttatattgatctcgtttcatgttacaaagaacaggggttggattgcaatttataacgcaatttgagtttactcgtatgtttgtcggttttattaaaattggcatctgatgtttcttccgatcttgtaacataattcttacctcaattcgttgcttgctttataggagttcattggcttggcttaactagcgctgtggtt

SEQ ID NO: 100864 - DNA, 368 bp, Mimulus guttatus
  Intron number 1 from transcript mgv1a018103m (locus mgv1a0 18103m.g) derived from phytozome v7.0 (chr-ID scaffold_13; pos 1899745 to 1900112)
gtgtccaaattgattcggaatttcagcgcgagaaggttagatttgaacaaagctttctgctttttaatgtggtgaaaccgaacgattaagggttttttttttttttttaatacctattttttgaaattaaactgctgatattctttggtgatatgatgctagctattttcttcaattttgaactagaaataatatctggtggggatttttatttatgataagcaaagggtgagtataatattttgtttgattgctgtactaagagatattttgtttgttattatcttgtttgattgttgtactaagagatactttgtttgtcattaaattgtttgattgacagtgtgcgaagattatttttgtgggca

SEQ ID NO: 100865 - DNA, 986 bp, Mimulus guttatus
  Intron number 1 from transcript mgv1a002296m (locus mgv1a0 02296m.g) derived from phytozome v7.0 (chr-ID scaffold_2; pos 2853008 to 2853993 reverse strand)
gaactcagactggcaccgctgaaggctttgccaaggtatccctattccctatcactcatcatcaaatacatgctgatttctgtttatgtgaattttaaggatttcaaattctagttctgggagattggttgatttaatccccaatttgattgaggggatggattgaacttctgaaaaggatgaagagtgctagtccatgctcaatcatgtcataacaaactcatttctctaaattataccccttttatttttcggttattttttgtggaaccgtaattcgaacctcggagatattgatctctatctgtataaacgatctgttgatttcttgttggagtgttatttattcgggctactgttgatttaggacaatgcttgtacttaaatcgtgtttttagtatgttttttttttttatcataagtgacgaggcgaggttgggaagtgtgtaggaggcatccatgattttatttatttatttctttttgtggacaatttggtcagaatgtaagtttgtacatatttttttgacagttaaggcatgatagtcattttacttgtatataatgtagagatgtggagatgtattggaaaaaaaacagaggtgaaaattttgttagttacacacactcatgttctcccaagggaggagaaatagagtactttgagtgaatgctgtttgtttgggatgagttgaggtgatgctgttgggtcgtgaaacttttggcaagaatgctatatatacggtcttgaccttctaattgtctgctgacataactatagcctcaaaagttaatagatttttgctgaactaaaagtgagtgcaatgcaatctgtaatttttctggatattaagaaaggttatatctctacgttgagctgatagcactgttaaaattattttgttccatctatgaggctaatcacaatccttgtaactgatatgatatgctttgttaggctctagcagaggagatcaaagcaagat

SEQ ID NO: 100866 - DNA, 562 bp, Mimulus guttatus
  Intron number 2 from transcript mgv1a025659m (locus mgv1a0 25659m.g) derived from phytozome v7.0 (chr-ID scaffold_80; pos 1062256 to 1062817)
gttgccctttggctctacaagaaaaactagtttctgtgaccaaattctcagcgaccataactaaatggtcactgaatgttcacatttagtgaccaaaagtaattttgtagcaaaagtgggaaaggctaaatcttgttgcaaccagcgaacatttggtagctatatgtggtcactaatagttagacatcttgtagcaactaatgttaaagtttgtagcgacaatttctatggtcactataacttagtgtcaatagtgaccaagttaacatcaattttttttacggttactacgagtctttaatttaattattagcaaccatttaattgagttgctagaaaccacttgaatttggttactatgaaactacttacggaaatcaaatcgatttggtcactagtttagtttttaaacaaatcaagaaaagaaaagaaaataaaataaagatgagggcgaaaatgcaaataataaaaaaagtacagccattgatcacgtttcttcatcacaaaatataactctgtttaccaaccctcattaggagagttggtacctagcctttactaa

SEQ ID NO: 100867 - DNA, 863 bp, Mimulus guttatus
  Intron number 2 from transcript mgv1a008919m (locus mgv1a0 08919m.g) derived from phytozome v7.0 (chr-ID scaffold_2; pos 1853341 to 1854203)
atcgcgctaaaggtaaatcctggaatatttgctttattttttttaattggttatcgtttcgtggagcatttcctgatatatgttttgaaataaaataaaataaattaaattattcagcttaaaagactctccgccaagatattactactaattgattgtggagttattgttcaatggcttgattttggtattaaattgatttccttgtgttatgcaatgctttttggtgtttgtatctattttcagtttcacccttattagtatttttgttcaaagaacaaataaaaattggagtattctcttccttaatgagttgcaatataagtctccaatcagttccttaatgattttactggcaatactatcgttttgcttaatttcggttgtactcggtgagatcctttcacgtagagtagtttgaaggttaaatgaaatgtttggtggttttgtacgcatccacaacgcgttgctcgactctatctggctggagagtgagatctctaagtacgcgtttttataaaactttgcttaactctcgctgacaccatcttcgaagaatcaattgccatacatcatcactcatctcaaatttggtcacagtttcctaaatcggcatatgatgattctaagttctaaatttgatttaagtccccttttttatgaaaactgaaaaatgaaattcaggaaaagcaatacgattcacaaaaaaaatcctttgatgaagaattgattgtttttttcttgacgcacgtactttaaaaactcttttggtttaagaggttgtcttgtttttgttcataatacctttgatggtgcagtgattctttcatttaaatccacttttttctgtttatgaaacagat

SEQ ID NO: 100868 - DNA, 376 bp, Mimulus guttatus
  Intron number 1 from transcript mgv1a001022m (locus mgv1a0 01022m.g) derived from phytozome v7.0 (chr-ID scaffold_45; pos 474862 to 475237 reverse strand)
gcagttgaaggaagtaatctcgccattttttgcaggtatatttgtttactgatatttttgctcagcttttatgtaatttagtgtttttctgtaactgttttctactgcgttgattgctgcaatttctgtacccgaggttgtagtgtgttggtgaatttttatttaatttagtgtttttcttatctgggttattctgccatgttttccggaactgttttttactgtgttgattgctgcaatttatgtagctgaggatgtgtgtgttggtgaatttctaattaaaggggagatggtgtatggaatttgaatttttgttttatgtttttttattaattttgtagggaattgaaattaattttgttggaattatacggat

SEQ ID NO: 100869 - DNA, 950 bp, Mimulus guttatus
  Intron number 1 from transcript mgv1a001636m (locus mgv1a0 01636m.g) derived from phytozome v7.0 (chr-ID scaffold_62; pos 950044 to 950993)
cattcgacgagaaactttggtatcgaatcgccaaggtgaattaaattaattagtcctgaaatataatacatttaattaattcagcattattttcttttgtttgattatcaatcagtacaccaactatagataaggcaagtcattcaacttatgggaccagcattttatggtcacaagttcacaactcaaaacttgtatcgtgagcaagttttatttatttaattttagtattatttttttagtttctataatatgatttatttttcaatagcaagttttatttatttaatgttagtattatttatatatatatatatatatatatatatatacatattttttatgtgtaaaaaaaatatttattaatttttctatatattgtttaaaaaaaattattcttctattgttttttaaaagaaatatgtttctatttataatttttaaaacttagtttaaaaaatataaaattttaaatatttattttattcaaacagaattattgcatacttctccaacatttcctttatagaaaaaaaaattagatatacattaatattgataatgaagtttatattaatcaatatttatttatataatgtcattaaacataatgcaaaaaaaaaaaaaaaaaaaaaattcggggcactgccccgaaaccctatactatcaagggtacaatttatattctcgccccggacccccaaatacgcctgccgcccgggtataaggggtctatttgcattttacacttaatcaacgcaataaacactatttttttttttcataaacagaggatttagatactatttgcatatcataataaagctatatgaatcattctctacacagctaaatatcacacatggaaaacattatgctaattttctaacacaaacgagtatgcgtactttgaaggtgatcggaacggaggctcgagcaatatacaacga

SEQ ID NO: 100870 - DNA, 358 bp, Mimulus guttatus
  Intron number 1 from transcript mgv1a001528m (locus mgv1a0 01528m.g) derived from phytozome v7.0 (chr-ID scaffold_2; pos 3326606 to 3326963 reverse strand)
cacttcttgagtacatatacacaggcaccaccaaggttagttttgtaattttgataaaatatttgatgtatgtttacgattatcattctagttttttcttcacctaaaaaggtagtattgatggaaataaatgaaattgcatcattatctgctaaaactgacataattgaagaaaaattaatgtgtttggtgattttgagaagtttaactcagaaattgccaatatctcatttatcataatttacattaaaaacataagtatttacataaacttcgtgaatcataaaatattgaactcagttcatatgatactgctgatgtaggttccagagttgcatctcagttctttaaaatctct

SEQ ID NO: 100871 - DNA, 896 bp, Mimulus guttatus
  Intron number 2 from transcript mgv1a014626m (locus mgv1a0 14626m.g) derived from phytozome v7.0 (chr-ID scaffold_106 ; pos 421211 to 422106)
gaagcaaagtgctggagaattacgtcttcaaaaaggttttttttttatttatttattataattattttagtgcttttgaaattctcttattagtgcttttgaaatatggatgtatggataaagaagttaagagttgttagaacttgcgtatgggtagtaaattaatttccaattcttaatttgatcactcgttctccttgaataattagtgccattatatccattctccgatgtgctaatgtacaacagctattactcttttcccatgtcactctttgcttaagagttgtacacaaattcctattccaaattgaaatgtccaacgatccacgaaattccgtttcttaaaatcctatcccgagaactaggatgctcttgaatgcacatcccataattattttctaactgtgtcaagtgtcccactaaaaatacacgagagtttgttaccagttctgcagatagggtccatttatgaaatgttgtagtgcttatttgtgacgagaaatgttgtagtgcttatatgtcacgagaaatgttgtagtccttatatgtgacgagaaatgttgtagtgcttatttgtgaagagaaatgttgtacatgttatttcaatagtcaatgatccccctgcaacattacttctctgtcttattgttgtgtgtcctgttaaaatacacattttaaaactcaaaacatggtatgcatctttcctgtaatagtcacaattgtcatgtacatgcatctttctgtatctatatccacatatgtttatacgtcttatttctttagtgtagtacttcctttgtccttgagccttataaacgattacccgcttagcactaacttctttctttgcctcataataatgtagacattagtgaactcaacctgccaaaaac

SEQ ID NO: 100872 - DNA, 885 bp, Mimulus guttatus
  Intron number 2 from transcript mgv1a015367m (locus mgv1a0 15367m.g) derived from phytozome v7.0 (chr-ID scaffold_258 ; pos 116098 to 116982)
atctcttccagaagggcgttgactctaagaaactcgtcagtactcaattttttttttattttttttattttcaatttgtgatgattaattagttcgtcttcatattaattttgtttttatttatagtatttggttcgtgtgttggattatgttgattgtgtgcatctgaattttgtatcctagggctcagaattcttatatgcagtgttagggtttgaatgtgtgtgtgtgtgtgtgtttgtgtgtgttttgctttctgttgacttttttttttaatattgatgatgttacatatgaatttaggattgaaaattgaatagttgattaattattccttcatctatggataatttaatactgtttatgttctggctgggtgattggatggactaattcacattgaattatttaattagcttgaatattgaataaaaccctcttttagtttgatatggaagctgttgtttatttcgttgagagaactttaggtttgatttattacgtaaaactaggtttatcgcccgagtaacgaagtaaactccatgccccgtagctagtcctatgcagatttatttcttagttacgccgtattcgcgtcccaaatacgtgtgccgttcgtacgtaggggaataaaatgaaaagattggatttttatggtttacgtggcgaacaagaaaaagccgatttttacggaaaaaaacaaataagaatgttccttaatagtcgcctcctcgctccaaatggattggcaattcttttgtatatgtatttccagcagatttatatagcctttgttccgtttttctatttttactttgttgccttttataaataagtttttaaagcaaaaacttgtaatcaggtggtggtagatttcacggcttc

SEQ ID NO: 100873 - DNA, 536 bp, Mimulus guttatus
  Intron number 2 from transcript mgv1a013141m (locus mgv1a0 13141m.g) derived from phytozome v7.0 (chr-ID scaffold_51; pos 293101 to 293636 reverse strand)
ccgaggcgtatccttctccttgtatttacgctcaggtgatccattaatttaaccctcgagctcaacctacattttgtgaatttttgtgttcgagttgcatttgaattttgaatgctcctgttaattgcttagaaatgctactgaattcctaaatgtaacttaatagaagtgttcgaactacaaatgcaatttgtttttggctctgttctggttagaattttcggtgaacctggttaagaatttgtgtatggattgtatagttctaagaaaatttcctcgattttgctatggatcggttgttagttctttattatataaataaataagatgattctaatacgaccaataattttgttaggagtatgattattttctctcgtaattggaaaattcgtcttcaagttctaccgaaaatgttaagacttaggagcatattgccttcgtgcttctcacctctttttgaatgaattatcaatatatttatgatggaattcgtattttgtttcttttgaagattgagactgaagctgaggaag

SEQ ID NO: 100874 - DNA, 629 bp, Mimulus guttatus
  Intron number 1 from transcript mgv1a024508m (locus mgv1a0 24508m.g) derived from phytozome v7.0 (chr-ID scaffold_3; pos 2487319 to 2487947 reverse strand)
gctcgaacagagccttcaaggtactttaatattgtcttcttctttttcattacattgcttgctgtaagagattttggttgattatttttcaggttttttatgtgttaaatcatttcgtcgggatttttgccagttcacatttgatctttcatatcgtttatttagttgagaatgtatcttttacgccattgattcacggcgttatttatcgtagattctttagcctgaaatttctattactaagtttcgtaaaacacgaggaaaaggcgaaaaaattgcagaatacatagtgcatttgctgatattgtgcaaaaacttttacttgatcattgttctgcagtcttggtgatatagaatcttcattttcctttgttgctttaaccgataataatacgtagttaaaccaattttgccacgaaaacgaatcattgctcgtgtttcttgatttgtgagaaatggtcatttatgttgacaaagttaatgaatttcatgtgtttgtactaaatatatgttttttgattggatgagtatagatgcaacttgcatgataaatgataaatcatcggaaaattcgacatattcaaggactatattttatgaaactacaaactcttttcgcatgtatagat

SEQ ID NO: 100875 - DNA, 417 bp, Mimulus guttatus
  Intron number 1 from transcript mgv1a000478m (locus mgv1a0 00478m.g) derived from phytozome v7.0 (chr-ID scaffold_90; pos 678827 to 679243 reverse strand)
actcctcagccgttggatgtaactcccactctcttcttcctctctcacttttttttctacttccgtttgtggtcacattcactctttccgtcgcctccgcctgtagatatgcatgcataactcaattggttgttaattctttgaattcggtctcctcggcggaggattttgttgtctgtgtgcgcattttagtttgggggggattgattgattgtgatcggactagggttttgcactagctgaagggaggtttaagtaacttgaacttgagttgatttcttgcccaatttgttcattgcgtgtgaatgagtgaatttaatgttcatactttggaagaaagtatatgtctttgcgggatcaagcttattgttgattaatatttttttttctggcttcttaaactgtagcaacaggaag

SEQ ID NO: 100876 - DNA, 589 bp, Mimulus guttatus
  Intron number 2 from transcript mgv1a016563m (locus mgv1a0 16563m.g) derived from phytozome v7.0 (chr-ID scaffold_54; pos 443747 to 444335 reverse strand)
tcaactaacgacactatcttgcctctctagctgtatgctgccagtcctggtctaatgtttgtataattaattagattatttttggctagtgtcttagaatgtcgtaagatcttttttttgtttttattaaatgaaaattgttatgtacttgacttgaggacacacacggtcgcaccctacccaaccatttttttactgaggtaaattggggaaatttcaaaagggcccatgtcgaacttacttgactgattgaatttacgaatttggttcgtttgatgatccacgtcctctttgtttttcattgtctactaccttctatctgttctttcccttaggattctttggacgtgttactaggaaagtctcgtgtttctatgatattttctaagaacatttcttttcatctttggcaagtctattcattgtctcaatctccagtgaaataacttctatttgctttgatctgcttgttcagttattcattataacacagtacatgaaagaaatcatctccacatacacgagatgtatagacttttaataaaccttattcttgcaggctgcaaagatccttgctaatttaattatt

SEQ ID NO: 100877 - DNA, 779 bp, Mimulus guttatus
  Intron number 1 from transcript mgv1a016563m (locus mgv1a0 16563m.g) derived from phytozome v7.0 (chr-ID scaffold_54; pos 444329 to 445107 reverse strand)
ttcggaacattattttttttttctatataatttctgtaagttgggttctaattttcttgtatattatctggagatatatatatttattctaaatttgagattatcgatcatttatgatactatttgatgtttaatttttctctggctgctttaggtaggggggaaacggaaaatagaatagggttaattaattatggaagtggatattcaattatttgaattttcgtgatttatgtgaaaggttcgtggattaatcctgttccgtatattttttcgaatttttttttaatttccagtatttgttcctgtgcacatgttgcagcagggagtttcgtcgaaaggtttcgtttttcttgtttatatgtattacttttgggggattaggttcatgagttgtttaattagtgtgaattatgacttaatagctggaaaattaatgtcgtttctcgaacattgaggatgtattatggtatgcaagaaatgatgttattgtgtaaacttagaaattacaagaaggggttacatgaggttgcatccgtttactttttgatagagcgttgaggtcattttgaaatatgtatgtagttgaaggtcttcgtacgaaaaatatatttccaatatttgatggccatattcgcgacactgttgagtttaaagatttcgttttttcatattaaccaatcattacatagttgcaagttggatcatgcgaaatcttacgtattgctcctctttttgttgcaggttctttggatttggatttcagatatcaactaacg

SEQ ID NO: 100878 - DNA, 473 bp, Mimulus guttatus
  Intron number 1 from transcript mgv1a009358m (locus mgv1a0 09358m.g) derived from phytozome v7.0 (chr-ID scaffold_113 ; pos 4492 to 4964 reverse strand)
agtaaagaagagttcttgaagatccaggtaacctcttctctcacccatttgctgataaatgcgtgtgtgtgtgtgtgtgtgtgttttctgtatgatagataagaatgtgtttatcccgtgagctgtgtgtttgtgtgtgtgtgtgtgtgtgtttttgctttatgggttttgcgtgtattggactcaaaaagatttttaatggcattaattagctgttccctctatctttttctttatttcccttctgtcagattggatttttatttttattttattttgtttttccaattaattcatcaattagaaacaattttttatatattttcccctaaaaattcaattttgaatgcttcaaattcttgtttctgggcttgtttttaattttgtagtgataaagttgtgatctttaccctgtttttatggtttctcttgtgttttgcagacctgtgttctcaaggtcaatatacactgtg

SEQ ID NO: 100879 - DNA, 896 bp, Mimulus guttatus
  Intron number 1 from transcript mgv1a018767m (locus mgv1a0 18767m.g) derived from phytozome v7.0 (chr-ID scaffold_126 ; pos 187146 to 188041 reverse strand)
taggaaaaacacatctcaaccgcccccgtggactggtaactactctcgatcggctctcgtttccattattttctcttccgctaatttttttttcttctatttttcatatgcatcagtacttgtattaatattggattctattcacggaaccgcgctcttagatgctaccagattgtgtcggatgcaacattcaataatattaacgtgtttttattccgttagtgaatttagttcgacaatcgacgaattaatagcgattcttggtgtaatccagggtaatgttggtgccattattaactatattaatccatggcaaaggaaagttaacgagtagtacttacatatttaacacaatttataaggactcgtttggttggggaaattaaccatgattaactaataattgaactgtgtttgatgtttggtaaacccaataatttttctggtcgattcagaaatattattttatcatggtccattttgccttttagggagattatgtattggactttccaaagtccaataatacaattggttttcattagagtactttatcttatcttggcaaccaaacgagccctaaggccttgtttgattgggaagattgataagatcaaataattaatctgatgcaaacccgattgtattattggactatggaaggtccaatacataatctgcccaaaaggcaagatagactgtgataaaataatatttctgggtcgaccgggaaaaatattgggtttaccatacatcaaacaaagtccaattattcagttaatcgtgcctaagtttctcaaccaaacgaggccttataagaaaacaaagcataatttttatttacagaagcggccttcgtttaatttgtttgttgatgacagtaccctcctataagt

SEQ ID NO: 100880 - DNA, 605 bp, Mimulus guttatus
  Intron number 1 from transcript mgv1a001797m (locus mgv1a0 01797m.g) derived from phytozome v7.0 (chr-ID scaffold_48; pos 201452 to 202056)
actccgattcaactcctactccatttttgcttcctgtaagtttcttcatcttcatccatgatttcgattgtgcagatgaagcgatttagcgcttctgatttttgtgattctgcattttcatgaagcgtttttttttttttttgatttttttttttgattttatgaaattgaatccgctgcttgaaagttgaaatgtatgtgatgttataactaacagtgttagtgattctcacttcggagattgaattaactgcagaaattgtgggatacggaaacttgttttggtggttcccagaagttgcatgtatgttaattatagtgtatttatcaatttcaaatgccagttattctacatcagatataaaagtttgtggtaaatgaatggattcatgaatgtttttttaaatctggttcaattttgctgtttgatctcttaaccagaagaaattgcatttctaccaacgagtttatcatcgtatatgttaattccttttggtttactatcttctcttttgctagtggtacttatataattttgccctaattttatttatgtatttttgtctgcagagctgagtgctatacatcagacagaaaacaatacg

SEQ ID NO: 100881 - DNA, 673 bp, Mimulus guttatus
  Intron number 2 from transcript mgv1a001797m (locus mgv1a0 01797m.g) derived from phytozome v7.0 (chr-ID scaffold_48; pos 202290 to 202962)
agacttcaagttagtgaggccgtacatatttattttcattttttcaacttgtttaatttactcgatttcgtcatttgatgttacgggttgttccatgtttatctgcaagatgcctgaagtttatgtttgagcaaataaatttatttaaatttctaatttttatttgttagtgcagttagtttaatcgtttgatcttaaattgcataacttgtgtaatcaaaggttgttggagtaatacagaggaatgtttttttctcaatgctgtttgccaacagttaatgaattcttagtgtggggttggatttaggaacgttgacaatgtaaatccatggcatattaataactatgagagatggcttctaagaaagtaataaattttcagctatattttcttgtcttatctcatttgattgccatctaagactgttatgtggacaaaacaaaagaactcctatgagtatctaaacagctgaacagtggtagcattattgatcatatttgtacgtatgtgaagtactaaattatgggtgacttgaattgttaatctatcatagtactttttttttttaactaactatattttgatctttacgaaattatgtgaataactttcagttttctgttattttgaatattagtttacgaaggagaatccgaacaccacaattttgcc

SEQ ID NO: 100882 - DNA, 829 bp, Mimulus guttatus
  Intron number 1 from transcript mgv1a007137m (locus mgv1a0 07137m.g) derived from phytozome v7.0 (chr-ID scaffold_140 ; pos 645487 to 646315 reverse strand)
atttgaatccgctctttaagttctgcagaaagaaggtgagttttttgaaaaaaagattcttttttttttcaattttcttgtgaaagtgatatgcttttgaattaattcctttgatttttgaaagattgactgaatagcctagaatgtaacacagttgtcaattagggcatagggttgatgtttataaagatactcatcagtatttcatttatatgttactcataaaatgatccgagtttgactaatatcatgcttaagttacagttgagaatattatgatctctatttgatgcgtaaggtcaatgaaatttgatatgagttttctttgaaagaggtaaaaatatatggcccataggtgcgggaataaatatcgacttaatgcatgtgagttaacgaaaaatgtgtacctttggctggttgtttagtatgaccgattaagaggcattagggttaggcggaaaagatggtgtgcaaagaggcaacatttgctctctgattatctctctcacatcttcctttcgttcatcacaagtcttcataatgtgctatgaaatcttcgaattttaattaaaacggtggcatttttatcagcactaactaattctataatgtcttgatggtaatgattagtattgtttacatgaactgtcaatgttgaaatcaaattgaagtaatgtttttatttactcgaggtaattcactatattgatttccatacaggaacgtgcaatttcattttaaaaaacccatgttattatgggtccactaaataacgtttcagattttttagatgatttacattatccttttccattttaggttcttccgg

SEQ ID NO: 100883 - DNA, 882 bp, Mimulus guttatus
  Intron number 1 from transcript mgv1a021319m (locus mgv1a0 21319m.g) derived from phytozome v7.0 (chr-ID scaffold_63; pos 190681 to 191562)
ccgtaagtattctcaaaaaaatgctgcgcgcacacctggcgcagtatcggccgttggatcacacacacacacatgcatgcatgcatgcgtgtcatccagcaatggcatgctgcatggagtactactagaccaagggaatcatatatgcatgcattattcttgctttttttaattgattgcatgtaaaaaaagatgcctgaatggacttcaaacattttattaaggttctgttcgagacgaaaaagccggcataatagagaacacgaaacacgcctacccgcgaaccagagccttcgaattattgcaagaaaacaacaagatgaaacgaatttctccattgatgtgcattttcaagaatcaatatatattcccccttttcaacaattttttttaatatatattttatctccgacgatcaatcaaccttcaccacgttacatataataataaccggaatccacatcagcatcggccccgccagctcatcactcgtcgatcggtcgatcatctcttcacaaataacagccttcccctcataatgcctactacataaaaccctgaaaatgggcaccgaatacagaatagtacagaatactctttttacaacaataatgcataaagaatcatgcataaaggcaccattattgacttgcattttcttcaaatttaattaaattattaaacaattttcatgcatgttttagtttcctcatgcaaaagaacacaaatatctttagtatattagttactactatatatataaccccatataacacccaattctccaattcaccaattactttcaaacacacacatatttcgagaaaatcaaatactcgatcgattagacggaaaaaaaaagaaaaaagaatcatgagcaga

SEQ ID NO: 100884 - DNA, 371 bp, Mimulus guttatus
  Intron number 6 from transcript mgv1a005275m (locus mgv1a0 05275m.g) derived from phytozome v7.0 (chr-ID scaffold_33; pos 1781620 to 1781990 reverse strand)
cttgtcggagcttccatttggtacttaaaactcattttacttgataaaacaccaaattttaatctcagttgtcacatgtttgtcactagtttttgtatctttttgaaaagggactacctaacttaattcaatttttgttttatacgaatgaccttctctagctctattctctagtagtaatagtatattctcacagtcaacatacgtgacgcctttttccatacaaattctcaatatgcttgacatatcatgtgatattaaatagatcatttatttcgttcggtttgttcattttgatcttcgatattgaaagaggtggtaccaccacctgtactattatttccagtgcagtggctacaagtttgtcagga

SEQ ID NO: 100885 - DNA, 963 bp, Mimulus guttatus
  Intron number 2 from transcript mgv1a005246m (locus mgv1a0 05246m.g) derived from phytozome v7.0 (chr-ID scaffold_39; pos 1475652 to 1476614 reverse strand)
gaagccgaggtatttatcgatttactgatatttttaactctcatgattctgatttctaaattgcactatgtgttttggggtagttactgttttctttctttagctgcattatattttgcttgtttgtttatgcatgtctttaacttgtaaatcggagtgagtatatgtgagatcgtttaatgttgaaaaaaaaactataaataaatcatttttttcgattcttttcagtttgaatcttgttctatttgaaggaattgcttggatcttcgattagttttaggatgagcagaataaaagatcgtagacctaacgtattagctgcataacttgtgattgccgacttcttatcgttttattcatcccggtttatgttttctctgttttccttgatgtgattatcttacgtatccgttctataacttagttaaagtgtatattggttttgatggttattggttactattatgtgcttgactcaagagtcgaacttctcagcatatagtgggtttattaatttacctactcattccatggctggatttcgtacgctatctatattattactttagaaaaatagagacgagaattatgagattgcatgttcagtgtgtgcatgcaatctacaagtgcaattcacagcagcattttgtggcaaatcagctgttatggacaattgcaattttagtgactacttttgaacagtctgcatctatgctccttttccctatttatttaccctcccggttttactgagaagttactgtcacctattaggtaggggccttccatttcttactttatttatctacttatataatggactgtgcaactggtttatgtttgagaaaccacaaatgcacttctttaatatatcctattctacaaacatatgaaaccatttctcgattcgtattctgatcaaaacatgtttccctctctcattcggcaggaatatttctcgaa

SEQ ID NO: 100886 - DNA, 549 bp, Mimulus guttatus
  Intron number 1 from transcript mgv1a006602m (locus mgv1a0 06602m.g) derived from phytozome v7.0 (chr-ID scaffold_54; pos 798841 to 799389 reverse strand)
caggtctttatgaatattctctctcacgtcacatattttcaatattttaagatagaatcctaattttttgtttcattttaatattccaaaatatttttttaagaattttgacttttagaaatgtcttacaaaaattaatatgataatgaattatataatgaaaaataatataaattctgatccaaaagtttttgattttagaacaaattatctcattctaatctaatcgatgcatgtattcttatgtgtaaataaccagcggtaacatctaactccccaagcaaccattcttttttattcaccaaataaaaaacaaacccattccttttttagattaagaaaaaaactatttggaattagaggtgaattggaagaaattgttcgaattgtgtaatcgtcaattattggtaacggacctaaagcgatttgattataattcaatttggggcgacgatcataagtagaaagttcatattcttcggtcattgataaacaattcattggacaaacatctaactcggtttgctcgacataggtgactcgcttcaa

SEQ ID NO: 100887 - DNA, 620 bp, Mimulus guttatus
  Intron number 2 from transcript mgv1a016823m (locus mgv1a0 16823m.g) derived from phytozome v7.0 (chr-ID scaffold_196 ; pos 219145 to 219764 reverse strand)
taagtctcaaaaccaaaagagcttctgaaattgaggtgcgtcgctaaaaaaatttcttcgatcacttgtgttttcacgtaatttcgatcaaggggacaagtataatttagacattttatgggttctgttaaaagatctaaccgactgttagtttgaggggacaaatataattttgcaaacacgaagggttatttcgtcgttagccttggtgtgtgagctgttcattatttacgctaaattttaattaacgagaggatttgattatcttcagatgctgtgattcaaaggtcacatgtgtctgagatatgcttgtcatcaaaatcgataggaagtcgggtcttgatgctgatgcttagatgtatttgtctcggggcgatagatatatttctcgtgacataacaaaattctccaaataccatcgccattttcttctaaagttccgtcaaatgtcacatttctaaaatgtattttcttttcattgatttatggcatctgcggtatttcacaagtagacagccaaaatacgcacgtagagtttgttaatgttcatatataataacaattagaatttataaataaatgcaggagattttggaaactcgtgagaaagcacttcctca

SEQ ID NO: 100888 - DNA, 757 bp, Mimulus guttatus
  Intron number 2 from transcript mgv1a008828m (locus mgv1a0 08828m.g) derived from phytozome v7.0 (chr-ID scaffold_206 ; pos 13058 to 13814 reverse strand)
gccgtgtcctcactgattacattggtaaagtccaattaattaatttaataaaaaaaaacatggcatcttgatctcatcattcgtccactttatcttttttactttctccactttattataagctttttgggtttcaactttaaaacatggggcttccctttttcttcgtttggtgggctaagtgctgcttccttgcttttttgcatgtaatgttaaatcttgcattaagaaattaacatatagtaattaataaccctatatatatatatatagggttatatatatatatatatatatatatatatatatatataaacaacttttcatgcgaatcatctcattcagtaatatcactttgcatccactatatgtactcttatatataatctatctttcatgcaattatttaattccttgtttaattttattgcatttggcacccatgtacataaagcaaactcagagtggtccttttgattatacattaggggtagctaattgtcgaatatattataccgaacatatatacaaacgataccaaaattaatatcgatgacaacgcacgtacaattcaaaaatatatcacacgtacgtcaacatatatagttgacgtacgcgtgcaagttgcgcaaaactagtcgacaaaaagtgtcgtacgtctctatcaatcatgcatgattcgtgatgctataacataataattaatgacatgtattacacagccaatttcttgggactcaagtctccaatagcctac

SEQ ID NO: 100889 - DNA, 972 bp, Mimulus guttatus
  Intron number 1 from transcript mgv1a021907m (locus mgv1a0 21907m.g) derived from phytozome v7.0 (chr-ID scaffold_476 ; pos 36913 to 37884 reverse strand)
actaccacttcattcttcaattacacagctttctggtattttttttttttctttttttttctttttttttttttaattctgctgtgaaaattaacactaataattatttgaacttgtgtgtgtgtgtgtgtgtgtgtgtgtgtctgtgaagaggggtttctttacacacacatttaaataagcaaatgttgtgaattcaagaaatgtattggagaaatgctattactcaagaaaagaggtgaaatctcgtaaaatcgaagcgttttgttgtttgatcatggttcgtttaatccgaagatttgttgcttgatcatggttcgtttaatccgaagatgtgacacgttcactcttacgttgtcaaatttacataggggtgttcatccagttggtaagcagaccgaaccaaacgaagattcggtagatgccggttactgaaccagtaattcggttcgatatatacgtgtgtgtgtgtgtgtgaaatattagtatttaaactaaaattaattaaaaaaaaaaaaaaaaaaaagcaaattttaattttttttaataaaatttcgattcagttatttaccaaacctatgaaaatttggcgtacagtacgattttaccgaataaacacctctaaatttaccaactgtaagggtttttttgtaagacaatatatagttgaggggtagctcttattatgcaaacaagagggtttttttcgtaatttaaccttatctcaagggtggcagtaatttgttcataattcaaagatattcttacacttgtcggtctcattgatttatttcttgattatatatttgtctgaacgttttagttatataatgtcaatgccacaaccttcttgtatactttcaacgaaatatgtttaaaaaaaaaacaaaaaaaaaaaccaactatttttcgtctatttcaatttaatcgaccacatttccttgtaattgctccagctatttaattgcttca

SEQ ID NO: 100890 - DNA, 806 bp, Mimulus guttatus
  Intron number 3 from transcript mgv1a012455m (locus mgv1a0 11463m.g) derived from phytozome v7.0 (chr-ID scaffold_18; pos 1202371 to 1203176)
ctgctcgtaacctgataactgccaggtcagctatttattttccgaattccgaactcggtgcattgagattattatctatgactcaagaaatggttagcaagtagaaatatatgctgttagattgtctgtgttctgatgcaaaatgttgtttaaaagcttatgttatagaagaaattttggtctgagtcctttttattcgtttgctagattaaattcatgtatagtaagagcttttatatgcctgagtatgtgggtttggtgagaagagacaaagtaccctgttttctccttatctgattgagaagaaataaatgatctgaatgtatgtacacatataatcctgagataatctgaacaatttttatctcatgatacgaaactcctataaataattgatagagtagttgaatttgcacatatagattgggcctattaagtttatcgttgtattgcatgtgcagcatcgtcttataccaatcagatatcatctcgttagagtacttaactataaatttgacggtgaaactatgctgctttggcattgtgacatgcttgtatactgaaaggttgtcgtacttatgaaaaccattgcaagacaaaaaaaacatttttgagtttttattgtcatctctctctctctctctctctctctctctctctctctctcatacacataagtctctctgtcacttgtctgtagttaagtctggaagtccctgactgtgaaatgaatactttacttaactctcaattgatagcatatgagatgttcaattgtgtgtctgaattgagaacctgttttgtag

SEQ ID NO: 100891 - DNA, 770 bp, Mimulus guttatus
  Intron number 1 from transcript mgv1a013126m (locus mgv1a0 13126m.g) derived from phytozome v7.0 (chr-ID scaffold_27; pos 1290469 to 1291238 reverse strand)
tcgttaagctccgacccggcactccccgctctccggtaactgatttccggaatgagtttagatttgaattttttttttttttttttttattatttaggaaatttgtgaggaattgagcttataataatattgtttagcgatggaaatttcttcatgtgaaataatgtttaaggaaaatgggatgaattaatttagaggcactaaactgaaaaatgaaattaaatggtattggcaatttaggtgctaagtttcgattttttactggtatgaatttccataaggttcctgtttctggtgacgaatattgattcgaacgaacgaacttttcgttatagtccgagtataatttaaacccgggtttatattcaacttagtttcgatcgtatgctagaacagtgtctccgagctcacttatgccgttaacgaatttaatttagtgtggcaaaatgttcactcaggccaaaattagctttatgtgaatgcaagtttagcctggatgaggttttgccagagaaatagtctgagatagaaacaatcgaatcgatgatttgtcccgtttgattctcttgtctttattatcgcaatttttaacatgtttgattcaatacgcatcatattattacggtcaatttcgttctcttgtcataattatcgagtttcttacctgttggaattcaccacataaagaactgtgttaatgttttttcgtaaaaacgataatgaaaagcttcgttgataaattgttacaggagatagtatcagaaattgca

SEQ ID NO: 100892 - DNA, 811 bp, Mimulus guttatus
  Intron number 2 from transcript mgv1a016528m (locus mgv1a0 16528m.g) derived from phytozome v7.0 (chr-ID scaffold_137 ; pos 465049 to 465859)
tttcgatatcatttattttcaacgctcttactcaggtaaatcctcttttccttactctttaattcatatatattcgtcgataactgccgatttctcacatctagggttcttttctcgattgtctgttagatttaaatctttgtggcgaatcgagtgttagtcttgatttttttatgatttagattcttcattttttggtttttttttttaaatctgtttattgcgtgtgattttatgtttattgaagcttgtgtttaatttagggtttatgttggaaaaatttgggtctttagtgggagttttgctaaagatctagacttgagatctagacttgagatgattataaagatctagacttgccgccacaatgatacgaattagaagctattgtttttctgcggtgctggtcaattgtaataggatttgagtttcgccgtggttttggctttctgattgcttcctttgttgttagagtttgaaatgatatcagtttcattctaatttgagaaaatgcctgctgactccttaatttcagatatttgaaaaaaaaaatgttttcttttaaaacagaattggatgcttgtaagattgtttacattgttgaacccagaaacaaaattagtctctgcagatagcattctaaaagcctctcattatttgaaataacaagcagatcaccagtgctgtatttgttggtattctgtggatgttgatgcattcattttggctatttcatatctagaaatgctattgtatgttttggttgttttctaatttctttaacttatacgcagaccactcgggtgcagac

SEQ ID NO: 100893 - DNA, 697 bp, Mimulus guttatus; identical to SEQ ID NO: 100755
  Intron number 3 from transcript mgv1a015995m (locus mgv1a0 15807m.g) derived from phytozome v7.0 (chr-ID scaffold_126 ; pos 254427 to 255123)

SEQ ID NO: 100894 - DNA, 724 bp, Mimulus guttatus
  Intron number 1 from transcript mgv1a017658m (locus mgv1a0 17658m.g) derived from phytozome v7.0 (chr-ID scaffold_23; pos 792158 to 792881 reverse strand)
atattgctcttatcaagagagtacttcctaaggaggtacaattttcaactttttctttttctttttctttttttttttttttttttttgagggcttagtagtagttataaacttggaacttggtaatataatagacattttacttaactcatgcgcgtacagtggcgagtcaaggaattgtttacacggggcttaaatttgcggggttcaggggcagcggcctcgaggaaaaaaaaaaaaaaaaggacctttttttgttggataaactaggagaagaaaaaatttaagaccgtttttttattttttttccatatttttgtactgtaggtggactaaataataaaaattggtgtcctgtgcgcgtataagcggtgacaagttcagaaatttgttagtgatagtgcataaattttaaatttattagcgcgaataagtagtggtccaaaaaaaatttgaatttttttatttgcataaagaaaataagaaaataaattcttttaggatatttttgttttttgcatttatctggattttcggtgcttttaataataaaaatggatttggtaaacaaaatgatacatataatatggacaaaaacttaattgaggtggagttcatccttgccaaaattaatatactgtgcttgtgttgttatatagttacatataatgtgttgttaatataatttacgtatattgattgcgtttgcaggttgcggttggca

SEQ ID NO: 100895 - DNA, 908 bp, Mimulus guttatus
  Intron number 1 from transcript mgv1a008793m (locus mgv1a0 08793m.g) derived from phytozome v7.0 (chr-ID scaffold_22; pos 1358518 to 1359425 reverse strand)
caggtccagatctattcatttctcctttttttttattttatttgccttgatagattttgttgttaacagatctcgtggtctttttctttgtgttctaattcctagcactatggttgtgatctgttgaactcgtctctggattcgattagatctgctattcccgtttctaatactctgtatttttttgttattactcatattgtgtttctgatttaccttcgtaggtggtataaattaaatcatgttttctccatgcgaggttatgattaattaacataaaacaattgtaggttgctatttttttttttttaatttgatatgaagaaaagctgcacaatattcccccagtgtgtgtatgtatgtgctggaaacgtatcaagagtttagttaactgtttcatgatataaagagagtgcaagttagttttgtcgagatggacgggagtgagggtgccaatgcatgtttcagatacttgttttcagtctatttctctgctttgtgatgaatggatgatttaatgctagttgctctctggtctctgataattatatgccctacaatcctcaatatgtacatcttttgattatttttacacactacagtttctacttgtattgtactgttacagttgaatagcttttaatggattttatttggtccaatggttttaatggattgggtcccttattgttttattattctacaataacattcctttggctggtggcaccataaggaaaagaggtgcccctctcagggatcgagggattgggtttgggggatggtgcatacgtggttattttctgattgtattatacatgtctggtccaaagcgaggtagcatgaaatgattcttttcgtttaccatgtcagattgatccagcaaagtacaagagcatctcttcagg

SEQ ID NO: 100896 - DNA, 765 bp, Mimulus guttatus
  Intron number 1 from transcript mgv1a010041m (locus mgv1a0 10041m.g) derived from phytozome v7.0 (chr-ID scaffold_58; pos 975607 to 976371 reverse strand)
gcagattcagtgccgaatttgcctcgaaaccggtaaaatccctcaatttttgctcaattttttaagattattttttttaatttattgtaagatgttacctttgttgagtttcagttgaaaaatctcgatgggctttgtttgattgtgcattacagtgctactaactagcatactgattactgtatacatgagtgtagaggatttgttgcgtttttttttttgtaattcagatttctaatttctaacaaatttttgagctatagagaatagagaatttgctgtaactattcgatgattagagctacaccttttcgattcaatattcgtagaattttcggattacatagtgagaattataactaagagtctgattgcgttttctaggttttttcgtgtttggaaaggcttcggattctgacaatttaatccagcattgcacacagccaattaaactaccgcgaggtcgatatgttgtgtcactttgtaattttcttttgagtattttgttaagaaagttagctctgtgccatttgaagtactgtgtggaatatttcaaaaagttatatgttccgacattcttcaagaaaactacaacgtcacgatttgattagttgtattgtgcgaatagttagtaatccactaattgaacattttgattgatagttttgcaagaattcgtgttttcttgttgcacttgatttatgtgaattagcgaatttttatttatcaggtagggattttattgctccttgcaagtgcaaaggg

SEQ ID NO: 100897 - DNA, 1024 bp, Mimulus guttatus
  Intron number 2 from transcript mgv1a005124m (locus mgv1a0 05124m.g) derived from phytozome v7.0 (chr-ID scaffold_336 ; pos 38918 to 39941 reverse strand)
ttcaggattcttcttttcgccttcacaaggtgtgtctgtgtgttttttttctctacatttaattttatttttggcggaatttttttttttttttaatttataaaaaatcaagttttgttgacactacgccatgtgttatacatgtgatggttttcgatgtttgatttatgcacaattcacattgacacatgaatgtatgtcaaaaatacaaatttatacatgtgtattgtgaaatataattcgataaatttaccggtgtgacatataattcgaataaatttttcgagcatatttagtgagtcataaagttggtgaattgcaattctaccaatatcttaaattatgtgtatattacaatcgtctccctgaggtagaggtaaagtgtaattatgaaaaaaaaaccgcttctttttgagttattacatccaagaccctgcactttgtaaatttcgtacatccatacccctaaaaagggtgttaatgtaatgaatcaacaaatgcaaaggagtggatgtaattatagaatgattttcgtaaatagaccgtacatggactgattgtaatttatcctaaattatattagttttatgttatcattttttttgttgtatcttgttttgttgaatgaaattttaatctttggaataatttggagttaagaggtttaaattcgtagtagcgattttttaaaacctaatttaaagtactcattttattataaactagtttttcgattattataatgtatttaaatttcattctaaatggatgaatccaaaatttcagccctgttttatttctcttccccataaaattaataaaaatttcaagtcacaaaagggatgttgatatataatacctgcaatggcagcaagtatttaatttttctatacgttagttcgttaccctaaataaatgtgccaatgtggggtgtttttcgatataaatgaaaagtgatggtgcatttactctatttcactgtttctcagggggcattaactgcaaagagtacctatctgaaagg

SEQ ID NO: 100898 - DNA, 554 bp, Mimulus guttatus
  Intron number 2 from transcript mgv1a007426m (locus mgv1a0 06492m.g) derived from phytozome v7.0 (chr-ID scaffold_3; pos 3701058 to 3701611)
aggtaatttgcagaaatttaaatagaatctaatcttcaacgaaatttctgctttgcgtcgactgtgtttgcgtttatgcctgttaattttggtgtattagtttaaggttgtgttaatttttggttttggagcaattaatttatcggctttagtacttctgttggagctgaaagtgtgaaattaattcgtaatattgagggtttagggaattggattttttgttttttgattctttcagaaataggcagacaaataatttggaaaatatctgtactttgtagaaattgatgcaagatccctctttttactgtgtttctgaactgactgatgaaagggctttcatctttattattttgtgtttccttatgttcttttttttgtaaatttatattttatggtctaagtgtatcgtgtgactaatgaccttctatgtgtatatttgctattcaccttctgaaagttcaaattattagtttctttattttgcattggacgctttactactaatgaaagtgttttaagactgccaatttatttttcttttcgtgttgcag

SEQ ID NO: 100899 - DNA, 775 bp, Mimulus guttatus
  Intron number 2 from transcript mgv1a001177m (locus mgv1a0 01177m.g) derived from phytozome v7.0 (chr-ID scaffold_158 ; pos 554551 to 555325 reverse strand)
gaggtgtgcttgaggtatgttcgaaaaacccgattgattcaaattcgtcgatgaacttttgcgaacaataacgctttggcacgatttattaagttaatagcttcctggatatatatatatatacatatataggtaatggtgtttaaaataatgtacgtatcgaagcaaaaatatggaacgagaataaaaatggacagttagaaacaagatggtagcgacaaatgtagcgaacttatatatcttttgcaacttctctgattttaccgttgtttgttgggttacggccactaccatgaggtaaggtcaaattacgaaaaaatccctcatgtttgagtaattacaaccacttcacaactatgaatcttcttgcacgtccactcttacagtgttaaatttagtggtatcttctagattatgtggaatattcttcagcttgtacccgttttaccccaatcgagttccacatcttgaaacaagatattcataagatgtgtctcttggcttgtaaatatcatattgtggtgcatcagaaactgcatttttgcacggaacgagtacaaacttgagaacattccacgaaatctagaagattatgttgaatttgacaccataagggtgaatatgtaagatgattcatagttgaaggtggatgatattacccaaacaagatgattttttcgtaatctgaccttacctcagggggaggccgtaattgaaccgtggtttgtttgatatttcgaatggcttacataaatttatctactccgattatagc

SEQ ID NO: 100900 - DNA, 1002 bp, Mimulus guttatus
  Intron number 2 from transcript mgv1a009464m (locus mgv1a0 09464m.g) derived from phytozome v7.0 (chr-ID scaffold_206 ; pos 26406 to 27407 reverse strand)
gtcgtgtcctcactgatttcattggtaattaattaaactatagctcataattatgtacatcatatgcatacttttttcattgtgtatctatttcttaattttcttgcatgtttcatcatatttttgggagaaaacatatatacaaaaactactcacacacacacattatatgcaaacatatatatttggatatagtacgtggcactttttaattttagttgactttttccacatgtatgaatatcatatcattcaccgagccacttttgcatcgactatgactagtcaaacaatcaacccatacgttctcctagatagtcaaccatgaataataatactatttaaatgggtaaattacacctacactctcaagctatgctaaaataattttaaggtccttatattactggtaattaaaactacccctgaagtaatgttaaaaactctaatagaataagttattatgttaggattctaacggactattagtttcatgcaagagacaacatagagttagagggttgacatgcgggtacccccccccccccccccggcccgaagatttttttttaaacgattcttttttttgatttatgtattagttaattttgtacactttagaaaaacaaaaaaaatattctcttaaatcaccccaatatttcagcccccaagaaaaactccctgggtctgccctcagtgacatggctctcctaacatttcttaaatccttattattatatataatatttataaattttcgtctatgttagcagtaatggtcccgcgcgaaacaaaaatagtgcaattttgttacgcccaagttgttcttcaatgggtgatatatgatatctatcttataaattgatacatccacatcgattgtccacacaaaagcctcccaataatttaaacgaaatttgttcaattaatgtttgatgtaatactgatgacatgcatgtaagtgcagccaagttcttgggactcaagtctccaatagcgcac

SEQ ID NO: 100901 - DNA, 610 bp, Mimulus guttatus
  Intron number 2 from transcript mgv1a006668m (locus mgv1a0 06668m.g) derived from phytozome v7.0 (chr-ID scaffold_45; pos 1058234 to 1058843)
ttgcttttgatcttatctctcttcctgtaagatattctacctctctctctctctctctattttttatattagcttgggtgaagattttttttgattttcaggtgctatgtttgtattttattggattttttttattctgatggattgatttcctctagtatgatctgacattgttaaattagtacacaagtctaattcatttccgtatttgacgtaattcctagatgtaacagagctaaatggcatcttttttcagtgttatatgtatcttattttcatgatcatgaatgaacactgggtttagatgatgttattgttttctcatttaagtgatgatagcccacctggaagtgatgatagtccacctggtatagtaaattaaacaatgatcagtactcggataatgtattatggaattccttttattttcggatacgaagaagaattgagatataccttttttttggttaaaaacgcccaaatttaattaaccatgtccaacgttatgagattagatatacctttcttatttatttgtggattgtgcattgttatgcacttcaaactgaactcaattgtttattgatattgtgtatgtggtaagggagga

SEQ ID NO: 100902 - DNA, 657 bp, Mimulus guttatus
  Intron number 1 from transcript mgv1a018377m (locus mgv1a0 18377m.g) derived from phytozome v7.0 (chr-ID scaffold_100 ; pos 761851 to 762507 reverse strand)
aggttttgatttatttaattttcattacataattccgtttattgtttttgatttattggaattagtaataagcattgattattttaacatgatcgaacatgactgcatctgttttcgggcgcgttctgagaattcgagggccctaggtgacatttaaacaacggggcacctatttgaaaaatcaattttattaaaggatgtgccccgaaatatttgttgaaatgtatgaatataaaataactttaaatataaaaaaaaaaaattaatatccttatagcaaatagacttcataaatatctataaacttaaatacactaaccaatattgattcttattttaggtataaaaataaaataataagatgttataaatttaatatttaggggcccatgttaagaaaattgtaaaaatatttattgatcatttattttaaatttattttagaactgatcttccaaaatattatatataataaattttaaaaaataagtattaatatataaactgtatataataatttgggggctttaaattttcgtaaaaatctggggccctaggcgaccgtcaacttcgcctccccgcccttgtgtgttttttttcgattaattgtgtgctcgaacaggtactcccttctcgcgggcggaaaaagagtccggc

SEQ ID NO: 100903 - DNA, 808 bp, Mimulus guttatus
  Intron number 1 from transcript mgv1a013932m (locus mgv1a0 13932m.g) derived from phytozome v7.0 (chr-ID scaffold_23; pos 933111 to 933918)
acgactcacctctcccccgagttaggccgagttaggtatggattcgtctccgttctctttctcttctcccaattcaaacctattttgcgttcttcctttttagttgaatccagccgctgtttcgatttctagtttgtatctgaaaattaatttctggagctgcaagtttttttcagaaccctgctgcaattttttcgcgcttagattgatttcagcacatgttttttctgtgttttcaaaattgagtttctgcggaaaataagaggaaaatgaaatggtttacttcattagatgaaagcgctgtgaatttcagttattgaattttatacttttaatgaattgtttctataggggtggtgtgtttttatgaaatttttggtttcagttgtgttagaatttattgttgtaatgaacaaaactgtaatgggatggtcttctatttataatctcatgagattaattattattctcattcttcttgcaatctttcttgttgtcgttttcgtcattgttttccgtgtttcttgcttaagtttgaatgacaaaatcatttacacttattttcttgattagttcatgtctgtatctatttgtgaagcctttccgtagttaatcgaaacaattgtataacaattccgaaaattagcttagcgaccactctgttcccatttaatataatgctggcattacttaaaatcgaataatatgtagaaaatggtccgagatgataactagaagtaggaaatctttaagcaatatctacttgcgttgttttctcattaatagtgtgtgatagggcagtgcaaag

SEQ ID NO: 100904 - DNA, 591 bp, Mimulus guttatus
  Intron number 2 from transcript mgv1a013932m (locus mgv1a0 13932m.g) derived from phytozome v7.0 (chr-ID scaffold_23; pos 934085 to 934675)
ttaataaaggcttgcgcaacaacagctccgaccaggtttgcaaaatcaaaatctctttcgtttttaataatttttactgctaaagtagtggttccgggacttcgttttgcaatttgtagctgcagaatgtgattgataagagcgtgcattgatttgtgaatttcttattcaacaatatatattatctttttgtatcaacggcaatggtttgtgaatcatgatttcacaagcatatatcattttatattggccttctgtacctaagaaacgttggaaagttttaaggctgaaaaatctatcctctgaattacgatgaagttagaatcgtgacggaatctagtgtcgtaatcaatgttattggcctatgttttaaagttatttccttgtatttcgcttggaaaggattttgtatgaaggataatatacgaagaacacaagcagacgttgacttatctaatttgttggaaaatgtcgaataagatggaactttaagggagcatattttttccgatgcaacttattcactagttgtttgttttgttttgcttatcaacagatatatattttcttccccgaggaaccgaaggttgg

SEQ ID NO: 100905 - DNA, 429 bp, Mimulus guttatus
  Intron number 1 from transcript mgv1a003566m (locus mgv1a0 03566m.g) derived from phytozome v7.0 (chr-ID scaffold_58; pos 815638 to 816066)
taaggtaatatactagttgcaagaatcttgaaattttcgatttttgttgcattcagcaccctgtgtttactctgattgtcaaaagaacctcagtgttataaatattagcagaatcctccctataattcaattttattaacaaacttccccttaaaaacacaccatttaggggcctgtgtgctgaaaaaatgcataatggggttattttgctaatatgtataacaagagggttttttttagaaactttgtataatacaaggacactaaatgcaataaactctaaaaaaattcaaaaaacttatcattcttgaatttttgcccttccattttttcttaatcttcactaatttcttgattttttatttttttttaattttttattttttataattagattaggagaacccgaaaaagccgtatatcatttca

SEQ ID NO: 100906 - DNA, 738 bp, Mimulus guttatus
  Intron number 1 from transcript mgv1a003112m (locus mgv1a0 03112m.g) derived from phytozome v7.0 (chr-ID scaffold_170 ; pos 162104 to 162841 reverse strand)
aatcattcgagtacaacggcaatcagtattcgctcgtgagttttaatctcagtgattactatgatttttcgacttagttcatcttttcccccaattgatttcaaagtgtttatttcccccaattgatttcaaagtgtttattttccgccaattgataatggaatgtcggatcgatgataagaaaatgttggattgaacttgtttgcatttcaattttttttatatatataggttttgatttgctcttgtgcaagtatgtaaattggaattgaagaataatgtgtttgatttatagtacaaatatgtcaattggaaataaggatcacaacggacggacaatgcaagtgcgaagtttattaatccctccaattttattatttgtttagtacccttgtatctatgagctaggtctcgtttggttgggagattagccattattaactaaatacctggactttgtttgatgtttcgtattcccaataacttgctgggtcgacccgcaaatattatgttatcatgacttatcttgccttctaggcatgttttttagtggaccttccaaggtctaataatataattgggtgtcattagattatttaatcttatcttggttaatcttatcttggcaaccaaacgagccctaactcattcgtttagtcattttgtgttccagttgtttctcttctcacacttgttttacttgtatataggaggatccagcattcttccaacccgaga

SEQ ID NO: 100907 - DNA, 694 bp, Mimulus guttatus
  Intron number 2 from transcript mgv1a016461m (locus mgv1a0 16461m.g) derived from phytozome v7.0 (chr-ID scaffold_233 ; pos 121608 to 122301)
ccccgtcaccggcaagagaatccaaggggtatttcccccctcttcttcaatttatatctcttcatgatttttttttactgctaaaattacccgcaatgttgatatggttttagtactttgtttcattcaaatattgaaataattgctgaaaattgattgctgagataccttgatccatatgtatttaggatatggtgtgccaaagctttatatttcagcttcccttcctccccacaattactagtttttgtagtttgattttgattatgatattctcctatcaaattgttgatagttgatactgtaccccattacagtttttgatagtagtcggatagtttggttttctttttggtagtagtcggatagtttggttttctccccggtgttaactctttgttttgatcgttgctcaattataacaattggtagtttatatatggatgttctgtcttacactcttttttcggcaatgtcccgattttttttcttttgactttatacttgctgcgtaatccataagcgatggtctggtcagtagactgatgataactagcttttcttgattcgattctttgaaggacaacacccatttataaattgttattgcatcaacgattaagaagattaattacgtgtttttgtaacttaaaactcagattcctcatctgcgacctgctgaatacaagaggtc

SEQ ID NO: 100908 - DNA, 622 bp, Mimulus guttatus
  Intron number 1 from transcript mgv1a015105m (locus mgv1a0 15105m.g) derived from phytozome v7.0 (chr-ID scaffold_113 ; pos 633681 to 634302 reverse strand)
ctggtctaccaagatttgctcacaggtgaattttgcaaattatgctttttctttgttattctaagctgtttattgtgtagatttgtgtttcggtttcgatttcggtttcaattttcacatgcggtttgattttttatttaaagtttggatcttttacttttttttttgttctgatcttgttgttgtattcgtgtgtgttacttaatcaattgattgtgactattgatatagatacactatatttagctagctggtttgatttttcgttactgtttataaaaaataaataaaaaaatcaaatttgctactgtgctgtaattaggatcaaattaatggataatattaggagatttttttagaaaattaaagtttttggtatagttgtggtttttcagaatcattgggtttgtgttagaatataattaggaattcgtcttcgattaggaatcttttatattaggtaatacttgccgtttctacgattatattctaacaattgtatgaagagagtgaattattgatctgttattgttagattcctctttgttgtaaattgttgcaagttacacgtacttcttcgcccggaaacgttttaactgtgatcgaatattgattgtaggtg

SEQ ID NO: 100909 - DNA, 813 bp, Mimulus guttatus
  Intron number 2 from transcript mgv1a013227m (locus mgv1a0 13227m.g) derived from phytozome v7.0 (chr-ID scaffold_37; pos 1141150 to 1141962 reverse strand)
agttcagaaggaagggtgagcttttgatttatttcttcgatttcttagcattctatcgataatggttcgacttttacaccatcctccacgaggaaagaaatcttgtttttcgagtctctttagttgatttgcaattctcgtattttgtcagcattatgtagattataaatgaaatgattcttcgtatgaagattagtatattcgatgttgttaatttggaacaagtaatacataaatgtaagtagcaacttgctaatgcacatctatatagtgggattcatttggtaatgggcagatttcaaggaaaaaagcatgagataatttgttgtaaaattgcagctcgtagtctttccctagtcagcttcaaactttattgcagtctaatatgagtttactggatgtgtatctatctgtcgtccttggaaataaaattgagtaacattagctggcgttaaacgtgttcttgaatgaaacctttagctgcaaggatatctgttgtttctatttgctgatctagttggctctactagacaatcttgtatgcaattttaggatccagcttgttggaaattgattttcgaagcattggcctcgttagaatcctgatttgtttaatcatctaaaacgtccaacatcatttgcaaattggattttattataaaaaacgtagatttggagatgtggaatcataggggcaactttgttatccgtatctctgaaatctttgtattatcttagtaaatgaaataaacttaaccaatttttgtctccctgacaggctgtactattggatcgccctcgtgttatctcagc

SEQ ID NO: 100910 - DNA, 694 bp, Mimulus guttatus
  Intron number 1 from transcript mgv1a002636m (locus mgv1a0 02636m.g) derived from phytozome v7.0 (chr-ID scaffold_22; pos 930129 to 930822)
ccgcctttttgtgcttcgcaaaacgacgtcgtacggtacggtcaccgctccttgccgtcaggttcttagattattttgacatttttcttttgtagaaagtagtttactctagatctgcacgtaatgcttgagatatgaatgtgcattcggaccaacatttctgatactatttctagggtttaaaatgttaatcatctacgcgattttgcttctgtttgttgctgcttgggttttagatttttatgtatttgcagttttccccccttttatttaggttttcactgttgcttagacgaaaatatataatactcgtttggtctgtaagcagttcgtgcatgcaaggttgaggtgttagtttttatgtttgtgttttgtatatttaggtaaaagtattattatagtaagttagcttttaggaatgtcaagatgatttgtattttcatgtttttggtcccgatgaagctccggcatttcatctttttgtcctgttttgcgtattctaatttgattgtggtattatctgccttgtatggattgtctgtttgattcaatttgtgtttcttcagaaaatgaatctgttaaccagatagtatattttagttttggtatgataactgatttttgtttgagttctgatctttgttgtacttttcttcgcctcgtttgtgtatttaatggttacagaatagaaaat

SEQ ID NO: 100911 - DNA, 921 bp, Mimulus guttatus
  Intron number 2 from transcript mgv1a007972m (locus mgv1a0 07972m.g) derived from phytozome v7.0 (chr-ID scaffold_64; pos 984697 to 985617)
aaaacgtcagtacatatattctaactatgtatttaagtatttaattttctcgagaataattgatttttgaatttgtggtattttttcatgagattttatttgtcttctgaaatcggcaaaaataaatcactgaactaaagaagctatggtgttgtttggacaaaaatagacatgtttgagattttaggttgttctcttgtatgtgtgtatgcttttaagttaggtgtaatttattggaatctggtttctttctactttgttttcgtttatttttttgcccgattttctcgccacgttctagattgtcaaaatcctggtttctgtttttcgagtttggagaagatatccaatgtttttcgtctagaaaacggaaagaagcctgttagatatcacggacacttgtatatgaaaatgcctatttatgcgagcatatgatacgtgaatgtgatttattagttggaaatgagattcggattgaattatatgagtttgctcgattaaaagttcgtggatatctgattataggaaaatgatcattttaccgaacaagttaaacggctaattaaatggtttagtttatggtctgttgaattaaatgccgttttaagtcgtgatcacatgacacgtggtattcgtcgttagtttagcatttaagtaaaaacttagatcctttgagtgatataaaatactagaatttgcgtcggttctgaagtttcattcatgaatatagaaccagaataaaagtttaccgaaagaaaactcgttttagcattcacagtttcgtcgtgtaatttcatttctggtgcattcttgttagttcttacaatcagaactgactaaatgcagccaataaacatttattaattgtgaaatttattcgtgacaggttgttgcaatcagagatataattcctccgcctca

SEQ ID NO: 100912 - DNA, 519 bp, Mimulus guttatus
  Intron number 1 from transcript mgv1a010449m (locus mgv1a0 10449m.g) derived from phytozome v7.0 (chr-ID scaffold_102 ; pos 124156 to 124674)
ctggcccatttcctgaatctgtccttcttaaagaggtctctttttttctttttcttttatctgtatattatttatacggactcgcacgcacgaagttgtgtttgtttgctcagttttatttgaattttcaatgccttagagaaattaacagagtttgggtgtgagagtaatagtctgtctgcatctcaaatgtttatatttatgctgttttagattttctggaaggtgatttttgatatttgtgataccaaaagagggtgattttgatatctattcgattttcgttgagaatgaatgaatgcataggctttttttcttagagctgtgatgatattactgacggacccaattgataaagattggaatttgtgttttaattaagtgtatttcgagttgcaagactgtcaaaatgttgacgaagaagaatgcacaatcgctcttctatttccatttttcgcaattgtattttgatttgaaatgtgggtgattatttatttcctcagagaaaggttgaggaag

SEQ ID NO: 100913 - DNA, 915 bp, Mimulus guttatus
  Intron number 1 from transcript mgv1a024224m (locus mgv1a0 24224m.g) derived from phytozome v7.0 (chr-ID scaffold_247 ; pos 287239 to 288153)
tcgggtctgatcaccaacgtgctaccgcatcacgagtagggctgcatctttgctgccgagggctatgcgcgcgtttcgggctccctcggtgtgtgcatttccagctccggccccggagcgacaaactttatgtctagcatggcggacgctctctcggacagcatcccgctagtgatgataaccggacaagtccccagatgcgtcatggggactggcgctttctaggagacacccgtcgtcggcatcactaaatttagacacggccacgggccggttttgggcccggaaccggcccgttgacggcccaaaccggcccgttgaccaagtgaaccggcccgtccaccccgggacgggcccggatcttagaaatggtgaaccgtgaaccgccgggccggctcggcggttcacccggatttttaaaaaaaaaaaaaaaatcaaaaaaattcaaaaaaaagcaaataacggctagtgaaccggcccgggtgaaccggccgttatttacttttttttgaattttttcccccccaatttttcctataaattcgaaatcttcaaaattttgaatttaaaattgagttcaagtcttttcatttatttcctttttctttttctatttaaaagtacttcttttaatttacttattcataaaatatttcaaaaaaaaaaaaaaaaaaccaaaaattcaaaatttccggcccgacccggaaccggcccgaaccggccggccgacccggcccgctgaaccgcccatactacgggccggttccagttctcggaaaatgtgaaccgtgaaccggtttgaaccggcgcggaaccggcccgtggccgtgtctaactaaattgatcactaagaggaattaccttattcaggatgtagcagcatcccgcacattgttaaggaagccttctttgtgg

SEQ ID NO: 100914 - DNA, 423 bp, Mimulus guttatus
  Intron number 1 from transcript mgv1a010453m (locus mgv1a0 10444m.g) derived from phytozome v7.0 (chr-ID scaffold_87; pos 783459 to 783881 reverse strand)
gctgacaggtctgctcttttttttttttttttcttttttcttttttctggggtttgttgggtttaattgtttgattgaattgtgatgggataatcaagataacttttttaatttctaatttaggatgtttcttgaatttaaggaacaattgtgatgaaaatgctttagtcttgcgatttctggttgttttcgcgaatgatgatgctttgtttgttttatggaatagcagttcgtacattagataacatagaaacttaacgattatttagtcgagcccttttgacaagaattgttcgttgaagaactaaatcgattttcgatgtatgttccatccaattgataaatttgcaatcgagaaagctaacattaatatttgttgctgccttgttgttccaggttgagccttgtgacaaccattaaggt

SEQ ID NO: 100915 - DNA, 894 bp, Mimulus guttatus
  Intron number 1 from transcript mgv1a026650m (locus mgv1a0 26650m.g) derived from phytozome v7.0 (chr-ID scaffold_6; pos 3768545 to 3769438)
cattagatcgtcgtaaatccgtttggagtaagagggtttcacccttttgactgtgggatctaactttggtagcgaacgttgagttcatagccttggaatggattttaaatattatggcaaggggattgacccttcaagcattttgtaattgtatgtttttatctgtaacactaaagattttaaaatatttgctaattacaaaactactctataattaacgaaaaccactctataattaacaaaaaccactagaaaaaacttatcaattaacacatagtgatgaagaaaaaagacttttaaaaacctctattattaatgagttaaacgcaatagaaaaaacttttaatattaataaaaaaaaacatcattaaaacttttactcaaaacataataaagaaaaaaataaattggttctttaaagaatttcttaatgatagagtaaacatacaagaagaatattataaatttgttattttttataaaatacatattttcttttttgactggttcgaaataccctccataaatctataaattatccgtttcaaaaaaccgttagtcctgtaactcatagaaaaaaaatccagagtcagaaacgattacagatgctagaaaaattcaatctacctatccccctcccaaggaattaaatttagtattcagaaccaacaaattaaagcaattcctttcaaaacacctggagaagacgaaaaaggaaacataaaaaatatcataaaacaaaacaattatacaaacactaatttgaataccataggaaaacaattagataggattcagagaaatatacaacctttaattatttacaaaaaatcctcctgaaaaagaaaagatttgaaagccgttttttaaaccatatcagataacacctgcctg

SEQ ID NO: 100916 - DNA, 591 bp, Mimulus guttatus
  Intron number 1 from transcript mgv1a008063m (locus mgv1a0 08049m.g) derived from phytozome v7.0 (chr-ID scaffold_4; pos 1128333 to 1128923 reverse strand)
aattttgggacttttgttttaccgaggtttttcaggtgctttttttttttttctctttttctttttatctcagctgggattttctttgaattatgctgtatcaatcacttctatctgttagtttgtttcgatttttcgtttcaactattggagatttaatacctggttcttcgaaatcttatctgttttatgtatgatttataataaccttagttgttaagaaactctgctgcttttgattcgtgtttatcccttcaatgaagtgaggagtgttagttaataagtggtatttaactaataatttgtagtctctctctctctctctctctctctctctctctctctctctcctctctctctctctctctctctctctctaggttgagaaatcagttttgcaggcaaattaatttccagtcttcaagttcagctacacaatatgcatgtctatttacggttttgtttatgctacgttttccggctgctaatttattggctacattttatcgtcctttgagttaattgtgatcggttttttgtttttcgccaatggcagtttggaaattctgttcctttcgacgttatctaccc

SEQ ID NO: 100917 - DNA, 873 bp, Mimulus guttatus
  Intron number 1 from transcript mgv1a014655m (locus mgv1a0 14655m.g) derived from phytozome v7.0 (chr-ID scaffold_16; pos 1265319 to 1266191)
aagcacgagttctcgatcaggtttctttcttctttaatagattcgatccacttctcctgtggtacgcagttcatttataggatttgtgcgtgcccatttttttttttccaattttttttcttcgtaaagttgtattcagaaattaattaaaaatgagatagaaacggctttattgcatttaatccgcatgtgttatacgtcaacacgtgttataaaagaaagggaatttttgctagtatttatacacggggagtttttttaacaattagactaaacacaagggtgctaaatgtgataacccctaaaaggaatttatgcatgcaagtgttaaagaatttcgggatcattatctttggagaatattcaatcgggttttgtgcatttattaaattttaaatcatagttcttgtcgcaaaactaattcaaattgggtttcatggattttacgtgttactacttttcttcccgtataaaagtgcgattaatctccaatatgcatggaagaaaaaccgagatgcatcttcggtctaaaagaatgctacgttggctatgaattaggatgaaataggttcgacaataaacgatttctacaaaacgaatatgggctcgatgtaattatttgctcggtatgggatttgagtgcctctcatttgttctttatgttgtctataaacgggtttgaaggactagcggtgacgagtggtgagtgcttgttaattactatgttactcttttgaatcttgatgcagaatattccttagtatattccgtttctcttcgtacgtccttgtatttcgttttctccgtaaatcattgtattatagaaaccctctctctctttggtaacaggaaactcagcctctccgcatagca

SEQ ID NO: 100918 - DNA, 544 bp, Mimulus guttatus
  Intron number 1 from transcript mgv1a026278m (locus mgv1a0 26278m.g) derived from phytozome v7.0 (chr-ID scaffold_11; pos 952892 to 953435 reverse strand)
attgctgtgagaagaaacccttgtaccatgattcttgcagctccgatgaacaagcttatgattttttcagtaagtccttctttatttatatttatatttttaatttttttaatttttttttaattttattaattatttcatgaaattaggtcacaagaagaacaaaaaatcaagaatccatgatgataacaactccaataatccacggattgaaatagttctcaagaagcatcaaaactcaagagtggtaattactattaattaattactaataataattaattaaacctgattatcaatgtatataaagtataaacatattacagcagtgttaacttgagtttaatttcttttacaaattaattaataaattaatttcagactatacgcaagcatttcgcggaggcggcgggtttaattaataagaagaaagtggctatggagtacgtaggtggataccgaaacgacgtcgtactggatttgaggacggagaaatgttcgtttttcagactcgatttaacagctggctggccggagtttcgga

SEQ ID NO: 100919 - DNA, 483 bp, Mimulus guttatus
  Intron number 2 from transcript mgv1a004111m (locus mgv1a0 04111m.g) derived from phytozome v7.0 (chr-ID scaffold_244 ; pos 154067 to 154549)
aagaatcatatcgacgaaaaaggagataggtttgcttctcgaaaacaatttctctatttttgtttcgttgattttggggatttggtagttattatgtggtaaaggagattgtgtgtgtgtttatctacgtatggcttagaaaggcaacaagcgaaaatactcggaaatgaaagatagaaaaaagacttgcatcctcatgaaaaatttggtttgtcgtctcttaatagaatgcattttggttattgtatttgttcggggccaagttcgagtaaaatagattggagatttcttgtctagttagcgtgctcgaatgagaagttccatcaccgagctcgtgttaatggttaatttttattcctcaacactttctgcagttctatctgttttgggccaaaatctgataaaaacgaattgaatgaggacttaattctttttttacgatccaaagtataatttgattggttctttcgttttgcagtgttc

SEQ ID NO: 100920 - DNA, 554 bp, Mimulus guttatus
  Intron number 2 from transcript mgv1a014476m (locus mgv1a0 14476m.g) derived from phytozome v7.0 (chr-ID scaffold_113 ; pos 183586 to 184139)
agatttgtcggagtgtggaaaacaaggtcctgcaggtgagacacgataactcaaaatcgtaataattttaatttttttttcgggggtcgataatgctaaataattgcaaaataacaaatctccgtgtaaaatactaaggctatgtttggttcatggattttgaaataaagaaaatttaaatccataatcaaatgaaaataaatattttgaaaatctctagtatgttggttctttagggggaatggtgatgaaattcgttttgtggaagatcattttctttacccgagcagacgtgtttgttgaggttcagccatggaggtgaactactccgataattaggtgttttttagggcggagcatgaaaacctgttggcgttttacgtgtcgtcacaaaatattttcaccttttttcccatatcgttttactactaaccaaacgaaaaaatctatttttgtggtcacattttcattaatccaaacagagcctaagcttttgttcttttttcgtacatttctcagtgaagccacgaaaaggagacgcacttctattctac

SEQ ID NO: 100921 - DNA, 424 bp, Mimulus guttatus
  Intron number 1 from transcript mgv1a006260m (locus mgv1a0 06260m.g) derived from phytozome v7.0 (chr-ID scaffold_207 ; pos 170564 to 170987)
cgccgcggactttggggaattttctctctctaaaggtatattagatagatctctgatctcattttctctctctaaagttgtagatagataaaggttgatttttttttctctgtaatttaattttaatttaaagtcaatgctccatttcccacttgataattctttcttctctgtgttttcactgtttgtttactgggtctaatcttctgtgactatacattttcctgtaatttaattaatttatttaattgagaaatagggtttgggggtttgggggttttatgtttgagttgaatttggaaaaaaagaaaattcctaaatcttgtgtttgcaattatctgagcttgattttgtggtaattaatgaattttagtttttcgttctttcagatctccgaggaagatttcgaagttctgttcttcgt

SEQ ID NO: 100922 - DNA, 612 bp, Mimulus guttatus
  Intron number 1 from transcript mgv1a024103m (locus mgv1a0 24103m.g) derived from phytozome v7.0 (chr-ID scaffold_443 ; pos 21069 to 21680)
gattctcaggtgaaagcacatttgaattttagtttcaagtttcagtatcagctcgtgttcttgttttcctgattgatcgattgattttcttgcaatgaggacataaaattaggaaaatcgagcctttgtcctgtttgaaatagggtccttttctcttatatggtttcgttggctcttgtttacgccaagaggtttttattacataacctaggttaggattttagtttgtaaaatccggcagttctttcttgcaatgttgcgtttaaaaatgtcgtaatggctaaaaatgttgtaatggcatgcagcgaatattttggaacaccaagattcgcgggattctttgacgggttttcgttagaaatatatgaatcatgctagaaataaccgtaattttttgttcgttttctttcttgatttgtcgatggtttgtctatctttgtcgtatggttattatctttgttcgttatcatttaatgtaattgttttaattcttcggtggcaagacacgtggggaaaaaaaggatcaataaatgtgttcgttctttttgttcgatcgaattattggctattatttgtttatttcatggaaaatcattttaaaaacgttggcag

SEQ ID NO: 100923 - DNA, 966 bp, Mimulus guttatus
  Intron number 1 from transcript mgv1a015767m (locus mgv1a0 15767m.g) derived from phytozome v7.0 (chr-ID scaffold_24; pos 871686 to 872651 reverse strand)
gggtaggtattctaccttcttttccaatttaatcagcaaatttattattttaattttaatttcaattttggttttgattgcttttttctacattctaattggaaattttaatttgctgcgtacgtgtaatttcttggtcgacttaatctatggggtttaggattttgttctgttcagtcggatttgagtcagtaaatctgtctgtattgaagttgatttttttttctaatttggattataattttgaatcagaattttgtgctgctgctgcccaattgaattctgggtttatttatattgttcgtcgcctttacttcttttcccttgatgtttctcgtatatgcacgaaaacttcgttccgtatgttagtgtttatgatgtttccgatgataactgtaatcatatgattgatgataaacataaatgttagttaaaagttatttgacttatttatcttgtgtttgatttgttttagggaaaaattgttgttgattatgaatctgccttctatagagtatagaatctaatcggtagcactctcatataaacgaaactgaatctctctgtatttttattattgagtagtagttaagttatcgatattgatgcataattcacttgcggggaagcgcgtgaatattgaatagctttgttggccgggcgcggtcatcttcccgtgttttgattgctccaatatgtcgtctcaatagattcagaacatttcttttttctcaatttgatgatttaaatactaaatcaagtatgttaacttcatgtagcaataaattttcgtttttcaatggacttcagcacgagtcatgtgatgcgtagtaaatgagtgtcagtagaatcgactctcgtttcaatctttatattgtgagattttggtcttcaatcaaaatgcatatttcgactgtctatttataccaaccattcttatttcgattttggttttgctagataccg

SEQ ID NO: 100924 - DNA, 315 bp, Mimulus guttatus
  Intron number 1 from transcript mgv1a011119m (locus mgv1a0 11119m.g) derived from phytozome v7.0 (chr-ID scaffold_33; pos 958869 to 959183 reverse strand)
tcccaactcgccattgctggccatgtcagtttcttttttttttattaattaatattgctgcctgcctgctgttatctttttataattctcaattgctgtagcaccattatgttttattagcccctgtcccagttcaaatgtcctttgaaaatatcctttgattttttttatttttagaaggactagtgataattgtttgtaaccattatttgaaaatgtagatttagattgtaagcttagagaaatagaaacattttcttagcagttagatattattgtgtgttgttgaacttgacagggcagagctttggtgga

SEQ ID NO: 100925 - DNA, 534 bp, Mimulus guttatus
  Intron number 3 from transcript mgv1a011061m (locus mgv1a0 11061m.g) derived from phytozome v7.0 (chr-ID scaffold_6; pos 3488735 to 3489268 reverse strand)
acctactctgtcttgtggaatctctaccagattgtgtaattttactcctcttccctttttcttactgccttttttttctttttattacttacaattattacattattgttaaaagataataattgcacaatatatactactgtctcttgacctctacataatcgagacatccttttgactagaggtctctatgtcacgtgaaataaaggggaccgaccagattcggtttctctttttaatagctggaatttaattgaactatgtaaattgtaatagccattaatagatggcttccatttgtatctgccacatgttggatatttatttttctatttattttaaatagtccagaccatgtgctgcttttgacttgatttggggggccattactccttattatcctcccctttgatggaggaatacatatagaaactttgaactaaaaaaaaacatgtaaaagttgcttttgttcaaataaaagtatttgcaaaaggctaaagtttaattgattgaactgcagattcttggttgacg

SEQ ID NO: 100926 - DNA, 551 bp, Mimulus guttatus
  Intron number 1 from transcript mgv1a003460m (locus mgv1a0 03460m.g) derived from phytozome v7.0 (chr-ID scaffold_64; pos 415948 to 416498)
tctttttgttcttcgtctcctccaccctcggcaaggtgataagaataattctaattttccgtagtttacttcagaaagtttcatatttacgtgaagtggttgtagatctcagtttgatgtgtgattcacttcaatcaaaacttaggtttcttatttttaatctctaatttttttaattttttttaattttgtgcaattggtgatgtgccttgtaagaaagatgttttgatttgtgatttgtgatttgtgatttgtgacggtaatctgaaatgattgataccggatgacctgagaatgattgggatttataatgtgatcacttgataagatcaaaatgtttatagaaaatagtactgttcgagctccctttttctgtttacccgtttcttatgctgcttcttacatttgaacggtaaaagtttcgtacatgatcttgaattttgactgttacttgcagaaatttttgtttctgaattgtctaatgctcaaagtatcattgcattttgccttgtaatttgtttacacgtctttgaacaatctgcagtaccaag

SEQ ID NO: 100927 - DNA, 886 bp, Mimulus guttatus
  Intron number 2 from transcript mgv1a015623m (locus mgv1a0 15623m.g) derived from phytozome v7.0 (chr-ID scaffold_27; pos 561290 to 562175)
ctccgccgagttggctcaagatctcttctccagatgtacgtgatctctgttccattaattttgttttttcatttattctttgatgtttgattttatgtttacatttaattaattattctctagaacagaagatattgcgttgccattgattctgcttgcatttttgtcgaatagatgaatatgaaattcatcttaccagttacattgatgcataaaccgatgattgttccgtatgcttattgcttatgtgcactaattaatattcgagctttgatcggagatacaccattaaatgttgttgaacatatactatttactctgcgtatctttatgttaattgtagaatgtgcaattttattttagcagtatcaaagttctcgtatagaattgaatatggtggtttagaaaaaaaaatctgagtttagatgtttagtttgaaagctattgtagtttgtttacatcagttggattggatttataagctataactgtttcacctaatacaaaatcattattaaacgaggttcgtttgggtttagtctgtttgcttagttagtttcgtttcggttatccatctcgatttgggttcaagttattgtcgagtacatctactattctgtcctgactgagtttcttttgggtttagtctgttgtatgagttagtttctttttcggttatctatctcgatttgggttcaagttattatcgagtatatatcctattctgttctaactgaggataaattttacgtttattgtccagtactgcgcttttgttacattgtatatgttacactacttctcagttctcatagtattacccgattcctaataaatttcttgtatttcaggtcgaagaaaacatctgtaagtttgcaaaaaaggg

SEQ ID NO: 100928 - DNA, 764 bp, Mimulus guttatus
  Intron number 3 from transcript mgv1a016194m (locus mgv1a0 16194m.g) derived from phytozome v7.0 (chr-ID scaffold_7; pos 81314 to 82077 reverse strand)
gaagcagattgaacacatctctcaggctgtggaaagtgagttttctgcaagtttgccgacttatttaatggttttgcattgtgtagttatatctattacaatgagaaatcattgcagactagctaacttatttcatagttttgcattgttttctgtatccaagttatgcaaattgtgaggagagtgcctggttgggaaggatacacgagaggagaatatgggtatttgcaatttagttgtatgttgtgtgtgcatagatggggtggattgtttgtaaaatccttgaaacatactccaagaatcatatgcagtagttataggacagcttgtttgtaggtgcctttgtcttatacgatgcagcgtttagccttttctattgtctacttgtagttgaggccctgctctttgcattgtctcaaacctacaagctttgatcctcttagatttaactattaactattttatattgtgttagaggattctgatcggaactcataacgataggtaactcgtagtgtgtacgcatgcagtcctgtgtgtatttggatatcattgtatctgcatcaagttttctccagagtcacatgataatataatgtttttgaagagtctatatttggggaaccctcctttgctgcatatttttcaaatattttctcctttcctttttcttgttttctgtttcatatggtaagcccttttttgacttggttcaaacattgtgtacaggtgagggtgcagaggcgtcgactaatttggaggag

SEQ ID NO: 100929 - DNA, 930 bp, Mimulus guttatus
  Intron number 1 from transcript mgv1a000880m (locus mgv1a0 00880m.g) derived from phytozome v7.0 (chr-ID scaffold_75; pos 1064706 to 1065635)
agactgttgatttggtatttcatttcttctctactgctttttttttttttttttttttgccaattttatttcaattaaattaattaacaaaattactatcttatattattgcttgcacattatatagttatcatgataattacaatatgagagtttatttaccagaaaatatatgatcagaattaggacaaacaacagtccagaaacacatgcataaattaagtttgttttcacatggtggtgttcgacaagttggtcaattttttttttcaactagacatttattaatttaatttaattgtatttaatttttagaataactgtcaacttgtcaatttattaattaagaagggatcagcctgatttcttacttcaacaacccttttaattttaattaattaaatctactaatcaaaattaatttttactctaggtggataattatatttgagtggcccactgggcttgtcgtataggataacctttttcctttccttattgggcctttggcccacgggattggggtgagtgggacccagtaacaaataatttgaaattattaattatttttacattaataattatactataaataattttaattcaaatctcataaaattttttaaaaacaattccgcttttacccctatctgcaacactccgttttcgatcggagttcggactttccggtaagcatctcgcagagttccgattgctgccaaactatttgcatttacgatcttcattggaattattgttcatattttgtactattttgttctcatgcggatttcaattttttttatttttttttaagaaaatgtgaatttagatacactgaatatgatcgcagtttagattgcaaaatatctgctaaaattctccaaattaacaggaaaaagttccgatcgaggaagtgttcgagcagtt

SEQ ID NO: 100930 - DNA, 974 bp, Mimulus guttatus
  Intron number 1 from transcript mgv1a003714m (locus mgv1a0 03714m.g) derived from phytozome v7.0 (chr-ID scaffold_51; pos 423103 to 424076 reverse strand)
atcagcctgaaggttaggtctctctcttttcattttccccccaattaatttcgtgttttggttgaaaatttgaactgaattaactgaggcggcgtggacttcttaataattacccaggagtatgcattcatagtcaataaaaaaaaaaaaaaactgacaatatagcttgccttcgctgtaaaatgaattcatccaaataatttgtcattatggatttaaattagtaatttcaaatacttcaatctaaatggttcttaatgaaatggagaaaaggtctagaaagagtgtgagcgtgtgccactgccacagtgtttcttggtgtaggacttaattccgttattttttggttcaagccgcaccacagttgtgtttgaacttatcactattatgtcgacatataatctattctcgtatatacgataatataagtgagacaatcatgaacatgaatctggaggttatagatatgaggaaaatttaggccatatttgttttcttatcggaatctgtgacacgagcaatgtgattcaaagtcatatcactttcctcactttgagagtgtaagttggtgttgaattatgatgtaaagttcggttagtggaggttgtcaccgtccactttagtcatgtcctttgcgtcacgtactgaaactatcaatctgttttgtatcttactttgaggttgtggaacttcagcttaatgcaacgtagagccaaacttaacaaaagtaatttttgatgtgcagactttatcaatggcaaataatgcatgaattatctttcctgtttagtttttgttattgtatacattaggagattttgtagaagtggaggattgcgatatgttaaaatgatgctttaccctttttttcgcctttattaaatgatctggttcatctgttataatgctgcttttattttcttcctatcgttctcgaagatcctggtggaagcagcttcaatagcagtgtagca

SEQ ID NO: 100931 - DNA, 335 bp, Mimulus guttatus
  Intron number 3 from transcript mgv1a004477m (locus mgv1a0 04477m.g) derived from phytozome v7.0 (chr-ID scaffold_11; pos 2939815 to 2940149)
caaaagcaggtatgttttccaggttttctcaaattacttgaaaagattttggttgagattagtgataaatctgttaggttggtataggaagtgagtaattgattaatgtcaacccattttgaatgcaaaaaaaaattaactttataattggtcatatgtttaagctgactgcatggcgtgcttaggcattaattgaaaatgctagcctccctcttgtcttcttattgatatgtatactttggtttatttgtttaattgcttactgttttgattaatggagttagtatctgcatcatatctttttatttgttttctttatagactcttaggtcaac

SEQ ID NO: 100932 - DNA, 676 bp, Mimulus guttatus
  Intron number 2 from transcript mgv1a004361m (locus mgv1a0 04361m.g) derived from phytozome v7.0 (chr-ID scaffold_215 ; pos 263093 to 263768 reverse strand)
ccgacgaccaccagcaaagccgctctctctatcgggtatttttagaataaatctaatttaattgattcaaatttaatcttcattcaattgatttaatttaatttttggtgtctgttgtgtgtttttgtgtgagtatgttctgttttgctactgtgtcggtgctcattttttttttagttttttttttttggggaaaattccgaaaaatttccgaaaattccgaaaatgaagatttccgaaaaattccgattttccgaaaattccgaaaaaatcggaatcggaatcactttttgaattccgaaaaaatcggaatcggaatcggaagtcgttttggacttccgaaaaaaatcggaaattttccgaaacacccaaatccgatccgatccgtccgatttccacccctattcacacccaattttgtcgacccggattcgagacatccgagtcagtcctcttccttctagggttcatatctctcaccttttgttctaaacctctgaaaatcgattctgcccgaggaggatttgtttctgtggaactccgtttccttctcaattaagtgcgattttcggatttaatttatattgtatgtatgtatttctatttgctagattttcatgttttcgttttttttttctcaggttgtgtgggcagtagtaaagtatacttgcttcag

SEQ ID NO: 100933 - DNA, 866 bp, Mimulus guttatus
  Intron number 1 from transcript mgv1a004361m (locus mgv1a0 04361m.g) derived from phytozome v7.0 (chr-ID scaffold_215 ; pos 264013 to 264878 reverse strand)
gacattactgattcgtccaacaaaatcaggtaaagaatcacacaatataattttgtgctgaaactgttattttagtctttcatgcaagatcgaaaaaagttttcatttattttcttcttttatttctttgttttggttggtctatgcactgtgggagttattggtttattcttttgagtttcttggtcggtaatattgccacagataggctggttcttttgactcttaaatttatgatttttagttgtaattgccaacggcatgaagtataagctgttgtccaaacgtggaaaacactataataattcgtcgaatacttgtactcttggtttgattgaaaacgtagtaattggacaaccaaaccttcactaatgcctataacattgcataaagtggatcacgagtccaggattagagagtccaacaacaatattagaagggttactgatctctattatgatctatcaacttcttcgactaaatcaagggatttctctgcatacaatggcatgtaatatttcaaatatgttagtttaaggtcatattttacatgtgatggttgaaacaggttgcgacaaattttgtatttagcttcatgcgaatagaattatagcaaaataaccctgtaattttggactacattgaatgggcaccaacaccgcgctttgcgcggtgctcccaacactagtatatatatatatatatatatatatatatatatatatatatatatatatatatatatatttatatttgaacatattattattttttaattttctaaaacatacaaaagtcaaaaactcaaaatttattaaaattacttcgcagcctaatttcccgactctctctctgcaatccgacct

SEQ ID NO: 100934 - DNA, 954 bp, Mimulus guttatus
  Intron number 2 from transcript mgv1a015415m (locus mgv1a0 15415m.g) derived from phytozome v7.0 (chr-ID scaffold_159 ; pos 379563 to 380516)
ccacagctgtggtatgtacatatatgattttgtgatctttactttttatttttattttttattttgagctgtattgatacacatgtgaatggctgtcctatttggcttctgattgtgtgtattgttttcattgattttttgtttttgttttttgtctatggattttcttctgttaaattttcactttgtggagttggttaaaccaatctatgttctgttgtggaaaacgaattttgattagaaaaaaagctttacaattgaatgagatgaaggttttctcactcactaagttgcttcatcggctagcaattacgtgtcacctcttggtttcgtctgaactagttcaaatcacagttcatcgacaaagactatatgcggtttcatgtttgctctatgtttgcattggtatgatatctgtttccgaattcgtattcccctgtaaatggtttaggatcaaatttaggagaaaataatgtttctttcacaatcatgctggaactccgtgcttaaaccgggatgtcaacgaaaatggcaattttgaagcaacagaatacaatcatcaattacaactccccctcattaaggaaaccctttccctgctagcattattacttcatttatccaccgattgtctaattcaactattagaatctcattaccaccataaacattgaaagctggattgatgctgaaggcatgattctagtgccgcattaacatactcatatagctttgcttcaccctttattaattgccttttccttctaaacggcaccacccaaattctatcatcttttcttctccaactgtcctaaactcgaacttttttatgactattttactttaactttcttttcttttggctttacgttttttacttggtggtaaacagtttttgtgatacatgttctacaattacttcttgatatttaggcaggctctggaattggtggg

SEQ ID NO: 100935 - DNA, 911 bp, Mimulus guttatus
  Intron number 1 from transcript mgv1a011526m (locus mgv1a0 11526m.g) derived from phytozome v7.0 (chr-ID scaffold_204 ; pos 94705 to 95615)
gtggctccaccaagacccttggaaactttgtcaaggtctgatttttttttttcaccagattatattatttttgattaattttctaatattatatatttcatatatttccttagatgccctttcgatgattaatctatttggtctagattttatttgagcatgtgatcaaaatttgaatcgatggttgattgattatgtcggtaacgatttgcatttacaaacttaatgcgtttgaatatacgatatggtttgtacttgatatatgttgatatatgctgtcagtgtacgtacctaattgacacattgtctgtgtttcgctaacaaacgtgtttgcatttaggctaaatgattctctgtccgattagattgttgagtgaactaatttctaagtatttgttttccgacatagtttttatggcaaattaaggccaccctgaggtatggccaaattatgaaaacccccctcttgtttgggtaattattgggtaattacagccacccctccttttaaatatgtaaatcggttatttacccaaccaaatcgtatatttagtttggtaaatggtatgaaatgttttcgctttggttttacatccctaaattgggttcttttcgtaagataatacatagttgagggagggctgtaatcacccaaattggagggggtttccgtaatttaaccttaactcaggggtggccgtaatttgccctagtttttatgttgtaaaatcttggttttcattaattgttatgtaaaccatcaagtttcttgtaagatttggtagatgacgtattgaattccgttgtatcatcatgaaatatcttcttgattaagaggttattacaatctaatagaataatttattttgtagttgctaatccaaacatgtttcattacaggcaacgtttga

SEQ ID NO: 100936 - DNA, 484 bp, Mimulus guttatus
  Intron number 2 from transcript mgv1a011599m (locus mgv1a0 11599m.g) derived from phytozome v7.0 (chr-ID scaffold_162 ; pos 267605 to 268088 reverse strand)
atcctcgtgccactcataattgttgggcttacaaggtaaactacttctcttgtgttctatattcatgtttctgcaatctgctttgaatgatactgcaattagggttcttgagaatacacgagaaaaattgaaacttgaaattgaactaagaaaacagaatcataaactctatcggcatcgtttaggaattacgattaggctcgatagacaacataatcaagttttgtcaaatgtttgaggtttatatttcaagcccatgattaaagaccgcgttttaatcaagcatataaaggattgtataatcacaaaccccagatataagataataatcacatattgatttatcatggacaacgtgattgattcttagcgattcaatcaattttatcaatcccatcaacattcccaaacgaggcctaatgaaatcggtcttacctttgatctatggtccttgatttttaggttggagatcaaactcggagta

SEQ ID NO: 100937 - DNA, 736 bp, Mimulus guttatus
  Intron number 1 from transcript mgv1a008654m (locus mgv1a0 08654m.g) derived from phytozome v7.0 (chr-ID scaffold_40; pos 957043 to 957778)
gcatctatagttacctcaagaactccaatttgcaggttcctctaccttttaattctacatacacacaatcacaatacacttttgatacatatatttaaattatattttgcatttggtacccatatgtgctgatattgttgtatagaattgctaaaaaaacttctaatattgttaatattagtaagaaaaaaaaactaaatactatgtatttgttcgagcgcacgactctctaaatggtcagtttttagaagatgtacttgtcggttgtcaaaaaattcgaatcatataagcatttttgcataaaaaataacacataattttctagtaatgaattaattcaatgaaccatcatattttatttagagatttaccagtactccattcgtttgattaaagttaatacacgttaattaacaaatttagtaaaaatagagtaattgattttaggaaaaatattattattcgacaaatttactcatttgtagattttcattttctctttgtcaaattcataaatattagggtaaaatttgacaaaaatagaaaataaaaagtcctccaactgaaaatttaaagtgacagataatataatattaaataagagcaacctgaaacctataatatgaaacgaagggagtattttctatgttaataacattaaattttacaattcaaacacttttaatcatatattcattagtttgactacaacacaaattaatcaatctgcagaggg

SEQ ID NO: 100938 - DNA, 492 bp, Mimulus guttatus
  Intron number 1 from transcript mgv1a008042m (locus mgv1a0 08042m.g) derived from phytozome v7.0 (chr-ID scaffold_4; pos 564080 to 564571)
acaaggttcaattttatgttttttgaaattatttttgcttgaattgcgacgttgttttttagggtttgttcttgcatgtttgatttacatgttttggattcgagctttgcctgttttgtccgccttatatgtgaattgtgtatctggattctggattgattcctctggagaagaaacaaaatgatgccatgaaattaaaaaaaaaaaataacataaaaattccaaaggggttttactgcctttagaaacttagacgaagcttgaattcatgaactctgtgctagtctttagcatgttgctcgtttgttaatcgtagttttacggaaagtagctcgatctttgtgctgatagaatgcatggatttccatggacttgtttttcctgattcctctttgtttatgctagtttccgtgttcgaattacaattgtcatttccctcgttattttcggaatacagagtctttttgttttttctccagttggaacaattag

SEQ ID NO: 100939 - DNA, 582 bp, Mimulus guttatus
  Intron number 1 from transcript mgv1a011214m (locus mgv1a0 11214m.g) derived from phytozome v7.0 (chr-ID scaffold_4; pos 1363788 to 1364369)
tgaaggtttgcagctttgattttaccgttgaaagtgatttgaatccttgacacaacatgtttctttcacaatccaaaattagatttgaagtcttagttctaaatacatggcgataaaatatttaaaatgtgcaactgttttctttctttcgggcacgagttcccagctatgcttttgatggtgttggagtaactaaattaattttactttataaattggtgctcatttatttgtaggtgttggatgcatcgatgtacatgccagacgaacataaaaatccacttcaagagtatcaggtgctggcctatatctacatatgtagtttactttgcttatttttctctttcgaacatcacttgcttcacaatttttttatacctataatagctctactttttagcacttttactctaatccaagttgcgaccgatttttctttcttttttttttttttttttttgttgataaacttatcaaacacagctgtttagtgcttaaattcttatcatagttttaaattgaaaattgtcgtcgtcttttttcacaggttgcacatattcccggggctcaattctttgatat

SEQ ID NO: 100940 - DNA, 904 bp, Mimulus guttatus
  Intron number 1 from transcript mgv11b013259m (locus mgv11 b013259m.g) derived from phytozome v7.0 (chr-ID scaffold_2 7; pos 1544159 to 1545062)
gtgatattgtcctcgtcggcctccgcgattatcaggtattcttcacttcctgaattgttgtatgattgtatctgttatttgatgaattccattttttttatgcacaaaagttgatttttgtatctgttcggttttttccttccaattcgatcaagttttttattggttttgttgtgttgttgaataattctgtgttttgtgtgcgtactgttggctatttggtacatttaattcagtttttgtattgttgaattgtggtttgggcgttttcagatgaagctttgtttgtgtgtgtttgtgattgatgccgtcaatttgaattgattaactgaagtgttaaatgttgtttcaatttttacaaataccgttttggttttgttcgctttggcaaaagtcagaataagaaaaaaagtagttctgtagctttctatttcaacttcaatctgctttctattccaacttgaatcgactagattagatatggatgacaaagttatttacgaatgagtgacattgtgaattttagataactcataatatcaaaattatggacattgtgcactcgttcatgaataactttctcactcgacatccggtcttggtgattcaagttgaattacaaagctaattaaaaaaaacccacaacttctgtgtttcgagttttaccaaattcgaactaaaagtttttcaaaatcacatttaaagttgaaactatatttttaaaattgaaagttacttatcacacccctttgattaataaattgtttgtgagatttatcttggagcggattaaggcctcatttggttgttaacatgttgaatactggttttgtttaatgctatatatgtacatagtttggcattttgaaatgctcatctaatattattggatggtgtaactagg

SEQ ID NO: 100941 - DNA, 727 bp, Mimulus guttatus
  Intron number 1 from transcript mgv1a016967m (locus mgv1a0 16967m.g) derived from phytozome v7.0 (chr-ID scaffold_58; pos 1087180 to 1087906 reverse strand)
gatcatcgcaaggaggtaaaaatggcttctttttttttaattattttatgtttctctgttttatgttgaatttttgggatttttcttgagaaattggagctgcccttttgatgtttctgagttttttgtgttctttttttttttttttttaaatcaaaacggtgtcgtagatagtacacaaaaatggtgggtttcaacctttgatttacacacaatcacacacacatacatgcgggtgtgtgtaaattatgtgtggtatggatctctatatatgaaatatatgatgtatgtaattatctgtctgtgttgttaaacaatatatttattgttttatttcagttaactgcatgcaatttagtgaattaagtataatatatatatttgtgttgtatatattgttatctgcctgcttcttaaaaattgtctgatttagctgaaacctctttgtaaaagaaagattcttcttacctcctatatttttgtctgtaatagtggatctggttaaattctttaattaatttttttataattcttgggcaaagatttcatttttgattcatgaaattcttgtttgtgtttggatattcgaagcataaattatccttatttttatcggttgtaagaataattcgacgttttatgatcaagaactcttgtaataatactaccaatttcacttttcttgagtgcctaatgaatcgtaaatcgtttgtgattgtgtagagaa

SEQ ID NO: 100942 - DNA, 287 bp, Mimulus guttatus
  Intron number 1 from transcript mgv1a008451m (locus mgv1a0 08451m.g) derived from phytozome v7.0 (chr-ID scaffold_23; pos 1333055 to 1333341 reverse strand)
gcacccgtttaatcccacttccttatatatcaaaggttagtcggcccatttccctttttctattcatttctctactgtgtttcctcacttcaatttttttttttttgagttttaatgtattttattagtgttctaaacagaggaagaaaacaggggcagtcatcattattaattaattgtagaatatatttggtcacgagtaatgaaaaaaactgtcatgtttattttatattttcatgtaatatatattagattggagcttccacttttgcaactcaagcggcgtc

SEQ ID NO: 100943 - DNA, 890 bp, Mimulus guttatus
  Intron number 1 from transcript mgv1a013584m (locus mgv1a0 13584m.g) derived from phytozome v7.0 (chr-ID scaffold_79; pos 683859 to 684748 reverse strand)
gcccctgccctccgcaagtgagttctttttagggattccacttttaatttggttcttgtgatatgtatgaatatgacttagatgtgtaatttgctgacctagaggatttggaattaattcatttgctgcttacctgctgcgtttgtggaaatactattcatttttgttattcagttcctctaaaattggtggtagctagagtaattctgaaagaaagctaagtcattttttgtacaattgaacatagctcggaatagaaacgtgatcgacaaaagaacttccttaaataaatggttaatcttctgataaataatcgatatgcctgctatattgatctccactttatgtggggaaatgtaatggtgcaatctctagttatgatttacaaactgcttggaatattattagaaattgcagaacgtgtgtgcagatactctttcttgaggtgtcgttcttcgtccatcctttttgcagtatcttttcttgcttcttcaccctgcttcaggtgtgggtgttttatatgttgacctttagctgtgtggtcattttatggatttcacgataaaaaacaataccgttccaagctgtggctttatttctggaaacatgtatcagtagatggatatgtaatagcaaacgccagatccaaaaaattggttaaacacttgtcccgtgtgggttcaagtcaagttatttgttgttgtattcttttattaccgaactggcttttgatatttgttgtccaaacttttccatgcggataagatgttatccattcgggtgaagtaattgcgatttcgttaggcctttcgagtttagacatgttactctgcaatatgtgttcatctttagaaataattcatgtgtttcttggcagagtgtacgaccaa

SEQ ID NO: 100944 - DNA, 993 bp, Mimulus guttatus
  Intron number 1 from transcript mgv1a025842m (locus mgv1a0 25842m.g) derived from phytozome v7.0 (chr-ID scaffold_7; pos 240514 to 241506)
tggcaacaagtacttcatcaggcaactcatctgtaacattattattcgtaacactaagtcgcttaattgtaaaaaaaaaaaaattgatttagtagctaaatcatttcaaagcatttcgatgagagggaccctaaatcttttcggtcgaaagaagagagcggaaatgcatcgccagattttaatgcgtattgagattataatgtgcatcaagatgattttagcactgtaccggcaagtgaaaatggatcggttagtccaagttccgaccgcgcgattttggctgcacatcttcagccgagttcttgtccaccttgaaaagaaaaaacatataaaatgtgtaaatatagtacattttctttgtctaccaattgaacactacggctgagaatgcgaaattttacaaacattgtttccgatttttcattttttattgggttttgtatatatgaattggtgaagtaatctgacaaaaagattgtatatttaccgggtaaataatcgttcagttgggcagaaaaatgaaaaatcaattcttaattccaagagattttgaatccctcaatatgatcgaatgctggtttatttcttgcagaaaaaactcatcactaattcatgaaaatgacgcactaaattctcgtttctagaaatgaaagaaaatgctgagaaactgtcctatctatatttaattgcctaccaaataataggatatgttataatctgagtagacttttaacaattcaaaataaaattatgctaatgaatctttctacccttcatttttttttgtttaatgaaactttatcgattcaacttagttaattgttccttcgtatatgtatgtgtgtatacatggggattgcctgatcaagaaataagatcaaaattgcagaacatgaaaatgcatttattcatctctctctcactacttagtctatttctatcattgtgcaattcacagcgaaatactacctttcaagttggtgtgattcttga

SEQ ID NO: 100945 - DNA, 797 bp, Mimulus guttatus
  Intron number 1 from transcript mgv1a003139m (locus mgv1a0 03139m.g) derived from phytozome v7.0 (chr-ID scaffold_207 ; pos 343474 to 344270)
aggtgttaaattacgaaaaactccctcttgtttggataattgcatcttacccctcaactatgaatcttcttacatctccacccttatggtgtcaaattcaacataatcatctagataccgtggaatgtgctatagtttgtactcgttttgtgtaaaaatacattttctgatgaaccacaatctgatatatacaagccaaaaaatacatcttatgatcattttgcttcaaaatgtggagctccaatgggataaaagcgtgaaaaatgataatattccatataatcaagaagattccactaacttcgaaaccgcaagggtgagcgtataagaaaatttatagttaaggggttgttgtaattactcaaacaagagggaagttttcgtaattttatcatagctcaggggtagttgtaatttacccaaaaaggaaacattagccaattgacaaaaaagtcccgattgtacactttgcagtcggaggtattttcaagacggcagtcggcaaacccattttgacatttgtaaaaatgcaagctttgacccattttgttcatgcatcatcaatcaagcagcccttcttccttcttctttcctagtcatataaatctagagagagaaagaagagagagagagagagttgaaaggtagtttcttgattattaattgctaaaatcagatattgttttttcaaaatgaagccaattttcttgatttacattcttcttcttacccttttcgtctttttccctccaatttcttcagcaaacacaaccacaatctgccctctggatctcgat

SEQ ID NO: 100946 - DNA, 796 bp, Mimulus guttatus
  Intron number 1 from transcript mgv1a007825m (locus mgv1a0 07825m.g) derived from phytozome v7.0 (chr-ID scaffold_195 ; pos 114564 to 115359 reverse strand)
ttctcccgccacctcctcaatcttcttctccagaggtactctccatatttaatttattaatttcttttttcttctgctttttttattttttatttttaaaatgatcaactttcaatttattcaatgatgttgaaatgtttatatgtttgattattattcgggcttggctttgctgttgttgttgtaatttgactcggaaaactagcggtttccgaagagtaattgcatttaggcaaaatttacttacagttggatgtgtgatcctcatcaaaattcgaacttgaatttagtgttgtatttggtgtgtgtatgttagtgtgtgtgtgattgttatatgtataattgtattagctaaccatatgatcaaatcaaccaggaatggtttaaagaagaaaactgatcagatcagtagtgaaaatgtattatagggattgtaagtttagttttaccgaactttcataaatacacaataaaaaaagatacagagatacatgtttattcatacatatatatatgcagataacctactagtgtttatatgttaaaacatgtgtttgtccatgtgctttgctaggtgtttaatctggaaaattggagattttcgcccttttttcagatggaataagaattgtagtttgataaaatgacgaggcgaaactttgcggttaaggcttttgtacaactctattatatctattacgtaacacacgttttcttcaaaaggagcacataacacataactcataaatccgagctcgtcgtttcaggcacaaaaaagtggcttaccttgacactg

SEQ ID NO: 100947 - DNA, 806 bp, Mimulus guttatus
  Intron number 2 from transcript mgv1a012790m (locus mgv1a0 12790m.g) derived from phytozome v7.0 (chr-ID scaffold_64; pos 69146 to 69951 reverse strand)
agagcttttctgtcaaagacacattgtaagtggtctttttggttcatttcttccttgacaaattaataaatattccttttttcctgagctgaagatgccatagctagctaattgacctggtaatcaaatacttgactaggctgctgggtactatagtttactagctagttgatgaacctaactatacccaatgtcattttctattgcacacatacttttatgtataaatatattttataccaggtatttgtagttcagttaaacctgaaggtgtaagctgaatattagtcgaaatgaattttccttttttcctattttctgcctctaggtatctattgtctcctctctgcctctgattttctttaatattttttcttatggagcgagagaattggtctctatacataaaattattttctagtcgtctatccacatatatctttttggtgaatgaagtcaaaaaggaaattgagcgaggaagtagtccaattctcaatgtgttatgcaactatgagaaggatggcaagaaccatactttttgtatgggaaccaaattaagttaaacaagtttgagagatggttattgtaatacttaataacagtcttgcaatatcctagctagtggttgggcaaccagcacatttgtggcttgttaccttggtaaaataaaatcaaaggcattgattcgattttaggtgtctatttgtttagttgcctttgtgcattcatctgtagcatgcatagagagttacaatatcttaacttacaacagaaaatttgaaaatggactttgtttttgataatag

SEQ ID NO: 100948 - DNA, 534 bp, Mimulus guttatus
  Intron number 1 from transcript mgv1a008891m (locus mgv1a0 08891m.g) derived from phytozome v7.0 (chr-ID scaffold_586 ; pos 47525 to 48058 reverse strand)
tattatttgggcgtttcttttgcctttatataaatgtaagatctttatccctgtttcttttatacaaggttcttgatttttttttaaccgctgaataaggttcttgaattattttttaaaccgcgcgttctttgtgtaagtttgatttttgtatttattttcatgtgggcatttcgtaattatgttttttttctgttgcgcatgatctgcaattttggtttttttttcttcccgattttggattgtagatttgggcaagtttacttgtggattgtagatttgggcatgtttacttgtggattgtagattttggattgtaaatttggctctatttcgggtgatgataacttacgtagttcttcttgaaatggaatgaattgggcgattttcgtagtcttgatctcttgtcctgatttatgttgtagtatgcaaaaaacttcgatatatgatagtatagtcatattatacatatttattactgtgtttgtgcaagtataaataataaacttataatgtacctcgtttcactacaga

SEQ ID NO: 100949 - DNA, 737 bp, Mimulus guttatus
  Intron number 1 from transcript mgv1a015944m (locus mgv1a0 15944m.g) derived from phytozome v7.0 (chr-ID scaffold_39; pos 458350 to 459086 reverse strand)
taatcatttacttcccgagttttctttcctcacaggttagtttcaattttaattgttctttgtttcccacgaattatttgttgcgttgattatgctgtgttccttggattaattattggtaattaattgtttatcatttcttcttcctttttcctttgtatatcatgttctctgtaaggaggagtttcgtttgttgattatgccttggagaaattgggtttctgtaaggaattaggtgatggattgattgggggcgaaagggaaaattagggttttcttttgtttgttgtatgggattgatgaaatttgatttggttgggtattttattgaactgtgttgaattggggagacgatcgcagtagttgtagctctattgatttccatgtgatacaaagcagaaatcgtaatgatcgaattcagtatgtagagttgaatgtaaaggattggggcactaacggtattagcaattttaatctatttgtggattatgtggtttaggtcactcttgaacatttaatggctatgttatatttcttagctgctttacggctttgctcggtcgaattattacgatctttgtttttcatcaaagtgcattttatcttcttgtttctagtcaagtattttcgttccatctttctagaatgtgataaaaaagaaagacgtatgctgatagtcgtgttttcttacatttgttaaaggggtactcggacgtcattctggaaggaggattata

SEQ ID NO: 100950 - DNA, 541 bp, Mimulus guttatus
  Intron number 1 from transcript mgv1a023517m (locus mgv1a0 23517m.g) derived from phytozome v7.0 (chr-ID scaffold_6; pos 1434089 to 1434629)
cgcctaaggccgcctcctgaacctccgccgccaaggtctgctcttcccatcatatatatatatatatatatatatatatatatatatatatatatatatatatatatagtttctctttcccgtcttctttttcttgatttaatttatttctgttcttgatagttgatatatctcttgataaaatgttttttctgtgcgtcatgtttgatttgtggtgatgaattaacatctattaaactaatctattttttaatatttttcacccgattttggcccgttgatagagatttgaaattcttagacccattaatgatatatatcatatatggatttaattaagatgtattagatctgtataacaacattcatatttggatctcgtattaatatgttatccgtcatcatttctcgattagtttgcttgcatgcagaagttcattggattgaatttacttcttccatataatttatatatatgatttatttatggacgaagtttacgacctctcttttcttttcttttttggtttttggcaaatag

SEQ ID NO: 100951 - DNA, 630 bp, Mimulus guttatus
  Intron number 1 from transcript mgv1a017683m (locus mgv1a0 17683m.g) derived from phytozome v7.0 (chr-ID scaffold_44; pos 1588337 to 1588966)
cattggatacattattccgatagggttctaatggactattacttttagctagttatggagataacatagagttatggggagttatggggtgacatgactcccccaatatttcttaaatcactcataactctttgttgtcttcaccatttcctgaaaccaatagtccgttagaactctatcgtaataacgtattcagtgcattataccattagagtttataactacgtttcaagggggtgagtgtaattatcgataccacatggaccttaaagttatttaagtatacctcaggggtgtgggtgtaattatccatatttcagaaacttgttcatcttgaagtaaaaacaaaaattgatgggaaaaaaatgtttaaatttgaaagtgattctgattttttagtgggtgttatttgtgttctatttgatgaagcattccgatttttttttcttttttgtttattggctcagttggtaactttcatggcatttgactgactattcttgctttcggttttaaatttcatttggaataatactttctcgtgctttgagttttgaagaattttctgatcaatagagaaacttgttgtttgcagccaagatacattcaaggattaatcgacaaggcgaa

SEQ ID NO: 100952 - DNA, 722 bp, Mimulus guttatus
  Intron number 1 from transcript mgv1a011347m (locus mgv1a0 11347m.g) derived from phytozome v7.0 (chr-ID scaffold_17; pos 1848630 to 1849351)
cttttttgttcactcgttctctactcccacacaacgtacgtctttctttcttcaactatgtcttctgtgtgtgtgtgtgtgtgtgtgtgtgtgtgtgtgtgtgtgtgtgtgtgtgtgttgggggtgggggtggggggtgcttttgctttcgattatgttctttgaattattttgtcctagattcttgaattaccggtaggagatagcagagtaggttcttggttctgtatgttttatgtcatcctttttcaagaaaaacaaaacagggtttattcttttgttgtgaaattatttcaactccaagcatgcatgtatttgttgcatcgaagtggcgtatttatcatattatatccgtatttactatcacgtgtcaatttagctgtcatttgttatcttgggctgttctgaatgtcatttggacaattgaattttgctatattgtacttcacatagcaaaaggacaggtatatcttctaacattagacgtgaatcttgaatttggacaagaaaacatagttaactagacagatacacttaacttatgaaacctttttcggttttcatcttctttcggctatattcagaccaagaaaatttgcatatattgaacctgtgaacagatgtctaatttatgatatttctctacctaattactgatgaagaataaataaaaaaaaaaaattgattgtttttttttttaaacagagggtgttggagaagca

SEQ ID NO: 100953 - DNA, 1058 bp, Mimulus guttatus
  Intron number 2 from transcript mgv1a027110m (locus mgv1a0 27110m.g) derived from phytozome v7.0 (chr-ID scaffold_16; pos 206362 to 207419)
tctggagattgagtgcaactcctcatccggggccggttttcactacaaaaaaaaggactttatgtgacgcatttttttgtcgcaagagcttaatattttgtcactaaaaactttatttgacaatttgtttcgtcgcaggcgtcgtcgcgtaggccccgtcgcgtaaggtatttggcgacaaaatgatgttttcgtcacaaatattgtgacaaatcaaaatttcgtcacaagtgttttactttttgcgacaaaaccttcgtcacataaacagtttgatttcgtcagtacaaacccttttcgtcacaaaaaccaggttcttcaattggttgttgtgacaaattattttgtcacataaaattcaagatctactgagacaataatttcgtcccaagaagttttttttttccaaattaaaatattttgcttttctatttatatgctgaagaaaattaatattattatcaccatattaattcaaaaaaataatatatagaactaaacaatgattctagaacaaaaaaataaatacttgtattgcaacatattgtaccattacacatttacaaaatgctggagttaataaaattacattgaaactcatatttcaaaaatttaactacaaaaagtaaatacacgtgcgtaaacttcccatcataagtgtttccagcttctccttcttccaataactcagccatgcatgatataccttcttcttcatgaactacaaaagaagcaccacgatatattaaaatttttaacgcaagtaccagaccgagtgtgaaggaaaaaggcaacattagacgacaatcttggagtagaaatcacattagttaattaaatgtacaaaaatcacacacctgatttctccagtaaaatcaccgtcttttccaacccaacaattctaggcggctatttctatccaatcagataacgagctcttcacttgatcaatgtaaacaaaagaaggagctatacaacaagatctgcaataattgaggtaatgtagataatttgtggtggcagccgccgagttttctctagacgagatcggagatttg

SEQ ID NO: 100954 - DNA, 1012 bp, Mimulus guttatus
  Intron number 1 from transcript mgv1a010759m (locus mgv1a0 10759m.g) derived from phytozome v7.0 (chr-ID scaffold_335 ; pos 20427 to 21438)
agcctaccgctcgaggtatctatttttaatttttggtacaattattttgtaatttgatgttaattcgtgattttccccaatttttgctgttttttttatactggaaatggttgttatttttatataattttaggaaagtaatttgagattagtgaccgtctgctttagcacgatagctccagatttttcgatttgttgcgtgattttgttaattgggtttttatttcagctaattaattgtctagaaaatgaggtttccccaaattaagagaaatgatcagatcagtgtgacctttttcagaaattgttctaatgaatctcttattagtgttgccgaatttaccttttgttttgttgctttcgaggatggatctggatagaggtgttcatttgaagataactgttgcttgatatgctgtaattactttgggaatatgtggttttgctaccattcatgattttaccttttttaattgatgataatgtctgtggatatgcacttgatttgatttggagtttttaccaagacttgttcattggacaaatcgaactttgtaactgaattaacttgagttttatatgattaagaataatggacttgggaattaaaagtctccggtttaatttattgctcccgtgttttttgtttgtccccgttttgattctgcgacgcacaggttttagtttacctattgaaaacactgatttcatgagatttgacctgttatcgactaatagaactaaatgaactttttctttttatgatcatgaatgcacgatttttcctttcataatatttgtattgtgtaattacggcttgatttgaacttcgagatcctctattttttttttttaaaccttttctgtccattttgatttcatgtgatggaacaagatgctgcatatgagaaaaaaaacatagtgatctttcttcttctcaattcttgtacatcaatcctgtttgattgtctctgtaatcgaacatctttttctcccaggagaatatattcga

SEQ ID NO: 100955 - DNA, 544 bp, Mimulus guttatus
  Intron number 1 from transcript mgv1a011625m (locus mgv1a0 11625m.g) derived from phytozome v7.0 (chr-ID scaffold_152 ; pos 137333 to 137876)
aggctttttcaaatccttcatttcctccgtgtggggtatgcatttctcttatgctcttttttttttttttttcttttttgcgttaattgtacttattaaataaatcatatttttcccccaatttttctttgttattgacattgatgcttatccaatcatttataagttttgtttttaatttttttgtttattttttctgtaaaaataaaccttcagaaatttgactatttaaaaaatttgaaaacttgcaaatttaggaacttttggcactcaaattgtatttatttcataatcaaaggaattcgaaataaatatttaaaaaaacaaaaaaaaaaaaaaagaagaagaaaagaattcagttaatggatcataaaaacataaaggaggcacaatgtaattaaattagcatgtcctagtgacaattctaattaaagaaagataaaatttcctctacgtctgatttgcatgtttgattggtgactcatgtactttgtatatttattacaccaacaggtaagtgaatattttgaagtaggtagtgggt

SEQ ID NO: 100956 - DNA, 760 bp, Mimulus guttatus
  Intron number 1 from transcript mgv1a012934m (locus mgv1a0 12934m.g) derived from phytozome v7.0 (chr-ID scaffold_13; pos 745170 to 745929 reverse strand)
aattctgcagtagcgatcttgaagtttgtgagtttttttttttttttgttatccagttgaatgaatcttgatttttcaggtaaagattgtatttttattgatgtagtgtcaagtttgctgatctgggattttactggatttaggttgggattttgatgttgattctgattctgatactgatttctgatactgatactgattcttgatctgaattgtagagagagagagaaaaaaaaaaagtggatgacttttaagtctaattgctgatctatgctaataattgctttgtggagataaatcggtgtgagctaaggagctatcttatacggttaaacatcagtcgggactcgggtctagtcgggactcgggtctaggaaaattctattaatttagcaaaatattaaattatcgagttaataatttagtacgttctcaaaaccaattgggattggaagaatttattatttaagtgaggctattaatttatcgactgtattattgtaaaatatgtcatgagtgaaaatttattgtccattgttatagtgttaactaactaagttgtcggtctttaaacatgttatttgattctgaaaattttatagcatttaagggatcaattatattctttataacgaagctaattaattataaaatgctctttttttcgatattttttgctgctcgagaactatatattcactctcttgtggttgttatatggacaggtttgttgggtagtgttgctccttgtgtgctttat

SEQ ID NO: 100957 - DNA, 627 bp, Mimulus guttatus
  Intron number 1 from transcript mgv11b015320m (locus mgv11 b015320m.g) derived from phytozome v7.0 (chr-ID scaffold_4 176; pos 594 to 1220)
tccatttgagcgggtgtgtttgtgcatgtttgttgatttgtattaatgtcctaattgtagtttgtgttttcattatcctttttgcggatgcagttttgcgtgagtaattttgtgcatgatttggtacttttacttatgtgcgtatttttgtagcgagtgtttttgtgcacgtttcttgatgcgcattcgtgtcctcgaactgtagcgggtattttcatgatcgctgttggaatccaattttgaccatgttcgagtccgaatttggaaatttgacattagacaggaattgtagccagctgaaatagctttctaatgccgccggaaccagtcgtttggagaccggatgagaaagttatgctcgacttcgtggacactaccgaagatgttgagggatcctctcttctattttgattttattttgctaattgcaactcttttcttactctttgatcatttttgcttcatggacacctaattatcaagttgtacctatagaatactaaatccaccaattgaaacagaaatataaagtaaaccataaaaaaatccacgtaaacgtaaacgttgagtgttatttctacactccaccgtatcttttgtatcttgtgtttttgctgtagtttggtt

SEQ ID NO: 100958 - DNA, 905 bp, Mimulus guttatus
  Intron number 2 from transcript mgv11b015320m (locus mgv11 b015320m.g) derived from phytozome v7.0 (chr-ID scaffold_4 176; pos 1318 to 2222)
tccatttgagcgggtgtgtttgtgcatgtttgttgatttgtattaatgtcctaattgtagtttgtgttttcattatcctttttgcggatgcagttttgcgtgagtaattttgtgcatgatttggtacttttacttatgtgcgtatttttgtagcgagtgtatttgtgcacgttacttgatgcgcatacctgtcctcgaactgtagcgggtatatcatgatcgctggtggaatgggattttgaccatgtacgagtccgaatttggaaatttgacattagacaggaattgtagccagctgaaatagctttctaatgccgccggaaccagtcgatttggagtccggatgagaaagttatgctcgacttcgtggacactaccgaagatgttgagggatccactcttctattttgattttattgggcctaattgcaactcttttcttactctttgatcatttttgcttcatggacacctaattatcaatttgtacctatagaatactaaatccaccaattgaaacataaatataaattaaaccataaaaaaatccacgtaaacgtaaacgttgagtgtaatttctacactccaccgtatcttttgtatcttgtgtttttgctgttgtttggttatgcgcattaaagtcctagtgttgtacttcgtgtttttacgaacgttgttgggaatgcacttttgcgcatgtttttttacatgtatggttgtgcatgtccatttgagcgagtgtgtttgtgcatgtttgttgatttgtattaatgtcctaggattgtagtttgtgttttcatgatccttttggcggatgcagttttgcgtgagtaattttgtgcatgattttgtacttttacttatgtgcgtatttttgtagcgagtgtttttgtgcacgtttcttg

SEQ ID NO: 100959 - DNA, 592 bp, Mimulus guttatus
  Intron number 3 from transcript mgv1a003830m (locus mgv1a0 03830m.g) derived from phytozome v7.0 (chr-ID scaffold_87; pos 571854 to 572445)
tgagagaaagatttcgtctagacgggttagcatttcaaatttaactaaatttttctagtttttttttacaaatttttatatcatatggctatattttctcatattataccgacctttattattgaaaggctattttgcataaatacccctcttgttggcaagagttacatgtttgaccctgaaccatattatgcaaatgccgacccatttccactttttatgtacattgtagcttgcataacattagcaacaattgtgcagtgaataatacacaaagatatgggcataataattgagacagtgctactgaacacaacatctactagattgatatgcaataaatgagatgttgaatttgcttttatagaaactactgccttggaccgtaaaatatttttatgacatgcaaataaaaaaattatgaagctcatattgtagctcacttttctgaaggtcaactcttttgtgtaatattcttctttgataatatagatatttgtatatagcttgagatcgttattcgttgcgtttcatgttctgttctctctgactcgtaggtcggatatatccgaagaaaaatttctacattatt

SEQ ID NO: 100960 - DNA, 1056 bp, Mimulus guttatus
  Intron number 1 from transcript mgv1a009674m (locus mgv1a0 09674m.g) derived from phytozome v7.0 (chr-ID scaffold_3; pos 3725813 to 3726868 reverse strand)
tggtcaagtcagagttcttgttgtgggagattcaggtaaccctaattattgtttttttgtcgtaaaagaattccgtgagctcttctattgtattgaattgctaaaaaatgcttttgaattggttgatctaatagtattgtttctttgagctttatgatagtgtatctcaccagttatgggtttaaaatgcaattgtttcaagaactgcaatgggatttacaatgactacaatttaggaatatgaaaatttatttgcttatttcgattcacaatgggaacttcatgtagtgaagtgaagcttgataaagacctttataaggtgatttgagaatattaatcagattatatggataagcataataaaaaataaaataaaaacggatactaatcaggttagatgttatagaagtgggaaaaagtgggtggtttaatccgtggctttgagttatttcagcaagtaaagaaaatattacgggttattctagtttcaagattatatagataggttagatgttttaggctcggccattttcctagatagattgggggttaattgtgattgttgaagagttaactcgtactattcaagctatgcgatcaaattgggagtatcgggaaacttatagactgtatacaaccatttattgcatatgaactcactaattgactcagataggatttactcttcctatacggtcatgctactacctgcattgtcacacacactgtaactgcagtttggatatttgcttagaaattgcaaacttctgtgatcttgtatttaataatgttttaaccatcgatactacgggacacatctgaggaaccaactgtgaaacttcgtatatattgaaatttatttggatattattacttcatgtgctttaacacactgtctcaagtggttgtgaaatactgctctcacgtggcagcaactttttcaattttgtgttgcactgttcaattcctaataatatacataatagtattaacaagatccatattaactgcaatcttggttcaggcgtggggaaaacttctcttgttcatctgata

SEQ ID NO: 100961 - DNA, 671 bp, Mimulus guttatus
  Intron number 2 from transcript mgv1a016910m (locus mgv1a0 16927m.g) derived from phytozome v7.0 (chr-ID scaffold_4; pos 3239246 to 3239916 reverse strand)
cgttgctccacgaatccacgcttggaatattgaaggtatttatttacatttttttcaatgcttacagctatcgaatttgccgtaattcctgtttgtatttgaattgacttttatgtgatcttccagttgaatgtgatatttgtttatgtgcggcttttaataactaagatattcttcatctctctggttccacattttccgcacctacaattgtgtcgttctgttgtattgatgtacttttctgttttccggttcaggaacggatatatttgtgccttaaaatgttcatctttctcaattatgattacagattagtttgattggcagtgtattttgataaatggccacacttattgtttagttttcgagtatatttttcttgagaaatgaccctgatcgaactttagctcctacttttcagggaaattataaggttttagtggttaaataggcataggaacttcaaatcaggcaatttaacttactattagacaattttctgacagtaggtgatatttcagaagataaacacaacagatagttttttgacatttatccatcacaccaactttttattgttattttgtacattgttatatttaaggttcaacaccaagttctcaaaataaaagaggcattctttttcatcttgtagggctaaaaaggactag

SEQ ID NO: 100962 - DNA, 1014 bp, Mimulus guttatus
  Intron number 2 from transcript mgv1a004069m (locus mgv1a0 04069m.g) derived from phytozome v7.0 (chr-ID scaffold_27; pos 248575 to 249588)
tcaagtcttcccttggtcctgttggcctcgacaaggtacttctcgctttcatttctccttcttcttttttccacgcagaagcgcgtttatgttgaagctgaataggacaatcatttcagtatggagagtagtgggagttggaacaacatgggctgagatggatatgtagtctatttttttaattattttttgcacaactgtgttcctgctgctgatattcatcaaatgcacatagttgtagcacagttgaaatgtaaaagatgcacattgcaaaatctttttaaacgattttcaagatcttttatagacaagtgtggttttagcaggtatgcaagtggaaattaatcttgaaggattaagtgaatacgaatttgctagtatccttttcttttgttttataaaaatgtcaccaagagttcaatgttcggggaatagtgttttgaatattgctagattgggttactgcttatattagcattagcaacatatctggtcatacattggctaaagctggtacaggagaaaagaatcatatacatccaaatcctatctttttttttacattatgaggggcaatagctctggatttgctttcatttatatggagattccattaaatagaaatatatgcttattcatatgaaacattttccttggtatcttgttttgctcattttacgttgttctttgttcttacattgaaatgatagattgatcaggattttgtgctatttgatagtgctattacctatgagaggaaaaactagtgattgagttactcttgcttggtttttttactaattaattttagcgagtaactgtcagcaagaaatgtggcataacttgccttttgtgatgttcgtagtacttgacggtttatttttacagtctagcttgttggaccaaaatgagagggttagtagagtgtgtcctttaaatatgtatttgaatagttctgttggacttgaaatatttgacaattaacttttctcatgtacgtttggcacttaacag

SEQ ID NO: 100963 - DNA, 902 bp, Mimulus guttatus
  Intron number 1 from transcript mgv1a011280m (locus mgv1a0 11280m.g) derived from phytozome v7.0 (chr-ID scaffold_69; pos 910854 to 911755)
attcatcactcgaagctcgccatatccagattctcgtcagtttttctttcctttctgaattttctagatgcttgttgttgtttcttatttatttttttggattaattttgtttggcgaaaatggggaatttgtgatggaaatatctgtggcttctgctgtattggtaataatgtttgctgatagtgggcattttgaattcgatttgcgttacggttgagttactttgatttttggtgggttttttttttaaggttatgatcgaaatttcgacattggattgtttcgtttcagtgattttgatatgtttagggttcaatttggcctgaatttgatcttgatgctgctcttctgacatgcccaattttgcacgtgtttgttccttaatttcattgaaccagaggggtgttggtatgttaagtactttatgttgaattgtgagatggagaaatctgtgttttcttgtgtgtgaaggaattagaagtcgtttgggatttgagtcgtggatgccagaatcggtgatgaaaaaaaacattagggatctcttctttcgttgcttgattttgaagaaatgtgaataacaagttcgtatgaatgtagtttgctttggcataattctttttcggttttggttccaatgttattctatgggtgatacttcggaaattgacttttattgattagcttgaccctttttcatctttacgtgaaacatgtctcgaaaaatagaaccaaatgcagcagtagttttagatacccccgataagtttatgatccctcatttttttttttgctgctattttacttccttctgttcatttaccttctcggataccaaccatagcaatattcttatcctgcttattttcttgatcttaaaataacagtatatccgcctcgagaa

SEQ ID NO: 100964 - DNA, 633 bp, Mimulus guttatus
  Intron number 2 from transcript mgv1a010168m (locus mgv1a0 10168m.g) derived from phytozome v7.0 (chr-ID scaffold_163 ; pos 346208 to 346840 reverse strand)
tcctttcctcgctaggaattctccattaatcccctgtaagtttcattcgcatttcaaattttttttttcctacccgccaggtgtttgctttattgtctcaatgaaacttgtccgttatttttcgtgtcatattgcagtttctttcctctgtgttgtacttatgcatgggatacgacattcattgcaatgcgtagatcgatcgatcgatagatagatactactaatgaagattctattacaatgtgttcttgaaatttaatttatttttttggtctgcatttggattagatgatttgaaggagggatttcaaatccgtgattataaatcaatttatcttgtttgaatcaagtcattcgataaggaatttcaaattcgtagctcgaatctttcgtttcctttttagcaactgtggtggattttaagtcctttttcattgaaatcgtttcgaatcatgcccgctttttagtcatttcataccacgctcgtttttttttttctaccgtaaattagtgcctaaagtcctcaaccgtcgtttaaatgtacacttagagattttgagtgtaattacttcatgccattaacactaaaaatatagtttaactcttcgtttcccttctatcgagcaggtactg

SEQ ID NO: 100965 - DNA, 714 bp, Mimulus guttatus
  Intron number 1 from transcript mgv1a018711m (locus mgv1a0 18711m.g) derived from phytozome v7.0 (chr-ID scaffold_79; pos 837489 to 838202 reverse strand)
tggccccgacgaaggaagcgcaggcaagatttcatgttttctgtaccaatttaaatttgttgtgggcacaagtagttaattataggttagttaagttaatatattttcgtgtttgataagttgatattttatgtattggttacttgtgttcggttgtttggatgtatggtgctgcaaatgacgaatgtgttcttttagcaataattttgctgtgaatgttatcgtatttgtcgtttaccgtctaaaaaaattaaaatctaatttatgtgatgtgattcccgtctggagattacttttttgatagatacagtctggtttctgtttatttgcatattcttttgtatgaaatcgaaacgaggtgattcctgttcggaggttacttttgtacagatacaggcctcttatcaccttatgtgtatatatttttttgtatggaatcgacatgaaggcattctgtagctatgagtgtagacgagttcaaacaggtttgaatttttttgtgaatttctcatcgaagtatgagtttaattatgctttgtttattttcacgatattattccaaaatgttctatattttcttccatggttgcacatttcacatgtgccttttatttttttttcatatttacttaaaaagttactggttattgaagagccatatttttaatgaatgtattcacattttccaggagttccagttgtcacagttatatc

SEQ ID NO: 100966 - DNA, 703 bp, Mimulus guttatus
  Intron number 1 from transcript mgv1a006423m (locus mgv1a0 06426m.g) derived from phytozome v7.0 (chr-ID scaffold_79; pos 94280 to 94982 reverse strand)
taatctgctgctggggaacccttttcgcttttgaggtgacttcaattttctttcttcatctttggttttcaattgaatctttcttatcgattcccgtttcatttgcagcttaattggcttcttcttcttgttttttttttgagtaatcttgatttttttattttggttgtcattttgttctctgtttgttctgtatgtaatgcaatcaaaatgatgcctgctgctatgataatcttgtcaaaggatttttagtttcttagcataataatggttctgagttctgacagagatttaaatcgactaatatagagaatatacagtttttactttaaatgatggtaggaaatcttgtcttcctgataaatttatgattttgatacaatgttcttaccttgtgttttgcattgtttccgctagaaaaatgtgtcgtacttgattacacatatttgttaggacagttttgtgacactgaatggcaaatgtatcttgtgcatcatgatatatcttaagttcatctgatgtttgggtaaaatcgtatgtacttcattggacatgtcttctgtgtttctggtctattattatcttatcaatcaagattattaaaccgaattcttataggaggaggaggaggaggaggacgacttgagaaatcctccaccaagaaagaaagatctggtttctcccttcatgaaaccaaaagaga

SEQ ID NO: 100967 - DNA, 900 bp, Mimulus guttatus
  Intron number 4 from transcript mgv1a011828m (locus mgv1a0 11828m.g) derived from phytozome v7.0 (chr-ID scaffold_11; pos 1109475 to 1110374 reverse strand)
cacgtcatcattgacggcgttatcggtgcacctaggtttctctctctctctctctctctctctctctctctctctctatttctctctctctctctctcatttttaactactttcatttttagattttagttaggtggtgtttgcccaaaccaaacatattattattattattgatatctaacttcaaagttgtaagtgcattttgagacaattcatcaagtttttctcaccctaattgactttttattttcttccaaaaacttttgcatattcaaaactttgaaagattcttgatgtatgagagatcctgtgagaatctcgttactcttttctcctaaccaattgaaatttctcaaaataatacaaaaataaaatcaaaataataataaataaaacaatctagtatctatatatgatgtttcttacttttgtagatgtgtagcaaagatatccacatctagtttttttttttttgataagttatccacatctagttttcttgtggataagatccaccaaaaagatttttttgggggtgtaaagttaaatccacccccaaacgggatttagatttttattttatttttcattttttttgtatttctcataccaaggtagatcaagtactgtcaattcattgtcattgattcctcttgactcatatatagtgtctgaattccacaccaaaaaaaaaaagagaaagaaaacaaatgatgaattgccacaatcggactttatgctgtcgaataaagtcccaaaattatcctatttttattttttattttttaattttttaatttattatatgttagaatcttacaagcttttctagtatgtaataattaatttttttttaaatgggcaggagcacagtgtcatcgaccccacagcaaattaggt

SEQ ID NO: 100968 - DNA, 905 bp, Mimulus guttatus
  Intron number 2 from transcript mgv1a006910m (locus mgv1a0 06910m.g) derived from phytozome v7.0 (chr-ID scaffold_5; pos 607209 to 608113 reverse strand)
gctgcctccaccctcacactcagtttcacctcaaggtgtgtgttctgtacttctctcttttttatttatttatttatttatttattttttattttaattaattagaaacatatttatttgatttttacagcattaattacgatcatttctgtcttaaaattataaaatccttaaaataaatttacctgaacaaagtttgttacagaattatgagcaaaagtggagttgcttttctcgtgtgacattttcttttctatccttaaaactagcaaaagtgacccctatcttggaagttgtgaatactaggtattattagggtttggaatcggaatggaatattcgaatttcgccgtgtccgatccgaaaatatccgaatttgcaattgtatttttcttttcgattgttccgatttttttctggagtggaaatggaattgtatataaaattacccgatctgattttagttccgagtatagtgattgttattcgaagtatataatataattttatgatatatttttgtatttccatgatataatgtatgttatgttttatatgaaaaatgtgaatacccgagagccgaataaactaaaaccctagaaaagattaattggtttcagaaactttatgttgtattttgttgttcttcttataagtggttttatttattgcattttattgaattctttgttggattttcttgcatgttgctgaaaaattctgaaaaatagtgtaaaatcccgttatgacagaattttgaacaagagattataaattaatgcaatttccaaaaattccgccgattccgaaatcatttttaacttccgaaaaaatagttacaaactgagaatttaaatgtcatggttccaggttatctaccgggaaggctgtacgatctcgacgca

SEQ ID NO: 100969 - DNA, 649 bp, Mimulus guttatus
  Intron number 1 from transcript mgv1a002648m (locus mgv1a0 02648m.g) derived from phytozome v7.0 (chr-ID scaffold_12; pos 474530 to 475178 reverse strand)
atacctttctttgcgtgtaccttcgtcggctgtaggtaactttactttacgtcatattaatttcgcaaaccttcgacaaacaaaataattaagaagagagccccatatggctaatctcttaattactaattaattaattgatacaatttatgtattgattgagtaccttataaggcttactgctataattggtattgaagttttttgtttcctgtttttgttactggcttattcagattgcaatgacagaggcaacaacgactcgagtgcaatttgtgctcaaggtgtgtgtttaatagattagtcaaaacatgttgtcattacgtaggtggaataataactcgaagaattaattcaaatgtctttttttgtacttcagaacctgtaaacactctttcacatcgatttacgaagaagtcgagaagaatatatgtgattgtcgtcaccattttaggaggagttgtactagctctttgctgtatctatatcttatatagaagaaagatgaaggctaaaggaagaggtatatatataaactagcaaagctcgaactaaacattttcttttgattatagttcaactaaatgatttcaacaaatattaccatttttcgattattccagaaaatcgaggaaggactgacagacta

SEQ ID NO: 100970 - DNA, 1016 bp, Mimulus guttatus
  Intron number 1 from transcript mgv1a002578m (locus mgv1a0 02578m.g) derived from phytozome v7.0 (chr-ID scaffold_85; pos 189946 to 190961)
tctcctctttcaaaatcaaaaatcaccaaaaacaggtaactatatattatgaaaaccctttttttttttcttgatctttttgtgtgcgtgcttagttttgttaagtgatttgtgtgtgtgtgtgtgtgtgtatacatacacttttatgtttcttgaatacatgcaaaaatctggggattatatttcgttttttttgtttgtttcattttagtagagaatcaagaaactaaaaagaaaaaaaaaaagaaaagaaaaaaaaatccagtcttgactttttgattctttgtccgaacaaacactgtttgtgtttcaatatgtgcagatgatgtttaatttgtcttgaggtagtttcttcgtctgaagaaagagagagaatacaaaaataaaatatataaaaaaatacagtagtacagcctcgaaatctagggtttttgaggtgaaaagtttgaacctttttcttttttttttttttttttttttttttttttttttctctaaatctttatgatgatatataaatatactggtgtagtacagtgtctagtcccatgatctcgtcttgttcctctcttttttatttattttttattttttattttgtgaatctttcagacatatgattaaatagtaaaacagtgaatataacaggtctattttactgtttttgcttgtatggggaaccattgtttctgataaaggtttttactatttcactttctttcttgattttgattgatactcagattaaatttcccttattttttactatcttttttctccgcattttcacttgtcctagattactgtcctaaagtctttttgtttgttgcttatttgtactcttgttgtaaggaatgtgtgtgtatgtgtgtgtgagtgtgtgtgttatcttctatgaaatttgctgtatttgtgaactttttgtttatgtttttctttattctaatgataataatacatatagtttgttaatgcatgcaggatttggtcattcctccgaccgaaaacgagtgtaa

SEQ ID NO: 100971 - DNA, 815 bp, Mimulus guttatus
  Intron number 1 from transcript mgv1a022022m (locus mgv1a0 22022m.g) derived from phytozome v7.0 (chr-ID scaffold_24; pos 1338977 to 1339791)
aacttgggctaacaagtgacgtggacatattgccaaaggaacacaacaatattgtcttaacaactcaacaacagtacgaggagatgcatcatggagacaggaattagtcctggattaatggattatttacgcatttgcccttcttcacctcggaatcttgttgccatctaaaaagccaatatatattaattaaatccgggttattatatatatatatatatatatatatatatataatattattaatcaagaaagcgtgtcaaatttggccaagaactttctatattgactatattttgttaggtatttttcttacttgtgaattaaaacagttcaaatgcatgcagatggacagatcctttctttttttttttttttttttttttttttaaaaaaatttaattacatgcaaattaagtctaatatgtgtgggccccacaattttaattttggaggaatgaaaagtacaaattttgtggtagatgatattacagttgtcaggtatatgcgttactaaataaaatcaaacattaccatctctaatcatcattaaataaatcaattagtgtatagtagggctggcaatctggccgtgtgagtcgagcctggatcggcttaaactcatataccatcgggcctcattactataggctcaagctcaaatactattgggcctcatgcctattggcttaaactcggctcacgtattttttcgggcttcgggtttatatcgggcaataaacaaattccatattttccaactttgcagtcgacatgttaaagaaaaacaaaaaaataaaaacttcgcagtctaa

SEQ ID NO: 100972 - DNA, 968 bp, Mimulus guttatus
  Intron number 2 from transcript mgv1a016996m (locus mgv1a0 16996m.g) derived from phytozome v7.0 (chr-ID scaffold_320 ; pos 125168 to 126135 reverse strand)
ggtttcacgttgagccaggggctcgcgagaaggctgtgagtttttttttttttttttttttaatcttttttttatatattgaacaaattatttatttgatttttttcgttctagatcgtattcagtagggttagttgtaattgggatctgaatttttgtctgggttgtgaataataaaatcctgggcgaaggtgaaaatgttaaatcggggaatcgaaaacctaatttctgattatatttgcgatgtgtgtaattttttttttttttttttttattttatttataatgtgctattagtcattagatgctacatttgcgctgatcgaattaaggtgacttgaattaagaagaaaaaaacgtttggtgataagctgacattctagatttttccgtgttgattttatcttcgtatagaaagcatggagaagtggttttggtttgaataagtttggctttaaccggaaggttttgttcgttgagtttgagagagaaaagtctgaaattgaataagatctggaaataaaatatagttcctctactaaggaagaacatcattttttggatgtaagaattagaactcgaactcgagagagtacgtttcctgtgttattctagttccttgggaacaatagtgcaaaagttcggattgttctctcggagtttggggtgttttgtgttgttgacttgaagttcggattgtgttgttgcttcgtgtatttcaaaattcatactctatttggctgatatttccgattttcttccacccttctaagtatatttctcatccacatgttaggtatgtgcatgcatacatatgcgcctatcttgctcgatttctggaatacgatgtagttgaaatgactatttagaatttatttccggtttttgtcttcttgtgcgtcatgtttaagacagtgtggttgtctttttcagctcttggcagaggactcgtcactgaaacgcttcaa

SEQ ID NO: 100973 - DNA, 854 bp, Mimulus guttatus
  Intron number 1 from transcript mgv1a009309m (locus mgv1a0 09309m.g) derived from phytozome v7.0 (chr-ID scaffold_116 4; pos 2965 to 3818)
gaagagaggtcgacactcctcgtaggtcggtaaatttttgtatcagaacttttggaagaggattatttgttctggatttgataatgtggcagttttgaagaaggattatattgagatcgaagtttatgagatagtttggatttaggaatctttgtgttgcttcatgtgcttaaaagtttatattttgatgctggattagtgggaatgcgatgaaatactactgcatttgatgttgattagatcttgccgagctgaatttttaggaattgatgaaccgaaacctctgttgtttaagtgattgaaaaatcgaaaaaagttttggaagctgaaagaacatgaaaggttataactcttaagaaatgctgttactttgaccactgagaaaaaccaaatgctatgaagcatgttgcctctgtggtataatcagacaacagtggtatcagatcaatttgagattatgttttctagtataataggattcaagaatgaattgttagtgagaagtcaaacgctgaaaaataggatataactattggaaatgatgacctgaaatttgatattgttatatcagtagtttctttgtgaagtgaatttggtgttgtttatttaactgtatgatcaactgtggtactgataacttgaaaggctatggtgattaagttgtgtgatttgggactcaataatacaaatacaacctttaggttttaatgcatatcgaatgttctggttcactaatacttttgtggtacaattatgttttgctttattgtgataaaatgatactgataattttttgtgcggatttacttattgttctagcctagcgaactcagaacagcaaattgagcaaaata

SEQ ID NO: 100974 - DNA, 997 bp, Mimulus guttatus
  Intron number 2 from transcript mgv1a012499m (locus mgv1a0 12499m.g) derived from phytozome v7.0 (chr-ID scaffold_161 ; pos 419273 to 420269)
tttgccccggcctcaagaaaggttcgtcttttgtcttctgtcccgttttttttctttgggaaaatcgactataaaataatgggattaactaactttggatcgaatgcagtttttatttggtatttttttgccgctgtttagttcttcagcgcttagttctaagtgtgttgcaaattgccgtacttgtcttttcttatgcatatgttcaaattgcggtataaattttgacttttcaacttgtatcttatgtgtatacgttgttgtttgatagtcgatccgatcgtgaattttagtgttctcctttcttattagagatactaaaatgcgttaagcctgttaataacgctccgaagttaagtgacttgccaaaactaggtagaaagatatcccgattagaaaaattaaatatagtgcccactacaagatttgataaagaagagtggaagtgaagttgcatatgaaactatacatattttccacgctcgttaagtgttgtttaagaagctgccttttttttccggttagagtttcccatttttgcagttttaagctgcatcatgactcgaatataatttgttttaaatgctataacatcgaacctcgaagaatcttgatttaaaatgttaacgaaaatctccctttttctctgacataatttgtgaacaaaatacaacgtaaaaatgtagacttctcttggatcggtgtctatagagttctcccgcaccgaagtcgttcattacaaaatttccaatcttccaccatatgtgcggtatcttttcctaaacgctgcgtgttcctataattattttgcagttgaattttgatcacgtttattttctcttatatagaagaatgatcgagttgcatttcatactattattcacaacggattctgtttataaacgttgtcgtttgaaatttgacattggtttacctcgtcttctttacgaaaataaaaacaggaggtacactaagtaagataagagctagcttgaag

SEQ ID NO: 100975 - DNA, 600 bp, Mimulus guttatus
  Intron number 2 from transcript mgv1a003165m (locus mgv1a0 03165m.g) derived from phytozome v7.0 (chr-ID scaffold_27; pos 1008236 to 1008835)
accgtttcagtgagtttgctagcttcactatccttgttgaagtgattaacctattgtttctgttattttttatttgaactagctagaaccacatgtttaattcttgttactggagttgcctctcccaaacctcaaaatgaaaggttaactgatgttttcttctgttatattagaacaacactgtctactggatgatatttgcctaaaactttgtttgcacttgcaagtagacagtttctcctttcttcgaacttcaacatatcataaacttgtatatagttttcttattttctagaaagcttgacatctaaaattttgttgtgctttgatgattcatctggagaaaaatgataacagaggaaataagtttgggagagtcaatcaaatagctgagttgactcatggttttaattactataatatttgtaatattgaaggtgcgatagatttgagggtgatcttcccctgtatgtccgtgtgtgacatatatacaatatatatttcgcaaatttaatctgcagaagtaagggcgtgaacttaaccttttttctacttctgatgtcagtggaatcttatagatcgttggagaaaaatactcag

SEQ ID NO: 100976 - DNA, 980 bp, Mimulus guttatus
  Intron number 1 from transcript mgv1a006401m (locus mgv1a0 06401m.g) derived from phytozome v7.0 (chr-ID scaffold_164 ; pos 364363 to 365342 reverse strand)
gtcttaaagtaatttctttttttttttttcttttccttttttgttttttttgattgatttatattatttatgtggtttttagtaaattatgatctgaatactagctagtggagtcagaattttaagtccaccggccaaaaatgcattaatttttttatgtggggggcgacaatactaaaattctacacggttttttatttatttattaatgtgtacatcaaaataaggattcaagaattgttgtgggggccatggccaccttctggacagttcttggagtgctgattctatgagcctatatatatatatatatatatatatatatatatatatatatatatatatatatatatatatatatatatatatatataatcaattcatgctttggttatgcaatttgttatggatttaatttttcacacttatatttttcacacttatacttttatcttttgggtgatttatattatttactttgtaaattaggatatgaatactatcagagtcaggattttaagtattttaagtttgcggcgagaaatgcattaaaacttttacgagggaggtcgattatactaattatacacgaattttttgcattcgagaattgttggagggggcgtgaaccctctggtcctatgctagctctgccactggatctgaggatcggttcatgttttgtttacccgatttcttctggatttagtttttcacacttgcaccttttctttttctttttgagggaagaaatgtttgtcactcatttgattaaaagatattatgatctcttataggttttctctaaaagaaaatggctttatgtattgaaatttggatatataaatattaaatcattcgcctcgtgtcagagcattcgtgttcgactaaatatttccttagaattcatcgagaataataaagattcaaaattctcaatttttaatccgtttttttctcgagaaaaacaggtactacac

SEQ ID NO: 100977 - DNA, 869 bp, Mimulus guttatus
  Intron number 1 from transcript mgv1a023655m (locus mgv1a0 23655m.g) derived from phytozome v7.0 (chr-ID scaffold_444 ; pos 812 to 1680)
ggtttgttgaattcgcgtagaaaaagaaattcgcgcaggcagggccttaatcgactacgtgtgtttaatcgactatgttcaatagtcgattaaggcttaatcgactatgttcagtagtcgattaaggttgaccgactccagttgttaattttttttttttttttgattttttgttttattgattccaatgtataaatcaattacaatgtttgtatattttttttaaatatagttgattttgcatttttttgtaattatgatttgttatttttaatagctaaaattttaatcgactatgcattaataaaccttatagagaaaaaaattaaaaaaaccaaaaaaaataaaaaaaaaaaattagaaacaaaaaaaaaataaaaaaattaaagattttccttaatcgactatgaagcatagtcgaattaagactattcgactatgcttcatagtcgattaaaaaaacggaaaaaaaaaaaaaaaaaaaaaaaaattgctggagcgcgtgcccagctgtgatgaggtggcgggcgggggtaaagctgggaaacacaatggttgaattggatcatggacttttctcaaatggtctaaaatattttgggcctccctcaattaaaaaaagtagtgagggggttttctcaaagagccccataatgaatatatcttaatttctttcttacacctaccataactttgtcgcataatatatatgtaaggattcacattatcccaagtcttccccgaaataattcaaagtcaaccaacttaaactatagtaacattttttggcaatataagtaccttactcagtggcacatcttcttcttcactaagtactcaacacacacacacacagacacacatatata

SEQ ID NO: 100978 - DNA, 303 bp, Mimulus guttatus
  Intron number 2 from transcript mgv1a013472m (locus mgv1a0 13346m.g) derived from phytozome v7.0 (chr-ID scaffold_27; pos 468962 to 469264 reverse strand)
tcggccactctttcttctctccccagaatcttctggtacatatacatacacataaacatacaacatacaagcactacttatacaatctgagtactaaagattagggtttcttgattaatcaaaacaaattaatatctagtttgtttcatttcatatttctgaaatcaaacttaggtttatgccaatttgggttttttttttcttctggattttgtatatatttgggactaattaattaatttttatttttattttatttttcacattataaaggaggagattcgaagctcgccttcatcgaac

SEQ ID NO: 100979 - DNA, 777 bp, Mimulus guttatus
  Intron number 3 from transcript mgv1a010410m (locus mgv1a0 10410m.g) derived from phytozome v7.0 (chr-ID scaffold_255 ; pos 111239 to 112015 reverse strand)
aaagtaagtctctgcagcttgcgttagttgatatttgatatatttctctttggtttcagaatgtgtgatacagttattatccattaactttttttttacagcagttagttagtaaatgtagttagtgacagtccaatagctccaccttactatattgtgaacagattcatctgggaaaattacttcgattctttttttctaaaagccattgattgaaggatttactgacaactatttgagactccatagtactgaatcacatcctgtagttagagcattcgtactcccaaagttaagcagtaattgttgctaatgaaacagctatgcttccctgaaagtgtggccaaccaaatgaatttgagattgactatgtttagcgaagtaaatttgaaactatgctttatctcgatttgaaaggtatggcagcaattcaggttatatcgggagttgattagacaaactataatatatttttcccttttcatgttcattgagatttgggactgaattacaatgtgctataggaaataatgagatgcagttcagaattattcttgcctctaaagctcaaagaatcctattatgaacgagggatcttctcgtcttcttttcttgagagcacattgtacggatgtaacctgtaattagatataattgcgtaaatatcatgagggatgtaatttattttaagttgttttgtttttagcaacttctttcagtttctacttgttggtttctgcagaagtgaagtggacgaagttctttcaggttcctcct

SEQ ID NO: 100980 - DNA, 510 bp, Mimulus guttatus
  Intron number 1 from transcript mgv1a010410m (locus mgv1a0 10410m.g) derived from phytozome v7.0 (chr-ID scaffold_255 ; pos 112546 to 113055 reverse strand)
tgaaatctactggcgtagaacgggaattcaggttttcttcaatttcagcttttttcgcgcatttaatttaataattaggtctagtagaaaaacacgattgttattgcaaaatattattgaacaaatgtatgaatcggattcaatgttgtttgatcgttgttcaatattagaagtctgtgtacattgtacaatcattttgcaggatttattttatttattattattgtatccaggcgggaaagaggtttatcggagggtttccctatttaaaattaaatatacatccatagtatgatttcgttggagatggttagctggggtttgggtaattttaattttaatttaatttgtttttcttttttgtggtatttatagtcttatattactctgttctactctgctctagttgcatgttgcattaggaattaattagtggcatctgtatgcggggtgatgtgtgtttttggttggctgtattcgcagggatataatttttggcattagtttttc

SEQ ID NO: 100981 - DNA, 645 bp, Mimulus guttatus
  Intron number 2 from transcript mgv1a020403m (locus mgv1a0 20403m.g) derived from phytozome v7.0 (chr-ID scaffold_69; pos 57353 to 57997)
tgtgttcagcctcggcgaaaatctaacccctagatgtaatttgatttctcgtttaatttgtgtttttctcaattgtagtttgtattctaagcttagcatgcaattgaggtttgttgttttcgtattgatttttcttttcgatgtcgaggtgtttcgtttaattatttgtgattattttgttgcttatgttgattctagtttttggagtaagcaagagcttgattttctagtttttaatggcatacattaggtttattctagttttaaattagctggggtagttattgaaatcgtttctatatggttccggaggttattaacttggttgtcttgtcatcctgtttgtagaatgtattaggttaattgtggttcttttgctttttgtgaagccatttgttttggccgtggtacgttagatgatgttcgatcttgtgcttaacttgtttatggcacattttctttcttaaaacctgaacatttgaacatctgttatgccttttgttttgacagataagatacttggcaagatgggtgaaggttagcggttcacatgcctgctgataagaaatccttatattttcctcattctcttgtatcaaatcagcaaattgctagtgctgtaggcacatttggtcgagtattgga

SEQ ID NO: 100982 - DNA, 624 bp, Mimulus guttatus
  Intron number 2 from transcript mgv1a016661m (locus mgv1a0 16658m.g) derived from phytozome v7.0 (chr-ID scaffold_44; pos 1128142 to 1128765)
ccaagttcaaatctaaccttccccccaaatctgtacatttcatccctcattttttatttatttatttattttttttaataaatggatttgttaatagtaggtttgagatgcctcttgttttccggtaatcatgtttgaatgcttagttaaatccaaccaataatttatgattctgtaagctgagaatattacctatattgtcaaacttggatactgaagaataaaatgacgaattaagatgtttttgaatcgaaacagaatttgaataacttcttcttgaagtgccttgttgtttcttcgcgtagtttgtgatgtgaactaagtgagttggtttaattcttgaatcggaaaaaaaacagcatgtgttcagtttgttcaccatataatttattggtcctgaagtcggttaggatttatctgctcgtgttcgcgtttgtgatagctagggtgggaccagttgaactggatctagttttaatttgaggtttcaaatgcactttgaaacatattaatgctatcagatctaccgtttgaaactcaatacgttttttaaaatgtaggaaatgatatttactaatgacttgtgcattgtttgtgaaacagggagctagagtgagggtgttc

SEQ ID NO: 100983 - DNA, 731 bp, Mimulus guttatus
  Intron number 1 from transcript mgv1a010882m (locus mgv1a0 10880m.g) derived from phytozome v7.0 (chr-ID scaffold_11; pos 1839960 to 1840690 reverse strand)
cggttttcaatttctcaactctaaatcactgacaggtacaccttttttttttttttttcttttttttttttttttatgaattggcatgttcctcttccacgagatgttttccgtttcatttgtgcatgtgattctgcagaattttgattggggtttgatttgtaaattaatggctgatttaatctcggaacattttcttttataatttggacttggaaaattaatagcttgtgcatttcatgtaaatagctgatgttgttctgaataagtgatttttaggtattggtatgaattgatttatggcttctttttttttttttttttttataagattttgctctgcgcatcaacaaatgatgaattagagattttgtatctgttgttcttcatctggagaatgtccgaaacccaaatgcattagctgtagattaaagttttttcattgcttggctgtcaattatcgtccatctcagagtttgtcatgtaaatttaaaagggttgttgctttggatattaattcgataaggtgtgattcaagagtcgcctaatactgaaatatttagaaattctggatttgttaatgatttggccgattaaagttaccaacgtggttaaaattcagaagttgtcggttgcagtttcttcatcttgcagatatgattcttgacagcatagtttatgtcttaaattggtctagttctcagtaggtattaagatctcgagtcggtata

SEQ ID NO: 100984 - DNA, 519 bp, Mimulus guttatus
  Intron number 2 from transcript mgv1a001993m (locus mgv1a0 01993m.g) derived from phytozome v7.0 (chr-ID scaffold_349 ; pos 113169 to 113687 reverse strand)
tagcagattctccgacttctgttctcgaagaagaggtattactatttaccggcacttttttctttctgcgtcggtcgttttttgaaagctgtgtgtctgtttgtttgtaagagagaaaaaggttacattaaattgatttcttaactggatctctgtttctttgtttcgtgtgtgtatgttggtggaggaatgtgtttcttagagcttaacccaaactcaggaaaactgcattttttttcttttcggttcgaagaaaaatgaaatttggttctgtcgatagcatagcaacggtgactgtatgtttatttaatgtgggtgctttccaaaaatttgtattttaccatggagagtttctttggcttagtttgcttgacgtgttcgtttagttttaatattatggagaagtagtttataccttgaagttttggtatttgattaaattttgttttaccccgctgattattgatgctattttgagttgaaggactgcaaggaaaacattggctttaaaacggaggt

SEQ ID NO: 100985 - DNA, 747 bp, Mimulus guttatus
  Intron number 1 from transcript mgv1a011690m (locus mgv1a0 11690m.g) derived from phytozome v7.0 (chr-ID scaffold_44; pos 418922 to 419668)
cttgaaattgtagggatgtttggtttcatttccaaaactcatttccaattttatactattcataaaactgatttcatatttgtttgataattttatccaaaaaaaatcccattttttcttctcaaatttctattggaaatacactattcatatttttttcaattttcaaacttactaactaacctatatattttattccaccaactcatttctctctccttctattcatcacttctcattaatatttacactctttctcctctcatttctctctcctcattaatatctacactctctctcctcccaatttctctttcttctactaataataataataataataataatcactatcatcatcctcaatcattatattctacttttgcacctactttcgtagataaaattaactacaaccaaacatattttcatttctacgcctacataaaactaaaaataccccttcatccaaacatatttccattttctaaacaaaaaccaataatctactttttccattataaattttgaaaactagaaatttccattggaaacataaccaaatatccccgtagtgtttgagaaagcgagaaacatttaagtgacaaaattacgagggtattttcattattatataaataaataaaaattaaagccaaaaaaaaaaaatcaaaccaaaagggcaaaagaggaattattgacaaaccgaaaatataaagaaaaacccccaaaatcagagatacctga

SEQ ID NO: 100986 - DNA, 633 bp, Mimulus guttatus
  Intron number 1 from transcript mgv1a000186m (locus mgv1a0 00186m.g) derived from phytozome v7.0 (chr-ID scaffold_39; pos 744739 to 745371 reverse strand)
ttgcgtatttgtaccttcgtcgtagttttcccgaggtaaattttacttttgattgagttatttgtgcggaattggatatttttcgacttactgggtttttacgctttgattgaattcttctctggagttgtttggagctgatcgattgcatgccaagtgtatgttgaaatgattgaattacctgtttttttttttttttttttttcgaatgacagagcattttactgtattttgtatgtgacatccgttgtcctcggagttaactggttaagttgaattttgattttaattttttcgattttttttttgctacaatgtcagaattttgtctcgtgtttgtgtttatgtttctgtgtgattttattgatcccgaactcggatctgtgatgtatgttccttgaaatggtgatatgtttggtgaatttggatgaagaactgaaaatgagtgattgtgtaaatgtgatgttatatctctgtatgttggacatattttaaattctttatacttctgtctctgaactgcagtggtgtacctttttatttttattttttcgtaactgtattctgtttgacaatatatatatattgactttgggttgtgatttctagagttagtcttacgattgagaaaac

SEQ ID NO: 100987 - DNA, 574 bp, Mimulus guttatus
  Intron number 1 from transcript mgv1a021795m (locus mgv1a0 21795m.g) derived from phytozome v7.0 (chr-ID scaffold_136 ; pos 190081 to 190654)
catttggtttaactcaaatcaaggcgattttggtaattttctccactttccttcatttcattttcttgttggtttgccctccgtctcttaatttattcgaagctagattcgacaccgttcagtaaaagcttgtttggactcgatttgttaacataacgaaacaaacttgaacacatatacttttgttattgataagatttgaactcgattgttttgagtcgggaatcgattagaaaaaaaattaaaatcaagctactcgagtttgattcgtgctaacctctattgcttattaatccaagctcagacacaactctactcactgcgcttatgcgtgcccctagttctgttgtttcttgaatatataggagaattagtttttgtgttcaaatttgaagataaaaaaccgctaaacatttttataggcataaaccctcttgtgatccaaagtcacgacaaatatactctttcaagctaacaatgtaactctttttgtgattctctttcattgaaatgacataaactatgctctttgattataggatattgttgccggcgggagcgatactacggcaac

SEQ ID NO: 100988 - DNA, 848 bp, Mimulus guttatus
  Intron number 1 from transcript mgv1a012150m (locus mgv1a0 12150m.g) derived from phytozome v7.0 (chr-ID scaffold_16; pos 1917654 to 1918501)
gaatccctaggtaaaccctatctctctacatctaatggctgttagtgtgtttgtgcgtatgttgattgcagaattaattgatttaatacttcttatttttacatcttcaattgttgtggaagtgctttcaagcagcttataagctgcttagttctgaagctattcagctgcttgtaagcttctttttatcttcctgcttgattaactcggagacaaggaagaaaggaaatgtggtttatttgagttgttagtggggaaaaaatggtaaattacggccacccgcgctgaggtaaggtcaaattacgagaaaaaaaaatcgctcatgtttggatgattacaatcacccctcaattatgaatcttcttacacgtccacccttgtggtgtcaaatttacggaatcttgtagattatgtggaatattctccaacttgtacccgttttatcccattcgagctacacattatgaaacaatcgaactacacattatgaagcaagatgattataagatgtgtctcttgttgtctcttgctatgtaaatatcagattgtggtgcaatctgcattttttcacaaaacgaatacaaactagagaatattctacggaatctttaaatttatcaccataacagtcaagaaaatttatacttgaggggtgtttgtaattacccaaacagtaggatttttttttcttaatttgaccttaccttagaggtggccgtaatttacgcttgttttaaaaggttaaggttatagcattcaggtcgggaactttatttgtttaaatgcagacagaacaataaggcgactaatataaaacaaaattaataaatttaatcaggttttacata

SEQ ID NO: 100989 - DNA, 953 bp, Mimulus guttatus
  Intron number 3 from transcript mgv1a004482m (locus mgv1a0 04482m.g) derived from phytozome v7.0 (chr-ID scaffold_2; pos 989945 to 990897 reverse strand)
atacaactgatcttggaatcaaggtacatatattaatatatctatatatatatatagctgtaggtaaatagatataggagacacctgcatatcaattatcactatgttaataaataaaataaaaaccaaaaacttttgagatttatttttttgttttttatataaggatcctgctataaattctatttcattcgggaattatttgtcattttacaatttttatgaaacattaattgcattaattaattgagaaaataatatttagtgattttatatattttaatttatgcatatttattgattttcttaatatgcgcgcagcaacccaaaacgacatttaaattgagacgtgattagtgcataacaaaatattcatagtttttttcaagaaattattttgtttaaaattatttgtcatttcaatacattagttacatgttttttcaactctacccttatcgtctcgtaattgttgtaggcacaattaatgaaaagaatatcttggtcaatttctcacttttttcaaataatgcatgcatatttactatttttggctgttttcctatgcactaatctcaatcttaaatcttgttaatccaatctctaatagtgctaatcatagatcaaggctttaataagcatttagcccttttctttccacacctattttcctatataaatatatagatttattcctacaagtggcaactttttcataattgcacttcttgtcctcactgcatcttttaatcctaattatttagggaaatttttcaatagcagttaacaatttaccataaccgacactatcattgtcggaaacattgaatttcctaaaatgggcgcgagtggtgattacgtaatattcgcctttaattttttttaattttaatttttatttttatttttattttgcgttattaataattctaattattttttttatataggat

SEQ ID NO: 100990 - DNA, 503 bp, Mimulus guttatus
  Intron number 1 from transcript mgv1a011400m (locus mgv1a0 11400m.g) derived from phytozome v7.0 (chr-ID scaffold_102 ; pos 207907 to 208409 reverse strand)
cccatatcgcaaccacactcgggtggaggaagaaggtatgaactttgccctagattccgtctctgcgtttctctcaaaaatttgatgtgatttataattgctgtattgtttctctgaatattggcgagatctgatttacgcgttggtattcgattgatcggtgtgtatattttcatagtttttcttttccaattgaattcttctcccgtttaatgaaatactgtgtttatggaagtagatagaagaaatccctaattaattgtttagattcggtgtaattctgtgtggggggttttgttcaaatttagggttaagaaaagtaatttaacaggatttggggattttttaaaattgagctcgcctattagttacttgggctaagttacttgtgtaacatgattcattcttttagagatttgtaatgtctaaaattttagtttgtatgtttatttcgtgggaactgttactaaacaactctttatgtttccattgatagtttgacc

SEQ ID NO: 100991 - DNA, 763 bp, Mimulus guttatus
  Intron number 3 from transcript mgv1a013000m (locus mgv1a0 13000m.g) derived from phytozome v7.0 (chr-ID scaffold_178 ; pos 159133 to 159895 reverse strand)
atatcccacgcgatcgcgttgtactcgctacaaaggtttcaccaacttctttgtattaatttatactctagtatactttttaggggacattttacataattaagtttcacatgttgatttcaaccgaatttgatggagggtgttacactttagaattcttttcgctgtcatgctattatttatctgcatcaagtaaaagcagtttcaaacttaattttagtaatctgtttttctagaaactatttgtccagaaattgttggctaacccttatttgaagttgagtttactttaatctgcaaatggatcatgaattgggattgacttagtttttgtaagtgcgatgattgtagcttgattaccgacgaagccttctctatccaagataaagattgaccctgtgattagtttaggtggttttggtctgaaatattttagaattgaactcaaaacaatgccctaaaagatcactgtggtatactgggctcaagttttactcttgcttctgaaagctgcaggttcaaaaaactgtgttgactcattctgccatccttacgttaaaattctcttgtcttattgctatgagaattggaaatacagctttcattgtatcctaattggtaaatccaatcaaacagagtcattgaatatggttcttggatgaatagttctttgttatagggtattatttcatgatctatcactgatttctgctgaaaacggtatttaatttgttggatataggtcagcggaccatcggggcaa

SEQ ID NO: 100992 - DNA, 583 bp, Mimulus guttatus
  Intron number 1 from transcript mgv1a008395m (locus mgv1a0 08395m.g) derived from phytozome v7.0 (chr-ID scaffold_34; pos 706057 to 706639)
attttaggtaaattagatcaattatacgaattcttccatacttctaattgttgttttatcttatgtatgtttcgctctgattaattagatttctacccattgtatcctatgtggaagcttgagtacattatggttctttgctgtgtttattattttgagaaaagtttcgaccgattcaaatagttagatttgtgattttgttatgtatttccatcatttagtgcaattattttttgtttattttcgtgtgttatttcaatagtatggcattatatgcacataaggaaatttatattttctttgtgaaattttcattgcaatattcttgatgtcaatgcataatttgttggatatattgataatatgaggggaacgtgtattattgtcagatccacctgttagttgctaaaaaaatggatctttgattgagtttttattttaatttttgaaatcgagttttttctctctcttaattgttgggataaaataatgtacaattatgtatgtggattataacacttgttacattgttttatcgaagttttgatttttcttgttctctttctagattaaaagggccttg

SEQ ID NO: 100993 - DNA, 817 bp, Mimulus guttatus
  Intron number 1 from transcript mgv1a010704m (locus mgv1a0 10704m.g) derived from phytozome v7.0 (chr-ID scaffold_27; pos 564934 to 565750)
tcgcgttcatcgtgttgatcttgtttcattgtctggtaattctgctacattttttgggaattttgtatgtttttgcttttgtatttgttattttgaaaatcgattttgttttaagtttgatctgcctggcattttactcttagtttcttggaaatttgcgatatctttattttctctggatttttcgttattttttgctgttaatatctctaatatcagctcctcctgtactaattattttgagcccacagctaaatgaaattagaggttcccattaaactattcgtttgaaatgatttaatcatggcaatgattttttcccaattcaatttggttttggtggtgtaaagtttattataaaatctggagaaataatgagtttggtgtaaaccttttgtaatctggaaagacaaggtgtttaagatttttcactgtgcttcatgattcttggaaactcaactgtttatttttattttttactttggatttagtgtttctttttagttttgaatcatcgataattaaccaacacttgtcatttacacttcttttactctttcagcttaataaaaggtggggtagtgataagaaatcctctttcatggttttggtttgatggtgcaaattgtaaccaggaaggacaaatagttgtctttggttaagctctttgttgttcaatttgaagtttttgtttcttttgagtatatttgcaaattgtgattttatttttcttttcacaactgggaaatgatgatgcggggtatttatcatttgattgaactgaatagttaaccaattaatgcttttgcagttggtg

SEQ ID NO: 100994 - DNA, 769 bp, Mimulus guttatus
  Intron number 1 from transcript mgv1a006997m (locus mgv1a0 07000m.g) derived from phytozome v7.0 (chr-ID scaffold_63; pos 171305 to 172073 reverse strand)
tgtgcctaatttgacacagcattgataataataaagtaatttttatccaggattatattttaatttttcttttctctgaaggtgcgtctgttttttatttattgaaatttctgcatttagattatttttcatgtttatttcgatctgattgttggtgtggtgccgtttgttggcggcgggggtgaaaggggagaaaggtttgatttttatttttaatttaatttttttgttttggaaatttgaattgcgaatgtcgcgtggttgtggttttgcgtttttttgtggttgaatgctcagatctgcttttggttttcattttattttgacgcccggaatcttctagatgtatggttcttttggtatcttcgcccccatgtttgggttctgatttttatattgaaataatggtgtttgtttgtttgtgcagaggcaataagtaatcaaaaatcatgtgtttatgtttaattgctttgctgggcagataacttttgtgtatggtgttattcgtgtaccttaaaagcatatatctttacctgtataatttcttcgaattcgtttattttgtggcagggctgttcatgtggattttttcttgctaataatcatttgaattgtaaggggtggattatctgtctccattttccttgtcggttttcttctttctgttattctttgtactacggtatcacctcaactggcatattcctacttttacaatttcagtaaaatatattctgatttctactttatattgatctgcagagaggac

SEQ ID NO: 100995 - DNA, 821 bp, Mimulus guttatus
  Intron number 3 from transcript mgv1a010575m (locus mgv1a0 10575m.g) derived from phytozome v7.0 (chr-ID scaffold_121 ; pos 115345 to 116165)
gtttgaaggtacttctgttacaacttacactctcgactactaagaatcgaagttttattttacagcgttgatgttgattaactatgagataaaccttccatcatatgttatttttgtccataagtgattaacttgtttgttaataattggtttgtaataaaaaaaatggtagtgtaatacatgtctgcattttttttttttatctgatgaagaataatatcgcgtatagaaataaaagaaaattcaattagtatgtgtatatcaaagattaattaaaactatatatttcaagatgtacgtggtatggatcatatggggggctgtgagggggttgttttgcatgggatgttgttattcggtgatattttaggaagttttcttgaacaaaagtccgttttataaagaagattaaaaaaaaaaggcctatggaaaagatgcaaaatgctgcacttgaatgtttgtaagatgcaacaaacttccaatatcgattttctcatctcttgacgtgcactacacggttaaatttggattacgcattctttttatgaaatcagcatattatgtgatggtaactcattgctcgcgtaatccgtaagatagattcaatgtcaggattgattttgtaactgcgaaacatagaatggtgtctttaaaatattatggccagtttttgtgtttactatctcttctgtggggcatcaacttttgaattaatagtccagtggtagatttgaaattcttcaattttcctccctctgtatcatttttctttatattaatttgtttgaaactgcaagtcacttagaaatttgttgcagatc

SEQ ID NO: 100996 - DNA, 843 bp, Mimulus guttatus
  Intron number 2 from transcript mgv1a010002m (locus mgv1a0 10002m.g) derived from phytozome v7.0 (chr-ID scaffold_81; pos 915140 to 915982)
tctcctccggcgatctctcttatcttggcggcgaggtttctcaaactaatctctttcttcttcatattgttttgcttttactagttttttttcttgttacttgcgatgtatgttgtaaatgtgtttgattgtgtgcgtttacgatcaacgtgtgagaatggaagtcgaatcgggcaatggcatatatgtgcttttttttatgtgaaaattgcgtaattgttgggataaattggtaatcgaatccagcaagaagaatgtggtaatcgtttatgtgcaaaaattttaaactattttagggttaatttctatgctacatctagtgaagattacgctgggtgaatttttacggttgatctacacacaccaatgtgggtgtgtgtgtgtttgtgtgtacatgaatggtaaagatctacccggtgtatttcgcccggtgtagcatagaatagaccctattttagttagaatatgatataaacgaatggttccccgagtttttaatgactatatgtgaaggatttgatacaccgacattgtaactggagtaaagggataggaaataaaatatgtggaacaatctttctagataagatggatcgcgaaagtcgtgttcttttatttctatttggaggaatgctctaaactcgaaaggcctttgttatggatcaattgtgcctaatatgaaggaaatgataaattattttcaacgcatgttttttttttttttttttttttttagtttttataatttcgtgtaatcataataatactgtgccgtagttttgatgtgtgtgaagttacttatttgcagtggagacgtgaagttgcgtttgctggatttgagat

SEQ ID NO: 100997 - DNA, 697 bp, Mimulus guttatus
  Intron number 1 from transcript mgv1a023817m (locus mgv1a0 23817m.g) derived from phytozome v7.0 (chr-ID scaffold_177 ; pos 527161 to 527857 reverse strand)
acttccaggtaatttatttatttatttaatttaattactccctattttcataatattttgtaaattaatatttctaacaaaattattaatttaaaaaacaaattacactcataaattcataataaagaatttattttaaatataaggaagacgcaaattaatacattatcagaactctaaaatgatatatactcggggaaaaatccctaattcgcgatttttttagggtactaaaaaatttgaatcatatagaaacttttgttcatagtatttttttatttttttttgggaataattagagtaaataacacaataaattaatgcatgtgatatttggacattgtaaagtacttcctccgttcctaattaattttcgtttttagctttgcataaatattaagaatctcaataagtgcgtcttgatttttagaaaaaacacattaaaagactgaaataaccatgatcatataaaaaaacgtattagagtcgaattaataagattaaaataggaaatataacgcgtttaatgcagttttgaaaatctaaagtgacatattatgaaacaatttttttttaaaaaaaatagacagttattatgcaacaaatatagtaagaaaaaaattattaaaaaaaacaattttttttttttacaaaatttggtataatttgcaggcaatttcaagagaagcaaaagaat

SEQ ID NO: 100998 - DNA, 718 bp, Mimulus guttatus
  Intron number 1 from transcript mgv1a014913m (locus mgv1a0 14913m.g) derived from phytozome v7.0 (chr-ID scaffold_213 ; pos 194127 to 194844 reverse strand)
cgagagagaaagaggtcaaacacagaaatcctcaggtaaataatcctcgatttttcaaatttgtagtatgtgaattgctgatcttcatcgattttggttgtgttcttcattttgtttttgttattttttttttacctattgcagccggtgttttatttacattttctcttgaagtttatgaactgtgtgacgattgatggacgcgatcactgttgttctatgaatgcaatctgtcaaaattactgaatttttaatttgattaattgcatgatttaaaattattcaattgagtgctggggaaatatttcagaagaaatgggaagcttttttcacagtagcaattttctgccgcttctgtagcaattcatttcgatagttttagtaaaaaggaagaaacgagaacaaattttcttcgtctttcgggcatagaacaagaacaacatgactgttttgctgcagatagagagagcctaaatcttatgttgattttgctccttctgtttttcgtttgtgtttgtggaaactagaaagtaaacgtagaaacaccgacttaacacatcgtctctatttgttcgtaagcgacgtgaaattgtataatgctatcacatctttatcggagttggatgaaatctatattgatgatgatagttggatttttgcggatttttgttgttttttgccagacggtgaaatcggaactcgagaatataaaaactac

SEQ ID NO: 100999 - DNA, 823 bp, Mimulus guttatus
  Intron number 1 from transcript mgv1a023953m (locus mgv1a0 23953m.g) derived from phytozome v7.0 (chr-ID scaffold_208 ; pos 203222 to 204044)
tgttgctgatctcgcttctcgtatttatctatatccccttcattatatatatatttatgtataattatttttgggtaataaataaaccctttaatttttcaattatctcttttggaaaaattttgtgccacatattttcatctaaatttttaactataggattctttgaaatgtaatccttcttattctattttttttttttttttctttctgcaacttgatatggtgactattctagtcaataagattattaatatattcgtttttagtattataaaataagggaaacgtttggattggttttgagagttatttttattttatttaggggaattatgttttgagagattaataatgtgagagtgaaactaatgtttggtttttttttttttttttttttttttatgatttgagactagacaaaatacactctaggtagtcaaatcatatttaaagttgttggaaaacatgcatttcataagaagaatttgaaaaatgaagtgatatttgtttgttttttttaccgtatttttttttttactagcagtcaaatcaagtatgcgttatgaaatggactaattaatataattattcaattaattaattccaatacaatttcatactaaaattgatatgaaaattccgatattaatacaaaaaaaaaaaaaaaaatcagtgatttattgaggtgggatgcagaatatttagtatttactagtagtactttttaattgttggattgctttcgtcatactgacgtcatcagtttgtgtgtcaaattaaaacagccgtgaaggtaaacgggttcgcctgcaagacaaac

SEQ ID NO: 101000 - DNA, 977 bp, Mimulus guttatus
  Intron number 1 from transcript mgv1a006631m (locus mgv1a0 06631m.g) derived from phytozome v7.0 (chr-ID scaffold_111 ; pos 272065 to 273041)
ttgtaaccgccaatccttctgattgggtatgtttggtttcgtattttcgacctaatttgtgtgattaaaatatgggtggtgttgactttgattttgacctgaagtttgattcttttgggaaattagggttgctgatgagtgatgattcttggaatttactattttaccccttgcgattgcagcgaattgactttgtattagggaattttaaactctttctttgttttgttgatatagaattgcaaaatgttgctggaagtgtgtatgtgtatgttgtgcaatactattaaaggttaatgttagaaaacaatttaaggtgtaaattaaggtaagctcagattacagaaaaaaatccctcttttttggataattacaaccacacgtcaactatgaatctgcttacacgttcacctttatgatgccaaattcaacataatcttctagattccgtggaatgttcagtttgtgtactcaatttgatattgatttgaaagctccaattgtgtgttaattaaggtgaatttgcgattgtttgtgttgtttgtaggtttgtaagaaatgtttttttttttttttggggatcgataaaaaatggatctttttcatttcctctagtcttaaagtttgattctttgggaaattagaacgaagaagaaactgaataccttttttttttattttaccatgtgatgcggcggattcactttttgcatttggatttttaataatcttttttttgttattttgttgatatagaattgcaaaaaaaaaaaaaaaaaatgctggaatatgccactaaaggttaatgctagaaaataactctttcttcttaaaagttaaagtgaataagcaaccgtaaaaggaaatttctgtatccggatgtaccggtttataaatgggtagaaactttttaataagattctgttgtagactttatattaaaaaacttacgggtgcaggattttgatccgtttatc

SEQ ID NO: 101001 - DNA, 650 bp, Mimulus guttatus
  Intron number 1 from transcript mgv1a018900m (locus mgv1a0 18900m.g) derived from phytozome v7.0 (chr-ID scaffold_209 ; pos 256889 to 257538)
caatctttaccaggccaatcctcagacactgggaggtttgtttctcttttagtctttagggtttttttttctagggtttttcaactgtttttcgtagtatccgtcggtgtgacgaaacgcagaatcgatatatattcttggtatatttaacacgtgctgaaatgttcttactgtttcctttttttttaagttgaaaattaagatttttttttttttttgtggattctacatgatgtgttactatggtttcacgcgtgtgtaaaaatagagtccgatttatcgttgaagatgaagattcaacacgtgttgaaatttatatatatatatttttttttatgtttttttggttgagattttagattttagattcaacaaatttgaattttttttttaaattgagatttaaaaatacagtaaatatatcattgaagatttaacatgtgttgacttattattttttttaattattattttgtattatttggttgagattttagattctgtgggtattgaggtcattcattcacataatatctgaaatattcttgaagaatttaacttaacacatgcaaatataattatatctatttttttcccctctttttattttttttatttttggatagctatctatcctaaacttggagaaa

SEQ ID NO: 101002 - DNA, 867 bp, Mimulus guttatus
  Intron number 2 from transcript mgv1a014040m (locus mgv1a0 14040m.g) derived from phytozome v7.0 (chr-ID scaffold_4; pos 2154136 to 2155002 reverse strand)
ttcgtctctttcagttcgggttggaaggatccaaggtaattttaagcttttgtgatttatgtattttacattttaattttgtaacagatggaaaagtaggggaggggatcaaatgttagaaattgaccctaatcgtcgaggctaaataccaactatcttaattagggttggtttattgagaaatgaatgattcaagtattgcaatttccatatggtacagtattaaaatatataagtaaatctataataaatatccactacatatggcctacgaatggtaaaatcgtgtttaaagggtgccactctctcgtttacgttttattgaaacaaatgcttgttcaatgtggatatggatattctctgttttgttatgtgatggggctttccatgaattgggaggataaacttcatgtgcagaaaatagaatttagtatatattgattgtacattgtaaccgttctggacagttaatcgttctgcccttaagtttcgtgtttcttggcatgtaaactctattacaagcatactatgaattgcacagtattagcggtctgctaattcccgaatattgttcaagtacggctggatctttgaggtattcctagtaattgtatacctagcccatacaggaagagtaaaaagttcttcttttaacttgtaagaaaatagaacataacttgtaatcataaggtgtttatgatgtttatcagatgttgtaggaaagtgtcatgaactacgtacgttaattgatatcttttctacgaagttaagataactatgtgaattatcggaaaatatcaaggctatctcatttgatatggatcgtcatttgaactgtaatgcaggagccatttgtaaatatccccg

SEQ ID NO: 101003 - DNA, 512 bp, Mimulus guttatus
  Intron number 1 from transcript mgv11b018162m (locus mgv11 b018162m.g) derived from phytozome v7.0 (chr-ID scaffold_8 ; pos 1656626 to 1657137 reverse strand)
ggagctcctcctcccgctttcgacgagggtcagcagtaaggaattcgcccctctttctctctctataattttgcatgttttcttcgtcttaagtaagcgtttgttattatatgtgctaagggcaattgtgtttgattttttcaatttctgagctcgttttttggtggatttagtgtgatgtttgcaattttatgtaatttctgagctcgttatatagttgctgctgtatatatatatatatatatatatatgcacatcagttttcaattcatataaacaattaattagtattactaaatattcggtttccattcatatacaatcttcacaaggcaatttcatttaattatgcattcaaaccgagtgaggaatttagggaattttgtagtgtctaaaaggataattataataaataaataataataataaaaacccttcatttgttctctcttctataaaacctagttggtttagttgttctctgcctaattttcaacagtctttcttcatca

SEQ ID NO: 101004 - DNA, 711 bp, Mimulus guttatus
  Intron number 1 from transcript mgv1a004665m (locus mgv1a0 04665m.g) derived from phytozome v7.0 (chr-ID scaffold_30; pos 1920230 to 1920940)
atcttggtgtttctggtaatctctctctctctctctctctctctctctctctctctctctctctctctctctctctctctctctctctctctctctctctctattaattcattcattcactgtatttaggaaatttgtttgtggggttttctagtttttgagttttcttttgctttcttgaatctgaaaattggtaaatgcacaaaaagatgctattttttattcacttgttatgagattggatgcatcaaaggagtttctgtcaatttactaatatgcattacacaatcactctctgtttcgatatatttatcgaaatctttgtgttacgagggatcgaaatcgaaatcgagtttaagaaacagaggtttttgcactattaaactgtataaaaaaccattcttgattagagattggatacatcaaaggagtttctgtcagttaaataatatgcattacacaatcactctatggttcgacatatttatcgaaatcttcgtgttacgagtgatcgaaaatcgaaatcgagtttaaaaaacagaggcttttgcgcacaaaaacactattaagctgtataaaaaatcattcttgattagagattgagatttgagttcaagaagaagcagatattttgatttcttgaatttaaattttaaacacactattaactaattaataattatctcaaattcaataggaggggtgacttcc

SEQ ID NO: 101005 - DNA, 679 bp, Mimulus guttatus
  Intron number 1 from transcript mgv11b021283m (locus mgv11 b021283m.g) derived from phytozome v7.0 (chr-ID scaffold_4 51; pos 112019 to 112697 reverse strand)
tccatttgagcgagtgtgtttgtgcatgtttgttgatttgtattaatgtcctaggattgtagtttgtgttttcatgatcatttttgcgaatgttgttttgcgtgagtagttttgtgcatgattttgtacttttacttatgtgcgtatcctttgtagcgagtgtttttgtgcacgtttcttgatgcgcattcgtgtcctcgaactgtagcgggtattttcatgatcgctgttggaatcaaattttgaccatgttcgagtccgaatttggaaatttgacattagacaggaattgtagccacctgaaatatctttctaatgccgccggaactagtcgatttggagtccggatgagaaagttatgctcgacttcgtggacactaccgaagatgttgagggatcctctcttctattttgattttattttcctaattgcaactcttttcttactctttgatcatttttgcttcatggacacctaattatcaatttgtacctatggaatactaaatccaccaattaaaacagaaatataaattactccataaacaaatccacgtaaacgtaaacgttgagtgttatttctacactcgactgtatcttttgtatcttgtgtgtttgctgttgtttggttatgcgcattaaagtcctagtgttgtactccgtgcttttaagaacgttg

SEQ ID NO: 101006 - DNA, 477 bp, Mimulus guttatus
  Intron number 3 from transcript mgv1a010456m (locus mgv1a0 10456m.g) derived from phytozome v7.0 (chr-ID scaffold_79; pos 880717 to 881193)
attaaagtgagtggtctctttctgcgtgatggagtttttagaacttgatacttgggattagttctgcagccttaggtaaattgtcgacagaggggcttacgccttttgaactaatcagctaaaatttagaaactgtgttatatttgaattgctttactacatttcttttatgctgcttctatttatttactgcaattatcagtgttatatgtatcactactaccagggtgagtgggggtcgggggcacataggttgggtggtactcttatgttgcagcctatgaagatgagtaaaatatgttgattcaggcagatgtacaagcatctatagaacaagaataaagcaaactgaaaatgctggcatatttatatcagagctctgaagtatcttttgtttttcaagaaaatgatattgtcactgagttaatcttcaatgttgcagtcgtttctataccaaatactacgtggaatttccta

SEQ ID NO: 101007 - DNA, 305 bp, Mimulus guttatus
  Intron number 1 from transcript mgv1a023794m (locus mgv1a0 23794m.g) derived from phytozome v7.0 (chr-ID scaffold_108 ; pos 183713 to 184017)
ttatccagaggttctgtcttcatctcattgagcgtttttttttcttttttttttttttttactgttaattagcaagtaatcttatactgtatttgaatttttctgcagattattagttcagtattctctgcatcgatggctataagatttcgtaacttgatcaaactcgaattgactggtcattcttggtttctctcaaaattccttcagaatgctgataatctcgaaatccttattctcaaggaggtttgttgatcaaatgaagtttttagctttcacttttatatcttctttactttcgttga

SEQ ID NO: 101008 - DNA, 430 bp, Mimulus guttatus
  Intron number 1 from transcript mgv1a000425m (locus mgv1a0 00425m.g) derived from phytozome v7.0 (chr-ID scaffold_8; pos 1819585 to 1820014)
tgactctactcactccgccgcctcctccaatcgacgtactctttttttttttttttctttcgcccctctgtttatacgactgtgtatttatatatatacgcatacgtacgtacataccgcttttggtgttgattgagttggttaatgggtttatgttctgtttgatttttaattggggtttcaattcagtagctggatttagctttctttgtggagttcgcacgatcttcttcctgtagtggaactctgattttggcattgatttggatttttggggtttggagattaatgttggatatcctgattactgattggaattggttgaatctagggtttgaattggggaatgatgcctcgggtaggtttgttggatctattgtttgtgacatttacttttggtttatttctttagcaggcagaggacgaagag

SEQ ID NO: 101009 - DNA, 235 bp, Mimulus guttatus
  Intron number 2 from transcript mgv1a000425m (locus mgv1a0 00425m.g) derived from phytozome v7.0 (chr-ID scaffold_8; pos 1820063 to 1820297)
gaaggtattgggattttcttactcctagaaataatttttttattactttctttactagaaattgtgctttcattcgtttgcttctttgagttggattaactttagggtttttttggcctctgttatagaatgtatttattgttggggtttgctattttggctgttttttcttccttttttattttttgggcttaatagcttcttcgttgtctagttgctcctgtggaagcgacaa

SEQ ID NO: 101010 - DNA, 600 bp, Mimulus guttatus
  Intron number 1 from transcript mgv1a002456m (locus mgv1a0 02456m.g) derived from phytozome v7.0 (chr-ID scaffold_334 ; pos 67375 to 67974 reverse strand)
gattaccggtcgaagttcttcagctaattcgttgtgtaagggtttcaacttccgtttcgtcattttcaccgaacaataactcgttatttatttgatctgtatatgattatattgagtttaggaatttctggaattggtatgattttattttattttcgcctttttgttggtatataatctttctctgtattagtattaagtattaaccaattagagttgtggaatctgatattcagttttgtatagcaaacatgaactggaaataattatgttgtacttgatcttcattttctatttaactctcagtctccggtgaattaattgaatttaatgtcatttttttcgctcaaggttcgatttttatatctagtttttgttattatgcaaaaggtcctttatttttgcatttatttagggttcattttatagtttttcgtttaacatgtaatattcccgattgctgaaatataatcatttattcttattttttgccattgatatctgtttgcttctgtatgtagtatttcgtttaacatggagtattccttatctgattttttgagttctgtttgttatgcagtgaagaaaaagtattaagac

SEQ ID NO: 101011 - DNA, 807 bp, Mimulus guttatus
  Intron number 1 from transcript mgv1a001698m (locus mgv1a0 01698m.g) derived from phytozome v7.0 (chr-ID scaffold_125 ; pos 574050 to 574856)
ctaattttgcaggtaattatttattttaatatatataaatagatcggactcttttaattttgtttcgattattaagttccaagtttcttagataatatatatctatatcttatatgtgtttatgtagttaatatattaaattaaatcttacacatatatattaattaattatgggtatgattaattatttatgagtatatttaggataatatatttttcatgttctacataaaaaaaaattaattattaccttatgtcaacgtcaactgtatataaaattaaataggagatttgactatttttaagcatactttcaacatgttgattaagctggttcctaattaaaaggcggaaggaagaaaatctcaacaaccctaaagaaatgtaattaattattattattattgagcattaaaaaattaaattgggtgatagtgtgaacgatatatatatattttagcttgaatattctaattagaatataagaaaattactaaattaaagttgaattttcaacattagaaaaacaattgacagagggtaggtggatacggtctattgatatttggttcattaactaagataacaaaaaacaattagaaaagtcaaatcgaatttaattataaaaagaaaaaacatttttttttatttatattagaaagaattgtcaaggtaatacaagagaaaccgaattggttatcatgcatgcacgcattctgtttgttaaaatgcctcactcaatttacactcgtatgatttctttttctttctatgcagctgttgatttactgaagcaagagcaagtgc

SEQ ID NO: 101012 - DNA, 744 bp, Mimulus guttatus
  Intron number 2 from transcript mgv1a015986m (locus mgv1a0 15986m.g) derived from phytozome v7.0 (chr-ID scaffold_11; pos 731791 to 732534 reverse strand)
aagcagcagctcgatcgtcagattctctccaagttcgtctttacctacctctaatttgatttatttatttgtggaattttgagcttgttgcccgttgatatgttccagttgtaaatgtgtgggaaagttttgtgatagggtttcaccttttttttgggtaattgtgcattccttgagtaggctgttattggtatatattagatgctactgtttacagctgcagatgagtaataaaattggcaggttgatatgggatattatattatgcattcgtggtgtatgaatgatgaatgaacggtggcggcatttgttcttcaattgaagaaaattcaaacagaaaaactatgaaaccataaagtaaaaattaaacgtagaggaaattagtccttaagagttaacagagttcttatgctaacatgagcgcattgatttgtcttatacgtggctcatgatattcttgccttctttgattgctgttggttgttattgcatatttgctataatagctttttgtatgtttcattaaaatctcaaaatgacgaacgttgggtgtactttatggttttcttttatcttagctgtaagcttggaattttttatttgaaacttgtttgcagggcttgataaacagcaattacatgaaaggctctctcgaatagtttcccgaagcgacattttaacgtttgtatctttttttttgtgattgcaggtttaaaaggcctcctggagctataccatcttctt

SEQ ID NO: 101013 - DNA, 837 bp, Mimulus guttatus
  Intron number 3 from transcript mgv1a002717m (locus mgv1a0 02717m.g) derived from phytozome v7.0 (chr-ID scaffold_36; pos 1440947 to 1441783)
cagcctatcactccttggactgtttctgttgctaggtgatattcatatttgcatcccagtccttcaatttattttaattgtttttttgatccctcaactatgaattttcttatacgtccacccttatggtgtcatatacaacagaatcttttagatcccgtagaatgttctccagtttgtactcgttttgtgcaaaaatgcaagtttctgatgcatcacaatctgatttttacaagccacggaacacatcttatgatcatcttgtttcaaatatggagctcgaatgggataaaacgggtacaaactggagaatattccatataatctaaaagattccactaaatttgatatcacgagaatgaacgaataaaaagattcatagttgaggggtggtcgtaattacccaagtatgaggggtgttttggtaattttcgagccttcttgataaatcccccctcctcagcactaaaatatttttttcaaccaccggaagagaagccgagtgtgatggttgatcttacctcagtggggtggccgtgatttaaccttttctttcttgacgatgattcgacattcaaacagctatgtatgtatcttgcttgtgtaatctattaaatgatccgatattttagtaaaaccgaccggttccattttgttttatgaagaggaggaacatacaaaagttatacttacatttctctgtttcgtgatgctcgaattgatcttcgaaattacgcgcattataaatttattgcaaataatttttttttgctgattataaattatatttgtttaaattcagtggttacacgttactgcgcgatccacgacacaaca

SEQ ID NO: 101014 - DNA, 786 bp, Mimulus guttatus
  Intron number 1 from transcript mgv1a012657m (locus mgv1a0 12657m.g) derived from phytozome v7.0 (chr-ID scaffold_75; pos 788456 to 789241)
acaccgttaatcccacacaaatttcttatcgaaaggtaaatttttatttcgccattgaaatttgtgtttgggttttatgaaattatatgtgcaagaagtcgttctgtatctttcttgattttgttgtttaatgatattttcttgaattaggttatcaatttttccctcttttttctgttcccatttcttgagtggttccgattagggtttatgcttcttcgtctcatcctattccaatcagggaaaaaattgcagctttttttaaatgcttttctattttgatttttgatatattttttttttgctagggctaaagatcagatttttcgttccaataatgcaatttattaaaatactctggctctgtgtggaattagttcaaaattttggccacgagggcaaagattttgtaatgggcaccatcttttttcgggtttatcaattcggtaatttactcgagttttattttatgagtgtttcatgtttcagtcccttttcttgttaagataaattgtttgcattagtgtttagactttgagattagaacgtacaaaatgtgattaattatccgaaaaatggacaacgtgatggttttttcgcaaattgatgggtcaatttggttcgattatatatgacagtaaatctctctatataagccttgtcgattttattttatatggagaaagcgacaaaatgtagtttctttcgatcccactttttgtggaattaactgctgcgtgttacattgcaggatcaacttattccccgataattttgcaaaacaac

SEQ ID NO: 101015 - DNA, 957 bp, Mimulus guttatus
  Intron number 2 from transcript mgv1a009807m (locus mgv1a0 09807m.g) derived from phytozome v7.0 (chr-ID scaffold_179 ; pos 408127 to 409083)
tctccggcctcgacattctccacgccctcgatcgtgtatctatctccctctctctcctctattttaattttatttttgtttattactgtacgattttattgccttaaatacagttgaaggttttaattttatttttatgagagagtaacttgacaccattttaaaagtcagaccttaattctcgatctactgttaatgtgggttcataataatgtatattagtttataggaaaactaggaaacaattataatgcaagggtgaacttcaaactcgattagtatttagcagattttaattggaatctgtacagagctcactggcagggagtgtaatttaattgttatctaagtaattagcattgacaagtgtgtgacaattaatcacaaatcgagaagctaattataaatattggatttaactatagataaatctctctaatgcattagagatggaaaaactcttagtccgtcttgaattaacccaagtcgaagagaaatttgttttccattctgcattaaccaagatacaggaattggtatttttacttttactttttacgcagcatacactcgtttttttttttttttcttttttttttttttggtctaggattataagtgctgtaaatggataggtgagtatcgaaactcgaaagggttttagaattttgcggttttctcaaagcgagaatggttttgacgaagtcttggcctaggtttttattcgttgcacaacacgggacagggagtttgaagtggcagagatttcagtgtagtgttataactagatcgcagtcaagattcagtttttctatttcttattacattatatgcacctttttgactccttacgatgccacaaaatgagtggatttaaagtctacagaagacaacttccttgactattttgtttttccattaggttgacaaagaatcggtaattaactgggtcttatc

SEQ ID NO: 101016 - DNA, 849 bp, Mimulus guttatus
  Intron number 1 from transcript mgv11b016759m (locus mgv11 b016759m.g) derived from phytozome v7.0 (chr-ID scaffold_1 3; pos 853143 to 853991)
gaacgagtctcttgatccaatcgaacccagttcaggtatatatgttttcctttctttaatttctttttttgcctgctaaagatcgaatttttattttatttttttgaagcaagggtttgcccactttactgtattttgatgattattatgtgggttttctgtttctctgtccttactttagttttctctcactaaaattgaaaatcaaaacacaatcttttcaaggagttatgaaattctcttacatacttttttcttgacagggcatctctgctgtttgattctttatggtttttttttttttttttttgcaattcttgaaccaattgttttgtggtgaattttggggtttcttttttttttttttttccgaaaaattctagtttttatcaaatttgacttgctacaatacaatagatgggatttttttgtgtgctggagtttcttgattgaatttcgtgtttcaaatgtgaattcggtgattgaaaatatgccctcttgcttgcttacaaaggactaatgcacttgccttttaattgaacaagaacacgattatattatcactgcacgtaataatcgaacaatcattccatataaaagaaacatgtgtttacaagcttaactaatcgttttccgatgcctctttttcatctccgattcactgtcgttgtaagtaacttactctcgtttaaattatctcatcacttgcatatgcagcaacttgtttcttcaatagccactcgagaaaaatatctcatcatttattgaatcgaactttacgaaactgtattgaacttaaactttaggagatgcaatacaatgttttttgttcttcaggtaatttcaaag

SEQ ID NO: 101017 - DNA, 394 bp, Mimulus guttatus
  Intron number 1 from transcript mgv1a007579m (locus mgv1a0 06566m.g) derived from phytozome v7.0 (chr-ID scaffold_1; pos 2738413 to 2738806 reverse strand)
agcagcggatcaatcgggccagcccccaacgccaagtaatgatcctttacttagctattcggttttctttttgggggggaaatgttgcagaaaaccgattgaattcctgattttttctctttctcgcacatctgttcaattaaaaagaaaataagaagaatacagcttttgttttgattgggtttttgattgtctttgtaatctagtctgttcaattaagtcacagaaattgatagtagtctttaattttattttttcgaattgattttttcttgatttggccaagaaacaagactggaagctgatgaattgttttgatgaatttattgtgagctgaatctgatgataaatttattgatacagagaaacagagtgcagaatcttcagcaggaaa

SEQ ID NO: 101018 - DNA, 600 bp, Mimulus guttatus
  Intron number 2 from transcript mgv1a021559m (locus mgv1a0 21559m.g) derived from phytozome v7.0 (chr-ID scaffold_7; pos 2510094 to 2510693)
aaagaaaaaaaacgtatttgtatggggtgtaataaaactccaatttttatttttatttttatttttcctattaattatgatgtttgtgtgtattcttgaaatcttggtgagtgttttttatgtgttagatgttaaagattcgatttttcccccccaatttcgactccgatttaatcgcgaattttttgatattttttttctctatttattatagattttcgtattttttttttcgaaattcaattctcggcgaaagacacctaggattatgtgtccacaatctcatgttttataatataattgcgtaattgcatctactaaaaatggtccggttcgagaactaaacctatcgcttctatcataaattatttttttagctgtattagtgtcggaaatttcagccttgtttatcacagaaagaaaatgttgcgttttcatcttcgtcgaaaaatttcatacgatggaaaaaacgggtgtgtagttcttgattttgttatgaaataggtggtgaaaaatgttacgaaactataaatatttttttcgtaattatattcgaactcttttgcttggcaggccgcttgtgtggagccacttttgttt

SEQ ID NO: 101019 - DNA, 582 bp, Mimulus guttatus
  Intron number 2 from transcript mgv1a004962m (locus mgv1a0 04962m.g) derived from phytozome v7.0 (chr-ID scaffold_27; pos 1474671 to 1475252 reverse strand)
aggtatattatgacttatttttgtttaattgatttgatcttactgtttatttctttaatttttcgttttccctgcctggttatagtttttgtgtttaattgagaggagatgaacttgcatgatattttaacatctaaattcgttcataacttcgtcaatcagaaattgacaggatttaattgcgaatcgattaggttttattgaggttttttttttcactggtgttgatgggggttgggaagttgcatttatggatttaggttattggtggtggtttgtgcgatgttcgagaatttgccgggaaggcagatgaatattctggcttaacagtgtcttgtgataaaccattcatgtatttgtgtctgaagatggctaactggattaactgtcggttatttgggtaaaaaagagcatgttagtttattctggatagtgtgtttcggatggatggttataaataaattgcaagaaaaatgttgaacgatcttgaatcaaatgatgtatggtagattattgtttactacctcttctagttttacttagtttacaactgtgcgtcagaatatttattttgttttgcag

SEQ ID NO: 101020 - DNA, 469 bp, Mimulus guttatus
  Intron number 1 from transcript mgv1a024943m (locus mgv1a0 24943m.g) derived from phytozome v7.0 (chr-ID scaffold_235 ; pos 233296 to 233764 reverse strand)
taagtcgagccgttcaactagctacaaaaagagtattcgtaattctttcattttttcccgttttaggttgaggctactttaaacatattaatcgatcaacgaactgtggttattgtattttttaagatcgatttggttttggtgttagggaagttcttttgagacaggtgtttgaattcttcttgatggcaattagttgaaaaaacgtaaatgttctgatttagattagttccgattaattgaatagtttttattattattgacatcttctaatgcgacgtgtataaacttatcccgtgtactggtggctctttctttaactttagttgactatctcaaagatatttttggtttgacttagaaatgactgcttaaacaaaacttatcgttcgttaatttctttaactatagttgactatctcaaagatattttttattttttgtgaaggtaaatcggctgctattcatt

SEQ ID NO: 101021 - DNA, 769 bp, Mimulus guttatus
  Intron number 2 from transcript mgv1a027005m (locus mgv1a0 27005m.g) derived from phytozome v7.0 (chr-ID scaffold_77; pos 1166219 to 1166987)
aaaagaccttcaagatctttgtgcagaagtccagggcaattaaaattgaatagtatacaacttcctagtttacattaaatttagtattttgaatttttatatcagacaaacacaaatatggttttagtattataaaagtaggggttagggcttgaatacagttaattagatgagaacttttcatacaaattaagaatattaaagagaagaaagaatggaaattaccttcttcttaaaattgagaactcttcgttgcgtttgtactgggttctcaatttgaacgtgccctgatgaagaaagaggggaaaatgaaaacaaatctcaacggaaaactcttcttcttctttgttggacaactcttcttcttctttgttgtacgactcttctttttcttcttcgccgcagaattcttcttcttcttcggcggatcggatatctctattcttcttcgtcggatgacttcgatctgctgcgtttggaataaaataattagggcgttttacagagttcttaaaagggaaaatttagtttggctaaaggaaaaaaatataaaaaataaataaagaaccgccacacattaatatagtcttacctttatctttgaggcacaaaaaaaaaatgtctctaaattgtaaatgaaaatgcccctacaaatttaataaataggatatattatcaaatgtcctaaaagatcagatttgagacatatataaaacaatgtccctaacaaagtgtcgtaatatccatattttgttgtagtgtctggtag

SEQ ID NO: 101022 - DNA, 462 bp, Mimulus guttatus
  Intron number 1 from transcript mgv1a009030m (locus mgv1a0 09030m.g) derived from phytozome v7.0 (chr-ID scaffold_66; pos 619917 to 620378)
caaaacaggtattcattcattcactatatataaatgaagtaatattaaaattcatcagtttatttgtctgtttctctgtgtgtgtgtgtgtgtgtgtggaatataattcagacagttaattttgtggcttaaaaactatataaaaggttgtttttatatattctcgtaaacaaataaatagtgaccgtagaagttattctttgcccatcacttttgctatcctttaaatttttcatccacatctccccattctttttatcttttcattttgtctctatttaaattaaaagtataatttattattattatttatttattgtaagtaattaaaagaagaagtttatctgggtaattaagttcgggaattcaaaatcctaacacaataaaaactcctattaaacaaaaaaaaaaaaaaaaaaaaaaacagatattctcttcgcatatccctccgtattttatttt

SEQ ID NO: 101023 - DNA, 401 bp, Mimulus guttatus
  Intron number 1 from transcript mgv1a003860m (locus mgv1a0 03860m.g) derived from phytozome v7.0 (chr-ID scaffold_13; pos 2533508 to 2533908 reverse strand)
cagtctatccgtcgcctcctccgacgagtccggtaattatcctcatctccaacacgttattatctcctttctcccctaggaatctcacgtaatgttaatgaggtggtgattattggatttgattacaattgattttattactccgcgcgaaaacatcgttttatcttttctgtttttggcattatctgttaataattaatccaaacgacgccgttgtatggattttctttgcgacaatatgcaatcggtgattcgacctttctatatggtgtatctattattcttaggcttcattcagttctgtagattccttcctttgcttttcctttcatgttttcccctgatttggggtttttacgtgcttagtgccagtgaaactgggtagaatctcaattggatca

SEQ ID NO: 101024 - DNA, 685 bp, Mimulus guttatus
  Intron number 1 from transcript mgv1a009204m (locus mgv1a0 09204m.g) derived from phytozome v7.0 (chr-ID scaffold_8; pos 160737 to 161421)
gctgaaaaccccatttctggttcggttttttttttttttttttcatatttttgctttctgcttatttgatttgtttgatgcagttcagtttggattgtgtgtatgtgtgtgtgtgtgtgtgtagtttattatatgagatgggatttgattgaagatcgggtttggttatattctaatgactgttttgaatgtttatacacgcgtttgattttgtgtggttttgattcagaatatggggtttctttgatttggatttcatgattgttagttataaatcttgacgaagaacagctttcttggatgatttttaaatgtgtaatttctgatagggcattttagtttctaattttagtagttagtgatgttaatttccactttcatggtgaattgaagtattaattgtcctttttcctgttgttgattacgcagaatcaagaatcgtattataggattacgctttcgtaactgttaaacgggtttctgaaatccgttaaaattacgtcaattatttgttttttgccattcgataaatttatggaaattacgagttcttggttcgtatctttcgtctggtttttgagtgttctaccgagaaatttgtcgtcgtttattttctccatgccattcttatatgaattaattcgacattttacaggtgacttcaattctctttcgctgaacgaaa

SEQ ID NO: 101025 - DNA, 791 bp, Mimulus guttatus
  Intron number 1 from transcript mgv1a002471m (locus mgv1a0 02390m.g) derived from phytozome v7.0 (chr-ID scaffold_8; pos 2043890 to 2044680)
tcgctgaaggcgccaagctcttccaagatcgcattgtaaactctctctctctctctctctctcggttgactttgaagataagattgttgagtgtatatttttacttaatttagggattttgcaaacttgaattgaatgaaaattttaggtcacttatattttgggataaaataatgcgtagtacccattttcacactgtagcgaccatgcatgtcaaaatgatcttccatagtaattaaatattgttgaaatagtttattattttgatttcttggttggggttgttcaccagtattgtcagtaaactggacttgtattgaagtgatatatttatatctaatccctagatacgtgttattcacgacgatgttttatatgattatgtattagcagagaacgttgatagaaaaaaaggaagtgttgtctaattgtttgtggagttgtttaaatggttcgttgtgatatcactgttgcgtgcgtatggagttccagaacatcaatcactgggctaagacgagcgtacattcttatgtcttatgaagatattgatcccggcttctttcggtattagaaaaataggatgtcttaagctagaaatgtgaagctgaaaatgcataatagaagatatgctctacctgaaattagttgcatgctggaaacacagatgatctattttgatagttggctcttattttacgtgtgttgcagttttcaatttattcctctgtcaataaacccccgttttaataatgtcagggtagtcgtagttttaaaagcttcaagcagactgt

SEQ ID NO: 101026 - DNA, 709 bp, Mimulus guttatus
  Intron number 2 from transcript mgv1a023716m (locus mgv1a0 23716m.g) derived from phytozome v7.0 (chr-ID scaffold_241 ; pos 319894 to 320602)
ccgggtaagtgaagttttatcttataaaaaaaatcgttttaaccctctgaccgtaaaaacaataaaaaatagggcacactttaatgcaaatcctaacgaggagataactaagaatttgcaacgaataacttgtgaagcgattgcgaatatgtgatatgaaaaaaatggttcttatgttcactttaaatctcttttatgaaaactactttttctcatttgaattatatcgtggctctttttctgaaaaatgaacatgtatccatgattgtcatactcaggagcactgttgcaccattatgtatgcattcataactaaccggcttctgccttcatatactactcgggatgtaattgatgaaatcaaatattttttttttatcgataccgacaaatagtaaagtgcagaatgacaaaatctgaaagcattaaatgccaaaagttggtttactcatttttttcctgatcttaacctttagctgagagcattcttatcatacttgtatttgtgttttgagtgataggtgaactcgatttatccactcttaaatgctagtgttataagcctcaactttggtgtattcaaagtatgtttatttatcaatatcatatgtataaaacagttttccggtgacctgcatattctttttggtgattttgagtttacgatgaatcaggtttcaggttaaaaagaagcagttctttcgcaatt

SEQ ID NO: 101027 - DNA, 807 bp, Mimulus guttatus
  Intron number 1 from transcript mgv1a003479m (locus mgv1a0 03482m.g) derived from phytozome v7.0 (chr-ID scaffold_32; pos 861955 to 862761)
ggcagaagcctggaacttctggtcttcggaagaaggttttgtaatttttgatttattttgttgatttatcgtgcaattccttttttgatttggtaactactgattatgattgggaagagttcggataattatgatctatcctcttgtttgtaaaatgtgataattttcatttgcgaatcgtccgttttgttttgatgattttgatcacgatctgttcttgtgaaacatctgtttgatttttagtgacttgatcaatgattttttttgggtatgatttctaataacagttggtagatctgataaaccttatataagtgtttaacaaaaaatcatcgtgtttgtgtaaatctctcaccaatgggtgctagttgattgcatgattgtataagtgttggcataaatttattttctctgtgaaaatcactagccaaggtagcttgctggttgattgcatgatgcttactttattctcgtatcatatagtttttagacttccaatattccgtgtgaaatttgtggttcaaggtggtttccgcagtttgtgatgatgtcatgaatgatttgaagtttgataaccaattcgatgaagtccatttgaggcgtcagcatgcagttttactgttattacagatcaattaatgttaagattatgccgtagtcttgcaagatatatctgaatcttttttcaaaaaggatattcaatataactctacttttactttgcttggttaagaatttcactgaattgtttccaattgctgaatctgaacaggttaaggtcttcgtgcaaccccattacttggaaaa

SEQ ID NO: 101028 - DNA, 390 bp, Mimulus guttatus
  Intron number 2 from transcript mgv1a003479m (locus mgv1a0 03482m.g) derived from phytozome v7.0 (chr-ID scaffold_32; pos 862785 to 863174)
cccttggagctgataaagtaacaggtgcatgtttcagcattttcgatctcttctttcattttatgagaatcaagatgtttttggtatgatgtaagtttgaattaaggtggatataagatcattagaatttaatctacaaagtacaaacatcataactttggtgtgactgggttagctgtgcatgtaataggcattttatttcgtgtttcggttgctgttttagaattattatataaattacaactgcaccaatgtgttttgtcagaaacgctcaggaaatcaagatctctttttactgtattcttgcttactgagctttccctgtctccactgaatctttatagttttgtctgaataattgtgtaggtgcaactcttgttgtctctggtg

SEQ ID NO: 101029 - DNA, 828 bp, Mimulus guttatus
  Intron number 1 from transcript mgv1a022085m (locus mgv1a0 22085m.g) derived from phytozome v7.0 (chr-ID scaffold_45; pos 393685 to 394512)
aggttgtagcaacaaaattcttatctgcgatttagacaaacaagaatatacttgcacaaagataatttattgaattaaaataaaatattgcgggttacaaactctaatttaatcctctgattcttctctcaagaataatgtgcgtttgactttgaatttcggagtcgggtcgttgacttgatcttctccggatttgattttgaacttgaataacgttttccgagggtcttgcgacttgaatctcggatcgaacactgaactttgacggatgttgacttgaagatcttggagttcttgatggatttggccctacaatcttccttcgatcttgatttgatgttaataacgttaattcgagggtttagcaccgcaatctcgaattaaacgctttaacgccttgatttgatgaagaacaccttggatttgatgaactccttcgatttgatgaagaacgccttgaatttgatgaagaacgacttgaatattgtagagagaattttctcctacggtttttcttcttcttgagttgtcctgaattgtgtagggagggtccctatttatagtgatagaataagagtcctacttaaagtctacttgatgacgtggcgcgatttgattggctctctttaaattgatatttatctcttataacttggaagagaagaaacaatcctattggccaataattaattgataattatctccatgacttattttgcaagataaattataatttaattaggacacaatttaattggctaatttaattaaccaattaattaattttatgcgtctacagaggtagttttgctggatacattttttagc

SEQ ID NO: 101030 - DNA, 1050 bp, Mimulus guttatus
  Intron number 1 from transcript mgv1a007733m (locus mgv1a0 07620m.g) derived from phytozome v7.0 (chr-ID scaffold_142 ; pos 447798 to 448847)
ttcgccggtactacccccaaagcgatcgaattagggtacatccaattcgctctcccctctatttgcatgtaggatttgtgtaattgttgggtgaaatttttgcatgtggggttttcaatttgggtttatctgtgtttgtcgagtgcacgtggtgcttttgtgcagatcttgttctaaattagctctgagtttgcgtggttttaatttattgaaattttgagtaaggtacaaccgtcaatgcatggggtataagattgttaagattgtaatgagaggattctcttgtatttaaatgaggacccaagtccatcagtaccaagatggaaaattttgtggtgaaaatcaggttgctgattctttacagaaaacaaaactgcttattaaatgatttttcgggtgtttttaaagccttaaattttataccaatttattactcctttgaaaacaaaagtatattttcaaagacttaaaatccatgatttcctgcaacagagtcactctgtatttcaactaccatccagcagcactaagtgttttaattttgtttcagaaattaaaattcacaattaacccttcaacttttagttgataaggtagcatgctggatggtagtttagtttttaaatgcaagtgtcgtattttatgtgtatcattttgcatatagaaatgtgattgtttattttctggaaaaatatgagtttggaagaaggcataattagagggaggctgggaatgcatttgctaggtattatacatgtgaagttaatagttcataattggtttacgtttataaattgggtgcctacaggctccatgagaagctttagtttcaagtattctcctgtacaatgcttcgtttttgtccattagaaactgttctgtgcgtgtgtatgtgtgaagcatgtgtgagtaaaagcatatgatacaatgtaatactccatcacatatatgtatatatacaaattctcatattattcaatgcaattgggaacttactaccaccatgtttaaacaggttcaaaagcatagagaatacaggcagaagatcat

SEQ ID NO: 101031 - DNA, 890 bp, Mimulus guttatus
  Intron number 1 from transcript mgv1a004989m (locus mgv1a0 04989m.g) derived from phytozome v7.0 (chr-ID scaffold_41; pos 649388 to 650277 reverse strand)
tagtttagtaaaaggtacttcggattctttatgccctttgtgaatttttttgtgtgtaaagatcgagtctttacacaccaattttgctcttactacatatgattttcagtttactttctcccacttctgtgtgtgtgtgtgtgtgtgtgtgtgtgtgttgattttcagtgaattattgctgtctttttttattttattttttattttttttaataatatgtgaatctggaaaaatgatgttttttttttgaatttgattttggcattgcattatggcctcaagtctattaactaggaagttatatatgtatgatgtatatgggttatgagtttgatgggattgtgtctgaaaaccgaaataatttggtttccacatacattaattaataagtaagaattgaacttattattctcggattctttctttattcaaggcgtttacggcaaaatcgtcgagtttatatgtttcgggttcagcatttagttcatcttgcattccccttgtttgtttcgtcttctttttcgttttctttttctttttcttgggtatttaagtaataatcgaagatcttgttcgaccgtagttgtgttgttgctattaacttgtccgacgttattcggataaatcggttgtagttactttcaggttcatgtgaatattctagttagagaaagaaacgattttttatacccctcgaaacgattaagagctcgtaatcttgaatttgttttctacaattctcgtttactatttaatcaatttacgattagtggtttgattatgttcctgatttcaaacgagcactatacattatggtattagtgcgctgcctaacttctcgactatcgatgcaggttttcttagcattttcctcgttgacaacgatcga

SEQ ID NO: 101032 - DNA, 972 bp, Mimulus guttatus
  Intron number 1 from transcript mgv1a010392m (locus mgv1a0 10392m.g) derived from phytozome v7.0 (chr-ID scaffold_213 ; pos 50398 to 51369 reverse strand)
cttatctcttctgcggtgcttcctcatctcgcgaggtgtgttttgattgttatgaaattaggatcctcgatttcattgttttccccccttttccgtttctccggtgtttgatttagggctgattttttttttattattgaggaattatcaatttttgaaagttttgattgattgcgccaccgttggatttttgaatgatgggattttgggggtgaaggatgttttaattatgtaactattggtgctgggaaagaagaagaaactagtcaggggaatattgttatgtattaagtagaaaaatgatatgatatggagatcgatttcgagtttctgaaacggtttagaatttatatgggtggattatgtgatcgtaatgtgaatttaaatatttgaaacataaggttattgattgcgtaaatcgtcattttttccgattgatgtgattttgcacaggaagaattttgacgatcggtgctgataatctttttcccttcgagttcttgaagtggaataaatgcaaaatatgtccgttgtgttactaaataaaaccaatagcgtcgtccagcatgtgtttgaagtagctaagaaatcattacatttactaaatcgtaatgtatcgagcttattgtgaaagaagggccgttgattaaatatttggtaacgcatatttgacagggcgaacactatgactattgtaatgtattcgtctaacttgagttgattttagagtcagttggccttgtgtgctcttatagcacattagcaaatataactgcatcaaagcaccgatgtcatagaaaaattaatggcaacttttttctttgtatttctctttttttaagataatcccgataggaaatttctctgttatcttgaatagaaagggctaatctttattccttgttcttactgcatttggcaagaataaatgttatcaggtgttaatctgtgttgtcattttcttttatgtag

SEQ ID NO: 101033 - DNA, 860 bp, Mimulus guttatus
  Intron number 1 from transcript mgv1a013268m (locus mgv1a0 12937m.g) derived from phytozome v7.0 (chr-ID scaffold_365 ; pos 53462 to 54321)
aggtggtgtcgagccgattcccaaaataacgctaggtaaattcaatttattttttgaaattattttttaatttgacgtgtttaataattatttttcgattccgatttcagttgtttggacactatattgaattagattttgattgttgatgattggtagcactaaaagttcgattgaaccactttttatgtgtatacactatccagttaattctcttcataagaatcggccatcgttttaatttcattagggtgtgttaaaaaaggtgcggcttctgaaatcatatttgtagtgatttatgaaatagacaacaatttacagtagaagctaatcgactcgattggtcctcgttcagtctgctgtttttctactgctctttatgatctaaacccttcatgaatgatatcgttggttgttaaaacatcatcgatttacttattccttatttcatcggttgaggtgattaacattaaggattacacgttacatcttgcctccttgacttggttaatctgtaattttcctttcttcttcttcttgtcatcccatttaaaaatctcagatcctcgaagtttctcttcatacattattggaccgttagaatgaagatcggttttcttatttttgtataaacaactgttagtaatatataagtggagctctgcgacttggcaatcgtgttgactcctgcaaaactcattatttatggaatgattccttggactctctgaaaactatctaaaacgtagatgctatttcgcggttttattcttgaacttttattgacttttgtttcttttttagcttagaaataaatgaacacagaccgtttatcaacttatgttttgcgtgtgcagaac

SEQ ID NO: 101034 - DNA, 742 bp, Mimulus guttatus
  Intron number 1 from transcript mgv1a008323m (locus mgv1a0 08318m.g) derived from phytozome v7.0 (chr-ID scaffold_118 ; pos 424725 to 425466)
ctctctcttcgccaccagctttctcttcgattcaggtaattaattactcttctttgctttttgaatcggtttgtttggttgaatattttttttttgtttaattcaatttgagtttaggatcgagtgatttcacagcttgattttgatttttgtgatgcgtgacgatgagatctgggcttgatctgttgtgtggatgtagtttgtcgaatgaatatgatgagatcgatttttgtctattggatttgcgttttgtgttcttcgattgcagatttgattgtgttttcattatgggctcaatgtatattttccatatctataggcagatgtgggaaaagatgcttgatttatgtggatatggtgggatctaatgttagaaaatatttttttttttttttttttgttttcttgggtattttgtttggatcaatttagtttgtgtttagtttgttgatttgttttctatatttattttgaatgaaataagtcaattaggatcctaatcgaaattaatacacatctttgagaataaaccgagattcgaatagattatcgtctgaatatcgattaaattacccacagaatgtactatgtgattccttcttcaatgaaatccattattcatttgaagattgaatgttaattttttcctatttgttatcgttcatctgatctgattgtacaacagattgactactgccctgtattgatatataatatattttatttttacagttgataaaaa

SEQ ID NO: 101035 - DNA, 452 bp, Mimulus guttatus
  Intron number 2 from transcript mgv1a012146m (locus mgv1a0 12146m.g) derived from phytozome v7.0 (chr-ID scaffold_2; pos 3067978 to 3068429)
tgttcatcccccgagaccggaggtatctttatctgtttgtgaatatataataaacgttttatgtgtgtgaacactctgaagaaatgggattctgcaaggttattttgtcgggttttaaaattgattaaatgtcaaatgtagttttcttcaaaatactgagttatgggtttctgtaggtttcttgattttgtttcgagattatttgtgtactactttttttttttgttttaaatatcagtttcctcttttaattagtgagtgatttttatctttttttgtatatttttatggatttagtattatcatatccctgtagtttgttgacagttgttgtaggcttttagtaattatgttagccagtaaatagattcgagtaatttccttacctgaggtgctgtatataattcttcaatttaggtctggagactcgaggggctttgcatttgtgaggt

SEQ ID NO: 101036 - DNA, 424 bp, Mimulus guttatus
  Intron number 1 from transcript mgv1a011282m (locus mgv1a0 11282m.g) derived from phytozome v7.0 (chr-ID scaffold_87; pos 407691 to 408114 reverse strand)
gcccaggtttaattttaattttgaatttttgtttttgtttttccttcatttgtgtgatttatggtatttctggagtggatttaatgccttaaaaaactacacaggaagtaattgcgaatctgcaatccctagatttttttccgatgaattttatgattcgcctgaaattagttatgcatgcatatgaatatgatgataattgataattgaagaaagtaattatgacttagggtttttgacaaggataaatcactgttctcttttgctgttgtaatcagtagtcactgttcaattactgttgcagatctgtttacagtctcactatgcttattgaaactaatcctcgcatttgttcatatcgaatttcaactaaaaatcgccgtaattttctatgtgtagatatatagacagatcggtgaaaagt

SEQ ID NO: 101037 - DNA, 940 bp, Mimulus guttatus
  Intron number 1 from transcript mgv1a009271m (locus mgv1a0 09271m.g) derived from phytozome v7.0 (chr-ID scaffold_72; pos 93299 to 94238)
gccggtgtcgccgtggggagtgacgcctcctgccggtgccgccggggggagtggcgatcaaccccaattcgattactccctccaaaacaacaccattttaaaaactctttctcaaaacaacactagatacgtttataatggattttcataatagaatcggtaataacatagtggtttttggtaagcttatagtggatttcaatttattaaaaacaattattttttatttaaatttaaaaaacagaaacatagaaaaaaaatcatttaaaaaattaaaaaaaaaaactgataaaactttaactgaaataaaaatttcccaattaataaattaattgatggatgaagaaagaggcgtggcatgggagagaataggggatgatgtggagaaaataaggggatttgcaatttgcatatctaccaaaataataatggatttttcaaaataatataatatggtaattttcagtaatattaaatagatattttggattattagagttaattgagtttataacaaatatcattaaaaaaattagatttatcaaaaagtcaaatgtgaatgaggggtgtttgtgatatagccccttaaaaattggcactattatttctgataatctatcaaccatcaaccctggctaaatataatatctaaaaaagaactaaatatcttagaaaaacatatatagtaaccaatcacgtgatattgggcaggggccaagaaaataatacttattgccaaaaagggaagagagagaaagagagaagaatacgtcatacctttggcttcatagtcagagagcagcataccatacactgatacatatttaaatgagtccaaccaattataatagttttttaatttcctatcgtaattcttctacaactgcaattcttctttcgttcagttttcagattcccaaaaccaaattttctattaaca

SEQ ID NO: 101038 - DNA, 989 bp, Mimulus guttatus
  Intron number 1 from transcript mgv1a024852m (locus mgv1a0 24852m.g) derived from phytozome v7.0 (chr-ID scaffold_705 ; pos 17588 to 18576 reverse strand)
ccaccttcttttacactattttattggagttatatgtttttgtgaaaattcgactttcaggtaaaaatactaattattacttaatttgttttagaaataattttctcaaactttaatcaattgaaattcatgtgattcctctgacctaaaacaaatgaaccatgcacgtaatctatagaaactgctagtttgtacacaatatatgttcatggcttaacgaaatggaaaaatgtcaatttaaaatttgtttattaaaatatttaactaatgaatgttcacaaaagcctatctacttcattttctctctcctgaaataaatctaaataaaccctactagtatatattaaatcaggaagattttgttgcagtagaaaatctcaatcttgccaagtaggatagaaaaaattttaagatttacatttgatacttaacacttaagagatttttagagtttttttagtttagcattggagatggtctaagataaaaatgttggaggatgctctaactcgaagggcaattacaatttctggtaattgaaacataagtttcccgaaataaagaaataaaagaaaagaaaaaagattgaagaagatgtcaatatcatgatttggtttgtaaattgtaatgtagaattgttttttgttatcgtaccatcaatcttaccctctcccctcttcctctccccaaacgccaaacacactctgtctctctctcttaattaatcacctatttaaatccatctactaattaccattaacaatttctaattagctcctctaatcccaaccattctctcctttagatacaattgcactcaactatatacttcttaattgggtattcattaattaattgcttatttgcttaattagctttctccttcaacaatggccggacttcgttatttctgtcttacccttttcttttcaggcctcattttgtcattatcagacgtagttttctcggcgacgtttacgtttgtaaac

SEQ ID NO: 101039 - DNA, 723 bp, Mimulus guttatus
  Intron number 1 from transcript mgv1a018123m (locus mgv1a0 18123m.g) derived from phytozome v7.0 (chr-ID scaffold_108 ; pos 898276 to 898998 reverse strand)
aggataaaatctccgcccgtatcgccactttgcaggcatacgataaatcattcgaaatttgttttcgttttactttccgtcgtcgatttctagtacttcaaaacgaaatcgggttttacttttaacaacttaaggttgcatgtacacgggaagatggccattgccaaacttataagctcttttaaaaactcttataagttgtttatgagctcctaaaattttgcttcgtaattttttttaaaataaatatcttatttttaaagaaaataagcttacagagtttataagttttgttaaagcagtacatacacccgacatttttatttaagattatgtttgttcatttactaaaacattaaaaatcgaaaattaccttcgagtaattaacttataagctccgtaaccttaagatctaatagactatctgctcataaaacatcttatcatatcagatgtcggagtttataagatgttttaaataaacttagagccaaacagggtgttaaggattccaaattttgcattatctattttttttttaactttatttttatgtttaagctagtttgattggtttattagagaattgattatatttactttatttgtcaattcctttatgaaatcgcatttcgccatgccgcatactagctttttactcacgcgtgtgatgcgcgcgcgcatgcaggaggaaatagcagataagccgcttgcggtgatagc

SEQ ID NO: 101040 - DNA, 435 bp, Mimulus guttatus
  Intron number 1 from transcript mgv1a002913m (locus mgv1a0 02913m.g) derived from phytozome v7.0 (chr-ID scaffold_244 ; pos 61906 to 62340 reverse strand)
ttgatttcttcttcttactcttttttaaggttttttcttctctctctctcactctcactaaataatattaatcactaattaattatcaataatcaataatcaagtgtttaatttcttcttccctatttaagggcttcttctctttgatctctacttttgctctgttctacttcagatggatacagttggccttcagccatgactaaccccttttgattattactttgtatgtatgtatgtatatttcttgaaggtatatatatacacacactcaccgcacgtttttatgtgtgttatttgtaacagaaatataaaaaataaaaaggagaaaagattcaatttttaagcaccccatttgcttctgatagtgaattggttgtgttttggtgttttttcgcaggaaaaggaaaaagctataaataacacgtgcttatc

SEQ ID NO: 101041 - DNA, 485 bp, Mimulus guttatus
  Intron number 1 from transcript mgv1a006737m (locus mgv1a0 06737m.g) derived from phytozome v7.0 (chr-ID scaffold_55; pos 698603 to 699087 reverse strand)
atcagccgttgaagatctaaatacacagctcacaggtcggaaattgatttctagtttattgtgtttcaatttatacatgattttgattttgattttcttgaatcgtaattgagtagcatgggcagtgtgttgacgatttgaaattacgagctccagaatgtttctcattttaggtatttcagatttggggacgaattgttttaattggatttgtaacttgttatcttattccgttctctctcgtgcttattacgagttccgaaatgttagtgattttaggtattttggattttggggaggaattgttttcttggattttggggacgaattattgattgccctaacaaatcagcttatgcattttggttcatttattctgtacgggattgtatcgtaattcctcgaagataagattcagcccgttaatcgaaggctacttttcgtgggcaggtgtttgtggattgtacaagattcagttcatccat

SEQ ID NO: 101042 - DNA, 700 bp, Mimulus guttatus
  Intron number 2 from transcript mgv1a011552m (locus mgv1a0 11552m.g) derived from phytozome v7.0 (chr-ID scaffold_49; pos 181899 to 182598 reverse strand)
aaggattggaccggactacagctggtttgggcagtgtatgtttcgctatactttttctggacttagcttttttttgccgataattgtgactgtgattgtagtttgttcgtatagtattcgtagtttattcgtatacgagaatcccatattttctgatggtttaattaattcataagttgtattgtttagcctggattccatagggttgcattttggatgtaaggattatgagcgaaggaattcaaatccatactaactatttcttgtaaacttgtttgtatgggttcgttttataatgtattttaaatccgtaactctcagattgaatagtttttgaattattgtggtcgaaatctgctctatatgaagtcatttgaaatcatttctctaatcctctcgtcaaaaccaaatcttttctccgtatcgttactatgttagttgttattctccatcaggttgttggttgttactatttgtggtggtttaattgttcataaagtggagataagagtacatgtgcgatggcttctaactatattactatgttgcagtttttgatgttttcttttatgtaattattcagaagagctgatattttcttgctttcgatattgaaatcgcattggttaacttgctttgaaaagatactgtacaaaacgctgcaggtaataattgattcgcagcctctgactgtggctat

SEQ ID NO: 101043 - DNA, 797 bp, Mimulus guttatus
  Intron number 1 from transcript mgv1a011785m (locus mgv1a0 11785m.g) derived from phytozome v7.0 (chr-ID scaffold_75; pos 582066 to 582862 reverse strand)
aaccggaaccaaaagctccgtctgaaaaaccctaggtattcttctgcaaaattaaagattcattttttttcttcttcttcatgtaattgtttcaagtttatttgctgcattttatctttttgtcgcgcaattgcttgaattacgtgcatgtgtgattttcctgttgaaaatgatcaatttttccctgccctacgccgctgataagtcgaaattctgggcggcggcggtggggtggtgggttgggttgtttcagggatgatcacagctgaaattgaagggctgtgtgatattcaataataatttgattttctatgatgtaattgctagtgattcatgggattttttggggtcgtaatttttagggcggaaggggaggggcatgaacataactatgtcttgaattgtatttatgtcggtccggaaaacacgaattacacgtgtgtaaaatgtttgttttgtcgtttccgagaagctgtcggaaagattagattgtagcaagctgttttaaattgaaactaatgcgctggaataaaatttgagctttcctttcacgatgaaaccattctttcggttttgaatgcatttcttgacatcgaaagtactcttccaagaatctgagaatgcatttcttgaaaccatttattaagtggttcgcgtcgttgtctctattctttctgtttatgcattggacatacattgataagcaactacgaatctgagaagcgtgtatcttacctgttgtggtgtgataaattggccttctaaaataaatcttatctttttagggaacttgcaaa

SEQ ID NO: 101044 - DNA, 869 bp, Mimulus guttatus
  Intron number 1 from transcript mgv1a008690m (locus mgv1a0 08690m.g) derived from phytozome v7.0 (chr-ID scaffold_211 ; pos 5937 to 6805)
tcaacgccatcttctgggtaaagaaccaggctaaggtactaaattagttgatgttcattttggtttttgttgtgttttgattgcattttagtaccttgttttatcatattgctcaaacagtcctcatattattaaagattggcgaaaaaaccctctttaattatgtttttctgaaacataaaaccatctaaatatagagtttctagtgtaagggtttttttggctaatttttaatagtacgaggacttcactgacaattagaataaatacaaaggtattgaatgctattaggtgtagaaattggaacgaaatccgatttcctccaattccggcttttctccaattttcttttaatgaaaatcggaatatatattagatttcaccttttgatccgattttaatttttgaaacctatacttgtaatatcaatattattgtgctccttagtccttatattttaaaggtgaccaaaaaattggaatttttcgaatgccgcggataacaattaaaaaaaaatcagtttttgccttttggaacgacttttttcattataatttctatttttttttgatttttttagtggaattgaaactagtttttcacttaaaaaaaactattgaattttcctaattaagtgcttcttttgttccgtccggtttaatttccatgcataaatacaattatctttatttaatttcagttaatctataaattaatacaaatgcgcgcgtctaacaaaattttatcaatttagcgaagtattaaattattgaactaataatttaatatgtttttaccgagtcgagagtagaagaaaattattaatttatcaacatatattaaaaacagggagtaggggggcgggaccc

SEQ ID NO: 101045 - DNA, 397 bp, Mimulus guttatus
  Intron number 1 from transcript mgv1a003413m (locus mgv1a0 03413m.g) derived from phytozome v7.0 (chr-ID scaffold_22; pos 1309599 to 1309995 reverse strand)
ggctgtgagtttctttctttctttctttctttctttctttctttctttctttctttctttctttttattcattggtctgcaactacttttggtcaatgtatatgatgtatccagagatatgcatattattattattcagggattgctgattaattggtgattattgatctgggaatttttatttttatttttctatatgtgatgaatatgatcagctgaatttaccttaaagatcacatctttaggattgtagaagatttcagacatttgatttttagattttgccattgttctcatcaaaggtcagatgtttcattcaatctgcaataacaatgtgtaatacgatatttgaagccttgtacaaaaaacaaaacatgattatcgattttactggcag

SEQ ID NO: 101046 - DNA, 986 bp, Mimulus guttatus
  Intron number 1 from transcript mgv1a004120m (locus mgv1a0 04120m.g) derived from phytozome v7.0 (chr-ID scaffold_4; pos 2819038 to 2820023)
tgtcagatatcatcgtagctgtgttgacggagcaggtattgtactgtattgtattgtattgtatcccccacctaacttttcttgctcggcaagcttttcttctcaccattttttaatgttacgttcctacactaaaatattattatttaatagtatactagtttgcttttttttttactgtcagacattttttgtttgtattggtcaaattaattacatgtgcaatgtctgatttgtcttccctaaacccctccttcaaaccattcaaaacccttgttcaaggcaaagtgcgcaataaatcagctctacatacagatacttgtttgtatttactatttactcaaggtataactgaagttattgcttctgttcatgttttcatttcttccttttttggtgagggttcgttagttttttgattaattcaaacattttccatactcgatctagtttcgaacctattgtaagtaaagcaaccgattcaaaaatgtagagatttttttttattgttattgcattatatgttgcaaattgttcagaggtaaaacagaggatgtacattaatgaatactgtgttctttgatatttacatagctaaacatgattgaactacgaaaaccgtaacttgtatcgtttattgaatttcaaataaacagaaaattatattgtacaataattgcctgcccacatcaagcatttcgtgtttgtggctatacaacgtgtcgtttattggtaatagattttcttattagagtattgacaaaagttctcctttgaaattgctgacgataaatggtttgctgctgtgttttaattgaccggtcttgtcttgctcgaataaaactagttggattttgtattttattgctccaaattctttggagttcgcggtactaatgtaaagctctttttggtgttttgttttccttcgctgaattgtcgtataaataaccgattattacagataacatcaaacatcattagcc

SEQ ID NO: 101047 - DNA, 706 bp, Mimulus guttatus
  Intron number 2 from transcript mgv1a015884m (locus mgv1a0 15884m.g) derived from phytozome v7.0 (chr-ID scaffold_54; pos 932265 to 932970 reverse strand)
tctgggtatgtaacactcttggttacttatgaaaatgcacttcaattcaattcaaaattgataatgtatttgttcctgatcagttctttcatgctttgtcgttatcgagaaaaaaagtatataggatcattgcatctgagttctgtttatgtactcgtagaggtcgtaaaaaaatacaagtttgtcgattttttttctttttctattaagagcagaatacagatggtttgaactaatgtaccactcttagttaataatgaaattgaaccttaaaatcaattctaaattgatattgccgccgttcggatcagttcttcaatgccttttgccattcttgatagaaaaaagagcatatttgatcattgtatctgaattgtatctgaattttgtttatacatgcaactatcataaggatacaagtgtctgatcacgaatacattcctagaaaacttattcccactaggaatgtaaaactgttgcaaattcttgattacgaatactgttttcagttgtccgatcaaagagttgcttataaaggaacttatgttaactataagatagagcatgcaaacaatcttgttatatattggctcgtgttgtggttcagtcttatattttttatcataaattgggtcactaataataatttaatattgataaattcgtttcagtgaagagcccgtcgttgttgtggagacacctgctc

SEQ ID NO: 101048 - DNA, 597 bp, Mimulus guttatus
  Intron number 1 from transcript mgv1a001324m (locus mgv1a0 01324m.g) derived from phytozome v7.0 (chr-ID scaffold_54; pos 1342557 to 1343153 reverse strand)
aatcatttcaagcggcgcgattgatctatcctcaggtactgttcttcttcaatctcttaactttttaattttttcctttttaccattttcagatccaatcggttgttattttttgtttattatatgattttacattgtcctacatcactgtttgtccagtattgtgcttaatcggatgtgttcgtagtggtttatttatttgtttgattaaacttgttttagtttttagtttgtccgatttttattttttttaaattgaacaaggtcgttgctgttagatgttggttgattatgtaataaagtgattttaattttaatgtgttctgaatgaataaaatgggtacaatttttgtggctgtgaggacgcgaagatccaattgttgtactcattgcagtgaattaatctgaattaatccattaatgtgtataaatgcgacttggataaaattactcctttatgatttatgtcttcatagatgaagtatggctggttttctgttgatttgtagtttgctcttgttaatttaatggtgttgatggattaagttatttatttcctcaggtttgtagctgattctttgcagtcaagtaatcgtt

SEQ ID NO: 101049 - DNA, 1013 bp, Mimulus guttatus
  Intron number 1 from transcript mgv1a009087m (locus mgv1a0 09087m.g) derived from phytozome v7.0 (chr-ID scaffold_3; pos 3820274 to 3821286)
ccaaacgagtgtatcaggtgtggaaagggaagaatgtaagctcttctttctcatatctatccacccccaaccggcaacccccccccccccaccccctttttttttttatggatgaaagatttttggtgggtttctgttaactctgttaatgtaatgtgcattttagttattatcatttttcattattgtttggtgatattatgaaatgggacttgctgggcagatctctctctctctctctctctctctctctctgatacagctaaatgactttaattcagttctaattcctggattcgtgtaactgaactttgtgtgtaattgtatacaagcttcttgaactcatttgactgtgtgtgtgtgtgtaattgtatataagcttcttgaacccatttgactgtgtgtgtgtgtgtcaattacttccaatttctgtattatctttttgcctttttcgagttcttttactctattgcctgagttatcctgccggttctttcgataacggggccgggagattgtttaagaagtgatctcttgccacaatgtatggtggcgtatccgtaaatttgtctgaattttatatcacaattccatgctcattcaagttagtttaatcttttattttgatgctacaatttgaaggaattagtgttctactgttgaatatacgagaacaacttttcatcgaacacttgtcgtaagatggtacgtttcttgatagtaaaacgtattaggtcgtttcggagtgagttgcttgtttaagctttaatacgataattttgatagtcccgtaatccgagttcaacttctattaattatattaatttttttttgttttccaataaatttttacctctaaaaaatgatacgcaacatccaatatcgaaaatcgaacctttggattagtgttcatgtgcgagcgtatgtttttgcatttcttgaaaatttacgtgtgcaattaattgtgggcttcgattttcttcgtgcagaaattcttctttggtgggaggttg

SEQ ID NO: 101050 - DNA, 1023 bp, Mimulus guttatus
  Intron number 1 from transcript mgv1a010744m (locus mgv1a0 10744m.g) derived from phytozome v7.0 (chr-ID scaffold_174 ; pos 488083 to 489105)
cccaactgtgatatttgccaggtttcttttttcttctctcttctcaattaatttatttattaatttatgttttttctttgactaatcttgaaattcataattcttccctattttcctttcatatatatatattcaagaaatgttcgcttcttcaaaattgatatttcttgatcaatgatcttgggattgtgatttgtgagttaattgttattattattattagggtaaattacaacataacccttgaggtacggtcaaataaaaaaaaaaccctcttgtttggataattacaaccacccctccgctataaattttcttgcacacgtccacccttgctgtgacaatattctagattatatggaatattctcaattttgtactctgttttggttttatccaattcgagctccatattttgaagcaagacgatcgtaagatatggtttttggcttgtatatatcagattggtggtgcatcagaaactgcaattttgcaaataacaagtataaattatagaacattccacggaatctagaagattatgttgaagacactatgacagtggacgtgtaagaagattcttagttgagggtagttgcaattatccaaacatgaggggtgttttcgtaatttgaccacacctcaggggtggttgtaaatttaccattctgatgttttgtttccatggatacgaactgtgtgtttggtagtgtgttatgtaatagcatagatgtgtactgaaacccaaccagtggggggcaaaaccatgtgttcatcatgccttaattccatgacagatacttgggttaccatacagttgtcacaattcaatttactcgagcaccgtttaatttccgttgtgcgtattggaagattgcattgtttcttattgggaaatcgattgaaattcctttttcttattttttgttttttggtcttcgattgctgattattttttaacaccgaaaaacggaaaatgtttacgcaggaaagtgcggggtatttcttctgcctggaggatcg

SEQ ID NO: 101051 - DNA, 965 bp, Mimulus guttatus
  Intron number 2 from transcript mgv1a013415m (locus mgv1a0 13415m.g) derived from phytozome v7.0 (chr-ID scaffold_37; pos 786706 to 787670 reverse strand)
gaggttagtgttaagtaattgaatgttttctcttcctaaattaaaatatatggttatttgattctggtcagttgtatattgttgatattcttctgcagaaagggggtaattttttatttattttttaattttgttttctgtgttctgtttgtgatgttgctgaggttagggtttagtttgtgtaagttattggcatctttttctggatagagattagttgaaatggaatagtttacagagtgggctttttgttctgtttgggcacgatttttttttgaaatgataggattttgcacttgagtgattgatgctatgttggtgaagtaaaggagggatggtgtttctcaattaagtttattttgatctgtagatttatatttatgattttgtcagagtatatgggtctggattttttgaatagttggcatcgtggaaagaaattagttgaaaccgcataatagaagatggttatcttccgactaggcaaataaaaatcatcataaagtatgatgacacgagttttctgttgttttttgtttttctttttctgttccgagtatgtgtgttgtggagtgatgcacgatgaactcaacattcttcttctgaataactcaaacacatcatctttgttatgctcttataggcatagctatggatgaattaaatatgagaaatataatatgaggctcatgtatatctatgtcatgatatcttccgagtgataatccaaacagtcaaatttgtttgctagattttattttttatttccaagaaacagatgaagaatcctccatctatgggccattgattaattcaacacgtatttttttgctaaatgatctgagtctatattgtttgtccgtaatcatatttttgtcattcgggtttgatctgtttgtgaactggtgcttatgttgtggtgttctgcagagaaaaagaaacaagaagtttctgtaatacaagca

SEQ ID NO: 101052 - DNA, 338 bp, Mimulus guttatus
  Intron number 1 from transcript mgv1a027136m (locus mgv1a0 27136m.g) derived from phytozome v7.0 (chr-ID scaffold_68; pos 385910 to 386247 reverse strand)
gaattgaggtgtgataaagaacaattaaattcacggtacgcaagatataacctttatccttttcaatcaaaccaataaacatattattcttggtgcatgttatagctctatgaaactaaagttcttgttggtttaatttttctttcaatgtatattaactattatgccagaggattaggaatatgttctcaatattctcattatcattcttagctttcaacggctagcacctaaaattattctcaatttcattttgcaacgtatcattgcccctgccttacttgctgtattctaatattacagtcttgggccacctgacttccaaccaccaactccaa

SEQ ID NO: 101053 - DNA, 802 bp, Mimulus guttatus
  Intron number 1 from transcript mgv1a012503m (locus mgv1a0 12510m.g) derived from phytozome v7.0 (chr-ID scaffold_62; pos 340990 to 341791)
tcagaatcgcgtcagcaccaccaatcaattttgaggtaattaatttttctcactccctctgttaacttctctcgatttctatttctctgtctaaatgagttttggctgggaataatgtaattgtgctttagctgggggaagacctttaacaattttgtccaattccccactcaattctatatatgagttgttgatataaagtttgatttcagcattaggtgaaagatttcgtcccttttagtttcgtttttttttcccaattgtttccagttttatcttcaagaaacattgatcaatgttgattcaagaaattttcaacaggtgttcatatgcaatttagttgggttttttttttttgggtgtgtgtgtctgtgatattatgttttggaataatggtatcattcatattaatttattctaaaatcgttctcatcgatgtcctaatttgcgaattcccacctgtgctataattcagaagaggtgtactcaggattcgttgcgcttcggtatcactttgtgttattgtgcatataacttgtgttttatctatgttctacaaaaaaaagataggcatataacttgtgttttatctatgttttatctatcttttttgttattaataaaaaagaaaaataaattgtgttgattattgttactttatgcaatttcatttacaattcctttttttttataaagtttccattagaagatcggatggcattgctgttgttaacaactttgtctatataaacttgttaaacttttacatctcgttgttaaattcaatttaactattatagat

SEQ ID NO: 101054 - DNA, 989 bp, Mimulus guttatus
  Intron number 1 from transcript mgv1a005171m (locus mgv1a0 05171m.g) derived from phytozome v7.0 (chr-ID scaffold_40; pos 717953 to 718941 reverse strand)
cggagttcagttgttcaatcgtattctttctaattgtaagaaactgaaattaaacttcaatttagctattttcctaatgttattcatcttcatgttttttttttaattttcaagtgaaatcaaaccctatatgcgagagagtgccgagccttttgattacccgcatttcagcttttatcacaaaaaaatattcttatgtgatagaacaatttatactttcttatgtgctaagaattttcacggttttttatgatatacacgccattcggaagttcgaattggaattccaaactcacccttagatgcactgtagctttatttccagaaattcaaattggttaacttgcattgaatctttatgcgttggccgacactgtagatgttgttttttatgttccatggttattggaaactttgggctgtgctaaatgaaaacttcatttgattgcttacaagtcaaaattgcaatttcccatgtttagtgaaggaagaaagagatggattcttttttatgttgcagcgggtgcttcatgatagaattgggtagtaagttatactggattaggtagattaattggaaatatcatagatcaccctaaatattatctgcttgatgctgtcaattttgaatcatgatcccctgataaaacaatgtaagaactgaaggtacggaaagagagggatagaaccctcgaacaaggaaaaaatgcgggttcggttcccgctatccgctctgatatgaatgtcagaaaaaagtgtaattttatgtattgaatttattgggcactattttgcagtgtaaccttgttgtgtcatattaactggtcctgatgtgtgttgctcgattttttctttccctttttagttctttgattctgttgggcattgtttgaaagaagaaagtgcctctggcccgtaacatataactggtaagactaagacctcgactccttttcaaactgttcagaaaagaacctgttaggatcacg

SEQ ID NO: 101055 - DNA, 687 bp, Mimulus guttatus
  Intron number 4 from transcript mgv1a003597m (locus mgv1a0 03597m.g) derived from phytozome v7.0 (chr-ID scaffold_164 ; pos 122839 to 123525)
tcaatacttccggccccacagagctctatttcgaggttctttttcttctaatgatcctcgaactaaatatttattttaatgtttatttattattcttgcgacaacaattgcttaaagtgctgcaagtcatgatcatatcaaaattaacattttcaagaaaaaaacttcaaagtaaaagaaaattatcgagtagttttcatcttaaatctatacaactcgataaagttcaccgagtaaaacacataacaaatctataaaatacacaatgataggggggatttcagttttcatccctcaagttgcactagtttcacatttggtccacatgttcataaaaaacacatttggtccctaatgtttaaaaatttaacaatttttgtcatttccgttacttcgtcagttaagttagtcacggacacacgcttgattccgttagttctaatgggaaattgacggaaatgactaaaagtgtagaatttttgaaacataagggaccaaatttattttatttttgtgaacatggggaagaaatgtgaaattagtacaaacttgagagagtaaaaatgtatttttccccacaatgatacaatatcgatatgtaataaattaaatgttgtaaatgtcgactttaacctcattctttcatttgcagagcaacaacacaaaagttgatatttgggcagacag

SEQ ID NO: 101056 - DNA, 633 bp, Mimulus guttatus
  Intron number 1 from transcript mgv1a023977m (locus mgv1a0 23977m.g) derived from phytozome v7.0 (chr-ID scaffold_24; pos 1543668 to 1544300 reverse strand)
caaggcccatcacaaagaagacaaaagccgaagaggtaattttttttttattttccttctagtccctccgtttctttttaactatcactttaccccttgagggtaattttgtcttcaaatagtagaataaataaatgaaacgtgtatagagggtaaaatcgacatttacaaaggaatattccctggaatgaaagattctgttagaatttacaccgtaataaaaacaaacgtgatattttctttctttttttggaaattaagaatagttggtttttttttgtagttcactcaacgttcaagggtttttttcgtaatttaatccttatacttttccaaccttaataacacattattagattaatgaaatgagaaagaaaagatgaaaagtcaattggtcaaataaggaattttttctcactatttaaaacatttattaaccggtgtgcatttaccttaaacgacacttcaaaaaataatcagagtgagtaattaatatacatccggtgtttggtttgattgttccgggttttggtatttaaaaacgggatcgatctcaaccgtccgattgccgattttttatttttattttttttcgcagcaaaaactacttgagaaggaaacacaacaccacat

SEQ ID NO: 101057 - DNA, 763 bp, Mimulus guttatus
  Intron number 1 from transcript mgv1a015464m (locus mgv1a0 15445m.g) derived from phytozome v7.0 (chr-ID scaffold_79; pos 1065825 to 1066587 reverse strand)
caggttagtattgttattttcgtgtttcaattttgattgttcgatttctttacctggctgggaaatactctctactttttgctgctaggagtgatgaaatcatagggatatgatttctgagagatgtgatgctaatactgtttattgtagtaagaaattaagcattctggttgattttgtttattgggttcacttgtaatcttatttgttgtcaaaccagagttaataactataccacaatgtttggtgatgtatgccaatctaatgctgccattagaagggacgacaacgaaaagagaagtttatgcactatactggaattggagggtgttgaatgaaatatccagctgatgtgtatttagttgtgatactaatcaaatcgaagtcgacttcaactaaattaaaaactgatttccttaaaaagaaaatgcatgagcatctatgtatttaaaaaaataatgtacccgcaataccggatatacatttatacgctcagagaattgtgaaatgtgatgtatcatgtatggcacgacggcaagtaatttatgaaatgaattcatttaacttaaaagagaagaaaagcgtattctacgaagttaaaatttgtttcatattaaatgtgctgcaacgtggtagcttggggataggcttctaggttattcatatatctgaactgagttaatattggaagaatttttttttaaattgatcatgtgcttcggtgataggcatcaagagctaggctgtttaaggaattcaaaga

SEQ ID NO: 101058 - DNA, 919 bp, Mimulus guttatus
  Intron number 2 from transcript mgv1a015928m (locus mgv1a0 15928m.g) derived from phytozome v7.0 (chr-ID scaffold_2; pos 3399951 to 3400869 reverse strand)
aaatcgaaggctgattccaggaaggccgacagcaggttaggcgatgttttttttttcgttgctatatttttgtcgttttggctgattctctgttgattgatctgtataattctactgagtttattttgggtgtattttgaatgttttgctggtttccagatttttacttgacgaaatataacgagtggtttggtaattgaaattgttggtaaatgcttcaaataattcagtctcagattagatccactcgtaatacctctttatttttttttattttttttctgctaaataaaatcagcacgtgattcattttcgttttctctgatggatctgaaatcaagtcaacctgtaggtgctacaatggattttgtattagtgttatccagtttttttgttctaaatacgattagaaccaagtttgaatcagcatagttttaaatacatctcatgattttctgagttttgtatctgtgattgattgtttatcttccattactgactgtatttgatgatacaattcattgggatgcctaaacatttcagtaaaatattgaaaatctatgttacatagccttgcactgaatatcctatttaaccaaatatatttgattttctggtgatgataatcagtgattcgtcttttgttaaaatgttctctggttatttttgaagagctggtcacagttcatcgagttatgatttatttttgtttcgttcaaattctgactgatgcattttcagtaagtacatcggatctattgattggatagtctgttttattgttggggcctttcgttttggatcttctatggtttcagtttcttcgtgttgtgcggatgttgtttgatggagcttataaattaaccattaatttctggtaatagtaggcttgctgtcaagaagcagacaaagaaggaga

SEQ ID NO: 101059 - DNA, 406 bp, Mimulus guttatus
  Intron number 2 from transcript mgv1a015729m (locus mgv1a0 15729m.g) derived from phytozome v7.0 (chr-ID scaffold_151 ; pos 519070 to 519475)
tggcaggtttgagaagaaaggtttcaccctaaaaggttgcttttttgattctctaatgttgttgttcttcattaagtgatgaaatgtcaaccctgtaatcactcattgtgttatataatcactttattttttcatcttgcttaattatgatttatgctcaattagaggcatgcatatatgtatgaaacttctcttttcgtatgctaattagggaagctttcatctagttcacgagctgaatagataaactatttccgacaaaaataattatcaattacgatttttcgaaaaacaacaatcgataaccagacatgaacttttaaagatgcattcgattatctgaaatattatattttgtttgtgaattaataaaatggattctgctgttaaaacaggtctgaaattt

SEQ ID NO: 101060 - DNA, 982 bp, Mimulus guttatus
  Intron number 1 from transcript mgv1a003162m (locus mgv1a0 03162m.g) derived from phytozome v7.0 (chr-ID scaffold_69; pos 1045177 to 1046158)
tggtgtacgttgtgtgggttgggttttcgggggcagtacgttgccccctttgtggaatctatttcggtgttctgtgttgctctgttcgtaatccagtctttggatcgcttgattctttgcttgggttgcttgtacatcaagatcaagaaaatcaaaccggcgttattataggtgatcctttgtgcacccataatactgaagctgcactggaataattaccccatggttcttgtccaaattcccatgtgtaatgaaagggaggtatggcaatttttctcttttttattttttttgctgccatttttttgcacttatcattaaggtttattgcaatttgtaccccttgtgtaatatcgaattactaaaaactacccccatgttattttattggcaaaaaaaccccctactattcaattatttttttaccacacaaccccctaaacaggggtactaattgttattaaaaaaagtatcgtaggggggtttttaccaataaaattacatgaggtagttttttgggtaaattacggccaaccccctgaggtatggtcaaattacaaaaaaaaacccatcttgtttgggtaattacattaaacccctccttttaaatattttttacatgaaatttatgtaaatcgattatttaccgaaccaaatcgtatatttagggatgttaaatcggtttcactgatttaacatccctaaatttacctatggagaggtattttcgtaagataatacatagttgaggggtggctgtaattatccaaacaggaagggggttcgtaatttgaccataacagaggtggccgtgatttgccattttatgggcaaattcgatatatataatataagggtactgaatgcaataaactcattattattatgaggtacggcagtttttttccctttttattttcttgccattttttgactttgtaatgaacttattctgttttttttttttggtctaaaaaggtat

SEQ ID NO: 101061 - DNA, 521 bp, Mimulus guttatus
  Intron number 1 from transcript mgv1a004387m (locus mgv1a0 04387m.g) derived from phytozome v7.0 (chr-ID scaffold_7; pos 2003286 to 2003806 reverse strand)
aaatccctggtaaattcattttatttatccttaatttagttcgtttgtcgttttaccagttatagatgatgagcatatatgtgagctaaccttgcactcagtgtttgtggtttactaattttttggttggatttttccaatttttttggtcttactttccatgtcacaagtgtgggaagacttctgttttgttttgaggtggggggggggggagggttgaagttgtggtagagttagttgtaatcagtggtcttggcctattattaagtgtgtgtgagtttcagtttaggttttattctttctttttttccctgtagaatttgtttttgatggagaatccaggtaactgctacttgatcgctgtacgggtaacaacaagacaatcttgcttaaatttgaattttaacagtttgtgagttcgacctggttaagtgttcacaaagaagatagaatgtgaatttaggcttatgtcgtgtgtttttttgggttaatcgcaggagttaaggagtcctgaaaagctc

SEQ ID NO: 101062 - DNA, 781 bp, Mimulus guttatus
  Intron number 2 from transcript mgv1a016224m (locus mgv1a0 16078m.g) derived from phytozome v7.0 (chr-ID scaffold_128 ; pos 338636 to 339416 reverse strand)
cgccggatccactcctccggcgtcccccttcgccggtaaggtttgataaacaaaatcccaattctattgtgtgttaaaagatccattccatattagggcgtctagaagaatctttgggatctgggagagggcaatttagtcatttcgtaacttagagtgagatttggagggtagtttggtcataatactcgaatgcggttgaattttcaacgggatattcaggagcactactgattggtagggtctctatttaattagagaatgacatctgtggaagtggaataattaattattggtagggcaataatgaataattatttaagctgtttgacttgcaaccccgcgcatatatatatatgtatgtatgtatgtatgtatgtatcatttatattattttcccaaaacatcgatcttttagattatgaggttcttagttagaaatgtggaacatgcttatttatagcaatcaataaatattttgatctaaatattgcatttcgactgttatttatatgctacatccggtgaagattacaccaggtgtttttatctgttgatctacacacactactgtgggtatgtgtgtgtatgaatagtaacgatttactcggtgtatttcgcccagtctaacatagaataaaccgcatttcgacactattggaatttatttaattagtaacatgcatataaatatggttaactaatgtggaaactggttaaactatatatacaataatggtatataggtggaggaagagaagcattcaggtttcgtcggagg

SEQ ID NO: 101063 - DNA, 930 bp, Mimulus guttatus
  Intron number 1 from transcript mgv1a019452m (locus mgv1a0 19452m.g) derived from phytozome v7.0 (chr-ID scaffold_207 ; pos 286644 to 287573)
gagttatcaaacgtattcaaactttttaactccaacggggttatcaaatgagggtgctattttgatagttcacatcttgggatgtaaatatacttgacgaaaattgagttataaaaaatgtaactatctaaacatccaatcacaagttgacatgcggtaattacaaataaaattactcataaacttccaattgataattaatttgataactatgattagagtagatgaattttaatcaatatgaaaatattatcttaaatatcaaataaatatttgataattcaattttaatatttagcattggaattgcgttcttacttaggaactggtcatcagtaaggcctatagcctacgctagcgaaccacattgcactttgaggtggttgagcacgagcctaatgtgaatttgttcatatttgaaaaaataaagtctaaattatgaaaatgaaaataatgttagaattgattaatttgttgttagactcgtaaatatttcctctcatttttctctcattgcattacctactcgatttacaattaattttaaataaaaatatcttaatttaccaccttatattccaatattaccctttcttaaattaataatcactaatcacaaaacatgcaattcaattagaactctaaatccaccacccatataaattcaatcatgtcgacaataaacaaaaaaaaaaaaaaaaaaggaaaataataaaataaagttcatacaggctaaatccactatactatagcccagttgaacttcaccattttctatcccacatcgaaaaaataattgcttttcttacagttcatatacttcagcatcctacgtctagtttgtcccttcggggacatccgataaaattggaacgatacagagaagattagcatggcccctgcgcaaggatgacacgcataaatcgagaa

SEQ ID NO: 101064 - DNA, 815 bp, Mimulus guttatus
  Intron number 1 from transcript mgv1a002155m (locus mgv1a0 02155m.g) derived from phytozome v7.0 (chr-ID scaffold_115 ; pos 103222 to 104036 reverse strand)
ttcaaggttcttacttctctctttgggcacacgcgtatacagactgtgtatcatcattattgcccgaattgaactaaatgtctgaatttctttactaccttcttttcatcacttctgcttactctctgtctggtccagctcttactggacacatcttttttctttgttcattcaatatttctggtaattaatatcaagattggtggtattccctgtttatttcttggttttctgtgaatcttcccgccttcttgcttcttttcttttgaactttcttgctttctgttttggcgcaggtcctttaaatgttcttgctttttcacttgtattgatttttcttgtatcccttggtgcgtggtcttatatccgttctttaccaaaacttgtggtacacctaaatactgatcagaagggggagggaaactcgttggatatggccttttcatgtcacttctagtggaaaaatccttatgaacatatgaaacgtgagagatgcctgttaaatcatgtttttatcaaaacaaatgattcgttgggcctcatacgcagtttttgtttgctttatagccaagttcaccaatcaccctttaatgacactgatttggagttgtacttctattgttaaatcctgccatcttgtccataaaatgagttgtttgcctgaactatttactatattgaaacttaccaatatcatgtaggctcttattttatgttattcaacatttaatttttcttaggttaaatctctcgcaaatgttcttttccttgtttctgtagttgagcagcgtaagcagccaactctaagaggtcat

SEQ ID NO: 101065 - DNA, 701 bp, Mimulus guttatus
  Intron number 1 from transcript mgv1a009902m (locus mgv1a0 09902m.g) derived from phytozome v7.0 (chr-ID scaffold_104 ; pos 618044 to 618744)
ggaattagaggtaaagtttgaatttagcatttttcgtatgcgtgtatgtatgccttcccgttttcagaaatttctgctggaatgtgttcagatttttgttggatcaaaagagatagttttctagttaattaaacatctgaattcgattaagcatggaattttgtgtttagaagaagataattttgtgattgaattcgtccatggggagtgagatctattctattatcagtttatcaatacatatatattaggcgtttgtatatacgtataattttttttttttatctattaatcaattatttctagtgttattttatcttttaactctctagtgtattagtagaatatagtgtgaagatgaaaggggtaataatatacaatgcaagactatgttggaaatttaggttactcgcagctgttcttcacggtcttgatcgattttaggatactgaatatattttggccttaaaagctgaattattgaattttaaacgccttgctgcactgaaggataagtatttccgtaagaaagaaaaatacgatctggaaatactaaaacacggtcaagaacagttcttaaactccggtaaaattctgctagaatgctttattactatctaacacttgtgtgatgcctctttttttttttcttttctttttctacagagtaatttcctgcggtttcagtgacattgacttct

SEQ ID NO: 101066 - DNA, 796 bp, Mimulus guttatus
  Intron number 1 from transcript mgv1a016256m (locus mgv1a0 16256m.g) derived from phytozome v7.0 (chr-ID scaffold_1; pos 3948787 to 3949582 reverse strand)
aatttggaggtacttccttctctgatttttatttttgattgttttttatccttcgcttttttcggttttggattgaatgtgattgaatagattcatacgtcggacgtatcatttttgttgcactatttgtttcaaagctagtgtcttccgagcatcgaatttgatttaaaaaaactgaaatttggactcttgaataggtgtttggctggaacatgagttgattcttaagatattacttcgggccttgtttgaacactaactaatggaacttatgacggtcgatgcaaataattgaattacgtgttagccacaacaaagtatttaaaatggcgagaaggcttagtatttgaaagggaacttttttcgatagttagtaaagcttatttttctattgaaacacttgggattttggttaatgtacagaaatcaagaaacttcgtttggaataattatatttctgtggtcaagatatgaacttctgatatctagatttttagagaacaatttgcaaaattgattacaatgaagcagctgattgcatttatctatctttcaagaagccgtgtggagttcgttgaagtctgaaattggttcagttgattttagtcatgcttgttgatggttatgacttacgcgtgcgcttttatgagtttggtcgtttttatattagtaataaggtctccatacaatcttgttgaatgtggaactgttcatttcttattgtaatgtgtaaaaaaaaattatgtatgtaggttaattcaactaactgatttgcctatgtttgttgaaccagata

SEQ ID NO: 101067 - DNA, 729 bp, Mimulus guttatus
  Intron number 1 from transcript mgv1a000514m (locus mgv1a0 00514m.g) derived from phytozome v7.0 (chr-ID scaffold_16; pos 1634477 to 1635205 reverse strand)
tcaggtggctgatactgatataggagtgtctgtaggtaattaaacgtttcttctaattatttactattatttatgccgttcttttcatgcttattatcttgaattgataatagaaccgttgtacaaagccttactttttgtatatagccgttgatgcagtatggttggagaagaatatgttttattgtaaactagatttgagttttactgagcatgcattaatggcaacaccattaagagcattactagatccatagtttcagaagaaaaaaggaaaaaagatccgttattaacttttactttcaagtattgaacttcttcaaaggcattaattatggcttcattaaagtcgagattgactagtttcccgtgcttgaaggttgatttatacttagatttaatgtggagatagggagtgttttgcagtgaaaaatgaacctatacaaaaaaattggtgttcgttttcatgttctgcatgctgagttggcgatgctgtcatcaccattacttatcgaatttaatgctgtttttatccataaagattggtgttcgttttcatgttctgcatgctgagttggcgatgctgtcatcaccattacttatcgaatttaatgctgtttttatccataaagattaaatcatttggactttcctcatctataaagaatattttttagccttattcaaactaatctggtttgtcttgcacagactcgattctttcccccg

SEQ ID NO: 101068 - DNA, 647 bp, Mimulus guttatus
  Intron number 2 from transcript mgv1a015537m (locus mgv1a0 15537m.g) derived from phytozome v7.0 (chr-ID scaffold_115 ; pos 214695 to 215341 reverse strand)
aagttaactccaaactcaacgaatctcctggtctagtgagtcttctttgaccaaatcgtgtttcttttttgtagatgtggatgcatcttatttatgaatagttccatcgttttttttcctccttattttggatttgcaagtatgaatgaaagagagtgtgcaaaagggtacgtacttgcaaagtaacatcatcgtaacagaaagaaattaaatagttaatagtaagtaaaaaaattagcaatagacactgaaatggggattaatactgtgacggactttgaattctccgacgttagtcagattatttggtttaaatgcgccttgagcaagtggaattaatgctctgtttcttgctttgagtgacacgacctgcaccttaattgtactatacttattgcttctataggactgtgatactcgactgcttacacttctatgatctgatactatattacaaagtggtcgtgttatggcgcacattttgacaaatggcactagttaaaagtgcacgtttccccttttctgcatttactagtgtataagcttaatatactcaacgaattatcttcgaagttatcgcatatcgatctttgtattattgtggttattctattgtgttaatcttgtcacgttttccattcaggtta

SEQ ID NO: 101069 - DNA, 911 bp, Mimulus guttatus
  Intron number 1 from transcript mgv1a009243m (locus mgv1a0 07018m.g) derived from phytozome v7.0 (chr-ID scaffold_164 ; pos 257588 to 258498)
tgatatcggtgacattgatacttctgtttggtgaggtaacgaaatttactataaacgatttataatcccatccgaaataaagatgaagacaggaaatcaatatttaatgacagtttagaatatttcatttgtcagtttccataaagttgccaaaattttaaagatattatttggttggtttcatttcggagatctacttattattctatattataacttttggtatgatattgcaaatcatgatggtacatcacagcatttaaaaattgctgtatttttatatgttgacaacaagacgagacaaagagctaacatataggggctatatggtgatgggttggcccaattcaaatttactgagatcattaaggagctgaaatatatatattttttaattaattcaaaactggagaaagttagaaggatattctgcaaatggaattgaacgaaaattggttaaaaaaattatttggaaggaaatttgggccgctgcccaccttttttatgtatgataatagaattaatttgtttaccacctaaatcctgccgattcagctgcattcccccactttaccacgggctacttaattaattttggttctgtccatctcagtgtgaatagaagcgaatgtcgaagtttatttgccattcttaaactagtgtagagacaaaaactgtgttaaggaaaatcattagtataaatttatatagttatatacttataaaaatgatgtggaaatttagttcactgtcgataagaacgaaggtggaatactggatgcctttttttttttttttgtataaccatttacgcattaagctacacacaaactactagatgcgatttaatgatgaatttatggtttttttttttttttctcagatcatcccacaatctgtttgttctagat

SEQ ID NO: 101070 - DNA, 664 bp, Mimulus guttatus
  Intron number 1 from transcript mgv1a001861m (locus mgv1a0 01861m.g) derived from phytozome v7.0 (chr-ID scaffold_13; pos 1522310 to 1522973)
gtcgtttcccattgttgctgcattcggtttattaggtttgttttccttctctattttcacgaggatgcatatgttttttttatataattaattgatattaagatcgaattgcttcaatgctggatgcatgtgttataccctatgttgatttgaatctgcgcttgtggttttgggttatcggcgtgatttgagctaattggggttattaatttttgtttatttttagtaattcagctgattagtgaagtttacctcgctctgctagtgaatcgagtagttgctgtgtagaaactattgattgctttttgttcgcttaattttgttgttgtctgattcatgtgttcttggagcttgtttctgttaagcttccttcttttcattcatttgcttattggattagttgtgtgtcctattatattcgttcacttgcagcggttaataccgaaaaatcacgaactttcagctcgccgaattacttaattgagaatttaattgcaatctgtgcataaattatttgctcctgcatacaaagttgaagaaagtgtgtcaataactatcatttttctgaacgtcaatcctcaatttctaacatgattccactatctattgtctctgggattatctatttccgcgatccagattattctgattacaaggtggaaaa

SEQ ID NO: 101071 - DNA, 756 bp, Mimulus guttatus
  Intron number 1 from transcript mgv1a001612m (locus mgv1a0 01612m.g) derived from phytozome v7.0 (chr-ID scaffold_2; pos 1614902 to 1615657)
atctcggccaactcggtctcctccaattccgagacgtacgctcagatctccctctcttaactatttgtattgctgattttttatttacattgttgataagtgtatttggacgttctattactgatcgaattttggttttctgatccgttgttatattagaggtgtagtggaagtctgggagagcgttctaattgctgcagaaaatgcgttattacgattatagggtgtagtattgatctagtgttgccattgatggttactcgctgattaggagaaggttcttcgttaatcgagttgggctctaacaatttgcctagattctatacgtctatcagtaattaagctgcacataatttttttcatggaagcaattgatccttatgaaggattttgagtacattaatatgttatagccgattcatggggatattctgaaaagtgcatagacgattgtgttccccttacttcatttagtttttgctggttatgctaagaacgaagtaaatggaatatacttggcaacattaaacatgcgatcggctctgaagttttaagtgatcatatttttgtatacatcaagatctttattgttttagcttatgatgttaatggataactacacttgaaattcttctggaatctttttgttcataccattttatagaagtttactttaagcttctggttagttttttgcttattctttgtgttgctaaaatgatgcgctcagttgtttttatttttgctggcagttaa

SEQ ID NO: 101072 - DNA, 605 bp, Mimulus guttatus
  Intron number 1 from transcript mgv1a024683m (locus mgv1a0 24683m.g) derived from phytozome v7.0 (chr-ID scaffold_6; pos 1061824 to 1062428 reverse strand)
ttgttgcagcagctgcagcaggtacttcgcctataacacacacccacacccacacccccacacacccacacccccccccccacacacacacacacacacacacacacacacacaatattttcgcaagtttttctatatgttattttcttcgagactcgaggagagaaaattgtaattttggtcctttaacttgtccagttttcagttttacatgcaataactatgcacaattagcgttttttgtcctatttcgctcgaactttgaattttaactattgcgtgacgatgtagctaacaaactcgccaaaacttacttaatggacgcttaaaaattataaatgctcctctgacttggttcacaaaatcgtcatctaacaaaatcaaagttctattaagtctccacacaagtaaaatctatcaaggtttactttatttacaaagttatatgccaacatatgggaccaaaattacaattttcccttagccagaactccgtgccgacaatcaatatacgaaatattcaacgattttcttggtcttgttatgaaacgttcaaaatgatcgattcatgaatacatgaaatgcaggtctgcacttattgaaga

SEQ ID NO: 101073 - DNA, 857 bp, Mimulus guttatus
  Intron number 2 from transcript mgv1a008320m (locus mgv1a0 08320m.g) derived from phytozome v7.0 (chr-ID scaffold_108 ; pos 649126 to 649982)
ataaaaaggttagttcttgatttatgttataattaatttcttcatttttttatattagatgattgctctgggttcttgatcatctgattcatgtctgcctgtaactcaaatgcaaccaacttatgattttagtatatgggttttgtttttatcttggttgatcgatgaacggaagacgataaacttaaattaaatgtatgtatttgatgcattactgtttttttcatggtaagatattgcagttagtttctttatatggtggttgagtcatatcagaatcttgtaggttgttttcgtctagttgtatttgcttttttttggacttattcgtcatagttagttccttttgtcgatcatggatgaatgtggttacaatgttgttaacaaggatattattcggctctgcggtttttatttttgtgtccgttttgtctctgtagtcacttttttccggaagttttctatccttgttgagtttttttctcacttgtcgagctttttcattttcttatgcgtagtaagctcgattctcgaattacactaaactagcttgaacatgctttaaacaggttaagtgagtccttcgtgtgtttcttgagtttatttgcagttactaaggaactcgtcttaagattaaggctctgtaataaaaatcgattctttaaattccaaattccattttcctattgattgttgttttattcagaactctatatccgtatcgtaattctctcggttaactcatacgagtcttttctttgttaaatttcgcataaattgaagttcatttttttattttttatcccattcaaattaattgttacatacgctcgtacgatataggcttctcattcaac

SEQ ID NO: 101074 - DNA, 597 bp, Mimulus guttatus
  Intron number 1 from transcript mgv1a007328m (locus mgv1a0 07328m.g) derived from phytozome v7.0 (chr-ID scaffold_3; pos 3487102 to 3487698 reverse strand)
ccaacggcggcgccacccatcccggcggccaacaggtttgtcattattctctgtcacacggtcaatttactgtaaccgctacaactcagtcatgaattatttatgcattggagaaattttggtgttagggttcgaacttcgaactgaatcggaattcgtgaaccaattttcaggtttattcttcggtttcagttgattttattttgtgaatattagggttcgaccattgaacatttatgcgttgatgaaatttgtttctagaaattggatagtatcagttttcctgacattttttagggcatattagaaattcgtagggttaggaatttgtgctgataattctctttcatttgattctgaaccctatatttaattaagttttcaattttaagaacctgatatatttcaaagatgtagtggactatgttgcctgtttgttttcgacgatttactgtgtgtaactatgtctaaattcgaactcttgagctatttttttttttcctttttcttgctgcaggatacacatttatcgtaaacttattcggattttttttttcagcctattcaacctaagaatctgttcttattgaaaaaaaa

SEQ ID NO: 101075 - DNA, 669 bp, Mimulus guttatus
  Intron number 3 from transcript mgv1a015607m (locus mgv1a0 15607m.g) derived from phytozome v7.0 (chr-ID scaffold_155 ; pos 165557 to 166225 reverse strand)
agaaattgaaggatcatttccctccacattttaaggttacttctcttctctgcatctgtaaacacattagggtttgtttaatcgattgccttatcgctccttcatttgtttttttcttttctttttccggatttagtcgataaaatgtattttaatcgctttgtcggtcgccgtgttttgctatacatacgtttaactttatcgttttcttagtaatagggcatgaacgaacttataagttataaatgttgtcagattccgaagttcatctacgaattgactgcaattttttcccttcttagagctgtctaattaatgaagttgttcttctcctattaaaaacgacatttgaaagacacgcgtcgagtcttcttgaggtagaagattgtttcgacgttctttcgatagctgtataaatattaaactattagcaaacgattggacgacttcgcataaaacgttcagatagtcccatgaaaaaaaactatgcatatttagatatgataacgtaacccttgcaaattagcagccccctcgtattttgatatcgaactcccgtgtggcaaatatgacgacatttcacaaattttgattgaactgtatctaacaatcttatttcgttgacgaatccgagtatacaggtagacataaaagtagctcctggatcac

SEQ ID NO: 101076 - DNA, 812 bp, Mimulus guttatus
  Intron number 1 from transcript mgv1a012453m (locus mgv1a0 09959m.g) derived from phytozome v7.0 (chr-ID scaffold_11; pos 91502 to 92313 reverse strand)
attcaggcgattaaagcttctccgtctacccctgagtacaattttttatttatttaatttactttaatatatgtatatttttttgtttattatttgtctcttcttcgtgttgtatgttctggcacataagaattggggaaaattggtgactgattgaggtttttgcctgaggcatgagtttttttgtgttgtgtgtaaaatgcagaggcatttgcggcagacttacaattacgagtgtctctattcaatttaatccctccttaatcggataatcttttcgaacatgataataaaacgttaaaatgtgtccttaattatgtgattttttgatatctttttggtttgcgtttcctcattgagttgcttgcaagtttaccttcgaatgtaatacaaaaatcgtcataggagaaaacaagtatcactttcctaagattagttgtgtacacgaatcgagccatgtttaagattatttgaatttttatcgaactctcaatcttttgtttggatttggtttgataagcaatcacgaatgttaatcgagccgaacacgagtcgagcttgagtagctcgatcttttgtacatattttaccattgttttgtacatatttttatcgagcttttgaaacttgtgcttgatttttttttatttccacctaatgttcctacacgagttagcataacactagagaacgttgttttgtgccttctttaaaatctcctgtgggattttatgtgacaaaacgaatcaaatttgttcatacaagtgattaatgaatcttgtttcttttcagagtggaaaaaaacagggtag

SEQ ID NO: 101077 - DNA, 1012 bp, Mimulus guttatus
  Intron number 1 from transcript mgv1a004037m (locus mgv1a0 02942m.g) derived from phytozome v7.0 (chr-ID scaffold_1; pos 597601 to 598612 reverse strand)
ccgaaaaggagagcgagtacggttacgttcgcaaggttcttccacttccctccattactctctctctctctctctctctctctctctctctctctctctctctctctctcctgtatatatatttgtggtaattgaattgctgccaattacttagacatacctccgattgattttggtttttggtatttgtgcgaattactatgtatatttcttcccattggtttgttaagttatctgttgccctaattggcttggtttcatgttctcgagatttcaagggttgatccaaaaaaattggagcccttgtatactatttgacttgttttatttgcgttttgtttttttcaagatcactactttatcattgcaaagtctgttattaccttactttttgcctttacacgtggtgttctttctatacctcttaggttttttctttgtggtaatatcaccacacaatgatgtcattccatttacctgaataggattgagcttggtaatcaggttccattttgaggattgtattgaaggaaagtaaacagtgctgcaacaattttatcctcactgtcaaatcaaactgtttgttagttcatctatattgctgacagattttctttatggctaaatttttaggataaaccttttcttttttaaggttctttattaattaactttccttgtcattatagtattttgatatcattctaacggagtggtacctaaagatctattgtataccatctctagtcttttcccgtgagatcgtttaatgttttgaggcgctgcgcaaaatacttgtgattttaacatagcccttttccgtccaccgatgcattaagatataaaagacgtggggggataagtttcttgctgataaaattaaaattgttattttggttaagctattaacatctagtaaaaaatcttacgataaattagcgacttcatccttcatagtgtttcatatcattaatcttttttccacaggtgtctggaccagtggttgttgcag

SEQ ID NO: 101078 - DNA, 964 bp, Mimulus guttatus
  Intron number 1 from transcript mgv1a021130m (locus mgv1a0 21130m.g) derived from phytozome v7.0 (chr-ID scaffold_363 ; pos 135760 to 136723 reverse strand)
aatcctgccaatgtaagcctttatttctacttttttcttttactttttggaaagttttttattattattagagaatcttgtcgtttacgctcttcattaattatggttccgttactcttctatttgattgttggtcttaattgattatagaaacgacaaggaatataaatattcttcttacctagaataaaggtaatagctttaacatttatcccttaaatgtatccatggagtcctaatatagacttcatcggatctaataatgcaaccatctgaatctctctagaactcagatgccagctattaatatcttggcagttgtagacgagtgtccagctacctagactgagttttgtttttgctgtaatagggaggtaatctcgttgtacaagtatatattcctcactgggttgttctctgagcgagtatcaagcttgtgtttattcttttgaatattcattattttcttttttcatgttttttgctgtttttttttccttttcctactttgttccattttctccaatcaaagctcacttgtcatagttcttaattcattacatactctttccaatttaaagttatatcttctcaaaagaactttgtttagtgatttttgattctttcttttccatgatggtataccttgaagagctgttttgaacagatgcttctgatatctattgtagttgttgttcttcaagctttcagtcgaattatttgaaagatataataaagcttcatataactaagtcttaaaagaaaattaagaaacttctcaaatcctaatggtaccttacgatattaggctttgtccttatttcaaaacttatattaagttgtaaagatacgaatctctctctggagtataattgtgtgttgtgccagaagaagtttgtgtttttttacctgtgtgaatatgtgtgcaggcatttgggtgggcttacataaacaataagcacaa

SEQ ID NO: 101079 - DNA, 717 bp, Mimulus guttatus
  Intron number 2 from transcript mgv1a003332m (locus mgv1a0 03332m.g) derived from phytozome v7.0 (chr-ID scaffold_351 ; pos 111476 to 112192)
tcacaaaggtataagacattctttttgttcaaatttctatctctatatttgaatatgaaattatgattctattacataagatgacttttttgtgtctgtcactcaaatttacatagtcatttgggttttattcttatctaactaatttattaactgagtgttagagctcgtgtgttttaccgatcttcgatatgactgatcttctttcctctgcttttagccttcaatttccaaatcgaacgctagtctttgccaatgaattcattctgtattatcgataagttattggtttttcattgtgaagagaagattggaactttaccttttgttatgagataatcctttaactatgtaaatacgtaatggaggctgacgatggtattgcaatttgcagatcttaacatcaagagatgtatatagattctgtaaagtaaaactaaatttaaataattttgaactttcttttgtaagttgtaactaaatgaactcgagtatttcatcacaagcttgcaccttttacacatgcatgtacaagcagtagcacacacatgtatgcactcgatctctttcattatcaacctataaattaagaaccggttacaatggtgtgtgcacaaagttcttagttgtttatatcattattcaaaaaagcccaacaagtcaagattcagtttttataccttcacatcctaacaggttgagtgaaaggctccaaga

SEQ ID NO: 101080 - DNA, 925 bp, Mimulus guttatus
  Intron number 3 from transcript mgv1a011788m (locus mgv1a0 11788m.g) derived from phytozome v7.0 (chr-ID scaffold_133 6; pos 2930 to 3854 reverse strand)
gttctattttggtcaacgccgctgagcagcttcaggtcagacaatacgacgtcgttttaatgctgttcccccctgttaaaataatgttattaatttattataaggctgcggctatatgcaatactcattccacttgtgcaagatcaaattaaagaaagattctaaaagattctattttattaagatggaatgacaagtatgcccataaattaaattggcttttttttcctcatgtaacaccaaatacagataatgaaaaaaaaacaaaaatcgacaccaaggtgtcgaaaaactatgctacaaatcgacacttaagcgtcgaatttcataggtaaaaatcgacattgacatgtcgaatttatagcacaaattcaaatgtcgaattttatacctcaaaatcgacatctaaatgtcgatttttacctgtaaaattcgacctgtacatgtcgaattcgtttgcgcgggattttttttggaaaatcgatattctagctaaaaaatccataaatgcatacattcttgggttcttccatcgtaaaatcttctattttgatgtcttctgactccatacttgccatctttgtaagatttgttgagttttgatgattttgaatttctaggttttgtgggttaatggaggaggaaggagaaatgtcttgtggattttggaagatggagaagatgagagttggtcttgttattttatggtcttgtgatagggttttttgtgtttttgaatttttggtcttgtatatttggaattttttatttttttaataaataagggtattatagtatttatacatttaaaattttaatttggtcttgcacaagtggaattagtcttgcatatagccgcagccttattataattataactgattggtcagattttcaccaacgggaggtgcaagagtgtgaggca

SEQ ID NO: 101081 - DNA, 446 bp, Mimulus guttatus
  Intron number 2 from transcript mgv1a011788m (locus mgv1a0 11788m.g) derived from phytozome v7.0 (chr-ID scaffold_133 6; pos 4113 to 4558 reverse strand)
tattttcactgccccaacaaaccccaactcttgaggtaatcgaacgaaaacgagttacaatctccgcaaaattttcctgattcttctcttccattctaaaatcgatcgatttaaggacttataaaaagcttgttcttgaatcaaataagtataaacacctcttttgtaggcacaagttagggtttcttgatttgcagtatgacccagatattttaaatttgatacctaattaatagccggttgattttgattattcattagtaatttatctcaaattttcgatgtctatgatctttattccaacaaattaagacatgattttctctataatgatatgtaaataatcaaattaaactcaaaatatagatttaaaaaaaaaaaattaatactcataaattaatatatttgcagagaagttgtgctggaatacacagaaagaaccagaa

SEQ ID NO: 101082 - DNA, 586 bp, Mimulus guttatus
  Intron number 3 from transcript mgv1a015563m (locus mgv1a0 15563m.g) derived from phytozome v7.0 (chr-ID scaffold_55; pos 895884 to 896469 reverse strand)
gagtggaggtgagtcattcttttactcgaacatacactcaatttaacgatcttctcgttctttgtattgtattccttgaacctaaacagttttgaatttagcaatgatttcacatttggtccctctgtcacaaaaaacacatttggtccctcatgtttcaaaaattcaacacttttagtcatttccgtcaattttccgttagcactaacggaatcaagcatgtgcccatccactgccttaactcacggactaatggtaaattgacggaaatgatcaaaagtgtttaaatttttgaaacatgagggaccaaatgtgttttttgttaacatgggggaccaaatgtgaaatcggtgaaaacttgagggatgaaaactgtaattttcccaaataaaattttgaaaaaaaaatgaaggagcaagaaaaatcccttcttctttgtgctgatccggaatatacattgcatgcttgaatatgtttttgctcacaatttattcaccgttgatggtttactaggcaacttacattcaaggacatgtgtttgagtgcgacaggtacgttcaaattgactgttaggttcccagaagac

SEQ ID NO: 101083 - DNA, 906 bp, Mimulus guttatus
  Intron number 1 from transcript mgv1a015563m (locus mgv1a0 15563m.g) derived from phytozome v7.0 (chr-ID scaffold_55; pos 896940 to 897845 reverse strand)
aatcaacccactgagaaggccatccaaggccagaggtaacttgcgtaactatctatttatacgttcatatgctttcattccaatgatgtatctatatattatatatatcggttatttaattttcttaagcaattggaaggagctattacacatttcaagaaatgattcagaatcatggttttatgaacatctgtcagtaattaattctgattttctccacagtaattcgaatgagtgagtttagctgattagtataaatatgggaataagacttggccttggaatttacatggatataccggatgacctaatcttactttttctaaaaatccatttttttaaatgttaattatattcagactaactagtatttctccttgtgcgataggaatagcatttcaaaattgaaaaaaaaaaaaaaaattatttaaacatatgacgataactattgtaataggaaaaattgtatcgatacaggatacctagtagtggattaggatcccataaccatctgctatgaaaaatatggagtcaaagatttcattgcagaataaatagctgaaaaatagaagattgaggttgaaagaatttcacatgaattttgaacttttaagacaatataatgtaattttaaaaaaatagtagagaaaaaaagttaaaaaccaataattacaacgatgccatttgggtttcttaggttgtcctctcgtttattaattttatatataagaagattggtttccagttactgagaagttaaaactccggtgctgagttaagcttgtggtcgttcttgtctggtaatttatatataaactattatagttttgtttaatatatattgtaataattctgaaaagttaaggttgtataacttgtaagttattgtgtttataggccttcacg

SEQ ID NO: 101084 - DNA, 633 bp, Mimulus guttatus
  Intron number 1 from transcript mgv1a012475m (locus mgv1a0 12475m.g) derived from phytozome v7.0 (chr-ID scaffold_11; pos 225278 to 225910 reverse strand)
ttgattttcattcggatcggtaaaatcgttacacggtatagttccattcttcgcctttttctaatttaatttttgataccaattagggttatgtttcgtttacctttgttaattgcttttgggtttcattttcagcgatttttgttttttggcgtatatatatacatgtgtgtgtgtgtgtgttttatttgatatcctcatctggattcttacactagattaaggctggaagatattgagtacttgctgaagaagttagaaaagtgatgttgaattattggtcaaatatcaaatgtgttgatttttgcatgattgggtttgatccggattttatggatgtaagttgatgtttgagattagaaccgtcggactttgtgctgcattgtgcgataaagtaacgagaattttatatggtattatcatgttggatcacgtccgaatacgtttgtagtcgtggtgtttctttgaagtatacggcttgatatcgatgttcttagttatgatttaggaaataattttactccattatactttatgcattaaggatgattaatttagttcagcacacagaatgacggaaatgtacttttttttttaggtattctccgtgttcctgttcctgtaattacgtaa

SEQ ID NO: 101085 - DNA, 516 bp, Mimulus guttatus
  Intron number 1 from transcript mgv1a005413m (locus mgv1a0 05413m.g) derived from phytozome v7.0 (chr-ID scaffold_197 ; pos 34202 to 34717)
aagctcccagaaaaattccaaggtctccttacaaggtctctctctctctctctctctctctctctctctctctctctcatgattgagggtttataaattcttttttttttttttctaaattatgttgctttgaattctctgcattggactttgtgaatttattaattgtggctgaattggtttagggtttctaagttagtgattgttatttttcttttatattttttattttttgttagatgtatatattgtgggttatactgaaataatcgtcgtttattccgtacggtgctgcgattcttcgtttcgccagttttatgttgtgcaatcgatgttcttgtttgttgctgttatgttttaatttccaggtttagttgtggatgtcgatccagagattctggctatcatcaattaattcttttttccgattttttttatgggaaactttctgcgaaatcaaatgtttcttgttttttgaactattcaaactaatttaacatttgacataggttttgg

SEQ ID NO: 101086 - DNA, 515 bp, Mimulus guttatus
  Intron number 1 from transcript mgv1a013139m (locus mgv1a0 11183m.g) derived from phytozome v7.0 (chr-ID scaffold_69; pos 470069 to 470583 reverse strand)
gaagacgcgaagagagagaaagtcgataaattcaggtaattttctagagagagaaagtaagaaatgcagagacaccataattgtttcacgatctagttttcatgaatttttttttactctgccaccggaatcaattgtgtttgtatatactgtgtatgcatgtttaatgcgcgaatatctttaatttttggtttaattttgggggtgaatttgaacattgggtaaattaggttttgattctgtttttctttctcgctctgtttttttgttctttggcctggttctgtatgaattctcaacttctagatcgatacggagctaaattttttgtttaattcgtgggtgaatttgaattatgggtaattaggttttgattcaagtttagggtagcatttgtgaaggattttgatgtaacttttctttaatcggagcataatttcggttcgaaattgaataagagctgcgaattatcttcgacaggtgcgaaaacgaaaaacggttctaccgaatctgaa

SEQ ID NO: 101087 - DNA, 850 bp, Mimulus guttatus
  Intron number 1 from transcript mgv11b023521m (locus mgv11 b023521m.g) derived from phytozome v7.0 (chr-ID scaffold_1 4; pos 1854010 to 1854859)
aggaatttgcggctggggaatataagtggtattgtgtatgctaacactttgagtattggagatattaatattaaatgatacatttcactaacaatttaaacttttggttgagaatccataccaaatgaaaggtcctcggtttgaatcccaccgccaccaattttaattatttcaagtgcaaggcttcaaatataatttgtctgcacttgagagggtgtattggagatattataatattaaatgatacatttcactaacagattaaatttataattggtatattgaatgattcatttcagcaacttaagtttatgtgcttgtaaaatcaaatagtaatgaaagatggttgaacttgtacaggaaactaataatctatcctaatggagacgacaacgtcggaaaagatagcggctacgtttctgtatatttggctatggtagacacatgttctcaacctgtggaggtcaatgctgtcttcagtatctttctctttaatcatatttccggcaaatatctttcttcactaggtactatttttgttctctagctaattacaattgaaccgtatatgatgacaattagattatttaagttgcaaaacaagtagtggggactaggaaaattctattaatttagcgaattattaaattatcaagttaataatttaacatgttttcactgagtcggaaccgagagaaactattatttaatcgaggttatcaatttttcgagtttctactgttgtatatgtatgggacaggaagaacaagacgtttcctaggaacgaagtccaaatggggattttcaaaatttatttcaaaggaaagtctgacagatccatcaaacggat

SEQ ID NO: 101088 - DNA, 622 bp, Mimulus guttatus
  Intron number 2 from transcript mgv1a005469m (locus mgv1a0 05469m.g) derived from phytozome v7.0 (chr-ID scaffold_4; pos 3339281 to 3339902)
gatctacttcgcaagaggttagtaattttgtttttatccagagtggaatggatatctatgaattttgacatctagaaatatttttttctgcaagtcaatgactcgtctctgtctttttatttgtttgatggttgccacatggtatttctcatttcaggctctaggtattcactgtgtctaatttacttctatcttttctgtggttagattggaaagtggtttttcaccattatatttctctaacaaatcgtctgtaaacctttattaataaggtttcaagattttattattccatagacttgtgttcttcttcttttccaaattctttgctcttgaagtactattattctggatcttctgtttatgttccagtggcaacttttagtgtccactgtccagtattggttctgatctgcaaatctggaaccctgaagtatttaacgaatctattataactgcggacttagcattggattaagtcacttaagatgggtatttctgtaattaaggcacaaccacaggagtggtttcataattaaatttcagctgtattttattttccttgttgtgaattgggtctttcttgccaatttatctgttctgtttgtggcaggcttttaat

SEQ ID NO: 101089 - DNA, 572 bp, Mimulus guttatus
  Intron number 1 from transcript mgv1a010809m (locus mgv1a0 10809m.g) derived from phytozome v7.0 (chr-ID scaffold_197 ; pos 337941 to 338512)
ctcctcctcaacgccaagaccttgacaatttcttggtatttttgttttttttaatattttttcttcaaaaaacaaatcattaatccttttttattttttttcaataatgggtttctttcaatttttcaatattttttaagggtaaattacgataacccatgaactcagcgtaaataacgaaaaacatcctcacatattcgtaattactataaaactccgttgaggtttgtttccgtcttataccaaacccttacggtgatacttttcacggattttttttttttaattacatggaatagactttaaattgattccacaatttaagatattttctatatttctcacctaattaacataaggtataatagactgtacacattttatgttaaaaaattcgatcaacagttaaagaggggaattttgattattacggatatatgggggtattgtttgttatttagcttaagttcaggggtttcgtaatttacattttttttaattggggaagaaattgaaatttaattaattagagtacggtgtgtgtgtgtgtgttttgtacgcaggcacaatac

SEQ ID NO: 101090 - DNA, 797 bp, Mimulus guttatus
  Intron number 2 from transcript mgv1a012414m (locus mgv1a0 12414m.g) derived from phytozome v7.0 (chr-ID scaffold_198 ; pos 32536 to 33332 reverse strand)
agtgtaagctcttttttttttcatcattcttttcttttcgtattcggtttttggatgttttactcttatatttaggattgtaatcacgtccgattttgagttaagaatatctgtaactgttttaaagttatagttatggatataaagattaaaactctgtacttggagatcaataatgttggtagactaaatatttctacctcagaaagagttttgtatgtaagaagtttagtcactccatattgcgacacttctctttttcagttccctgcccggttgaatgttttggcaattcaaggatcagtttcataggaaaagctttttccaaaagaatattatcatacatgctgtataaaaatcggtttgggattcctgtaatactattgacgaaaaacttgtcattgttttgtaatttcaaatcgttcctggcatgcagctgttttataaattggatgttgtcttcttttgaaggttccagtatatagtttcttgagtagagttgaataatgttcagtcttcaggaaaataacttttgattttatagactacttagatgatctattttgcacttatatgtgttggtaaattatctttcaaaagattgtcagtgattcatgagattcattgggaaaaggaaataaggtattaaaaaactccattatgcattttcatcgtatatcttgattttcatcgtagatacaaaaaccagaatgggactaatagggaccagccatgacaattctgatttgaacggtctactgttttgcagaaaaaggagactggcaagagaaggaaag

SEQ ID NO: 101091 - DNA, 783 bp, Mimulus guttatus
  Intron number 2 from transcript mgv1a010913m (locus mgv1a0 10913m.g) derived from phytozome v7.0 (chr-ID scaffold_190 ; pos 116237 to 117019 reverse strand)
gtatcagaaaaccctctccactttgagttttgcaggtttttctatttaccaattttaacctctgctaaatcttttattttctcttttcccccctttctgaaagctgggtttatttatttaattttattatgtagttaatttttctgaggagttttgttattcggtaacttatgcttagagattgcaacatttttttctattaatgtttggagccattacattttgaactcattgcaagtgaacaagaaggcaaaagaataacataaaaaatagatgttaaatgttaaccgatgatcttcaaaattatctagattgttgtctcgagagtttcgtttattaattttctactaaacaagcaccattatcttttatttccccggtttttgtctcttcgataatactattatactcatgaattggaaacttgtggtcgtttttctcgggaggattttacgatatttattcgctcgactgtgcgtattctctaataaatttttgttgtcgattctacacaagtaaaaaacctatagtttagtgaatttgcattatttgggatttgaacttaaaaaatggagaaagaaaaatattttcttacaattgctacgctaggagactggagtttcgtctctttctcatataaaagattcacattgtttttatggcaactagtttctgtgtgccgattttttgtttttttttttcagaaaatatttgcactcagctgaattcttgacctttctcaatgcagactcaaagactttaaaagaagagaagagggaagag

SEQ ID NO: 101092 - DNA, 949 bp, Mimulus guttatus
  Intron number 1 from transcript mgv11b017246m (locus mgv11 b017246m.g) derived from phytozome v7.0 (chr-ID scaffold_2 5; pos 535196 to 536144)
gatatcactaatattcaggtaatttttcctttctcttcatcatatccagtagttagtaccctaggccatgtggtttttggggattatacacaaatttgctagtttctaacccttgcaatcaaattaattgttaaaaacattgtcagttgatttggaaatttaattttgggtcaataatttcaaatgttaggtttgaatcaaatcttcttcttctcttttggtaattgaaggagggaattgagtcctgaaagagcatgtttatggtcgttgagtattagttcatctcaaatgattaatcaaatcatttttctatagtcaattagccttattcccgccacctgtacgattgattgcttctgtaattgtccgcaatcgactattttggcatggttatgtcaattactaaaatcaataatgtgaattgattctgaagaaattttgcctatgctctgtgattttttggaactcttttctctatctatttccttttttttttccaaatgatttgtaattcattcagtttccgagtgggacctttgatgtcatcgtcgataagggaggattggatattctgatggattctgagcttggccccagatcaggactacgatcttatatatccgaggtttatgatagtccgtcttgtttgataatgacacaatttcgatcttgttacttgttatggtccaaaagtttgacttgtttataggttaaaagactgttaaaagctggaggacgatatatttgtctcaccttggcagaacctcttgtgctaggtaaagactgtttctctctaattttattcattattttggtcaacgtaaagatgcactaaattttacattttctatgcagtgcttagacttgatactcatttcaatcatatgactctctcaggtctactttttttaaagttccgatttgggtggaagatcaatctctataccat

SEQ ID NO: 101093 - DNA, 958 bp, Mimulus guttatus
  Intron number 1 from transcript mgv1a006052m (locus mgv1a0 06052m.g) derived from phytozome v7.0 (chr-ID scaffold_125 ; pos 612219 to 613176 reverse strand)
gccgaagaacaggtaaaatctattagactgactgttacggcttattttttggcacgtgtaagcgtacgtgcgaacaagtacattatactctcgtgtgtgtggatgtgcagtctgttctgttcagtatatatgttgtcatctcctgcgattaattaattagtgatttttttttttaaattttgattttatgataaatcaattattttatttatcccttgttttttctttgggaattttttttttcactcgtgaaaataggtttcaacattactgctaattagaattacatcatataaacactaattaacatacacacacacacatatgtgtgtatatatgtagggcaaattacggccacctccttgaggtaagatcaaacgaaaaaatccatcttgtttgggtaattacgaccgctcctccttgaatatgtaaatttgacactgtaagggtggacgtgtaagacaatatatagttgaggggatgattgtaattacccaaacagtaggggtttctttgtaatttaatcttaactcagggaggtgaccataatttgccctatatatgttttacatccatcatatgggacacgatgaaaagttcattattcttgtcaattattagttaattaatgtttggcaacttgtgtgcaataatgaacagcctggatatggaggtgtatgtttcaactctttctttctaaggactaaaatgcaatttcttttttgaatttacgaggttcgaaagttgtaccgatcaataattcagacaatacgtgctaaacacgataatcgagtgttataatctgaagcagtatcgtccaacattgtttacattcgcacgtaattgtggtcgacagttcattacaaacaaaatatattcgtcgtaaattcgtctttcttattcccagttaaactgttaaacaggttttcgacctctcgaccgtgaaacctcacgaatt

SEQ ID NO: 101094 - DNA, 597 bp, Mimulus guttatus
  Intron number 1 from transcript mgv1a008514m (locus mgv1a0 08514m.g) derived from phytozome v7.0 (chr-ID scaffold_110 ; pos 80591 to 81187 reverse strand)
acgctgctgacagaattcttcttgctcagagggaggtattatcttctgtttctttatttttttcgaattctgttctggttttcgtttcgttgtctatgtgtctgtgaatatgattatggacctgaataattgttttgcgttgaggagtagggtttaatttcttgttatttcgcgtttatgtgtttcgtggatcttgattctgtgccgcacattgaatttgtcggcagccgttgctataaaaatatcttctttttatttatttattttgtgcttgaattttgagtgaagtgtatatacatatcctcttgagtgcaatatccgaaagtggcataataaccggttctaattatcagaaaattctcatttgatttgtcacctggttcccaattttctattacatctacattgacttggttggtaatgagtatttattttccacttcaccctgattttttcggaatggttttcgggttttcaagtgttgagttgaacatttggactcggttattattttactatcagttttacacacaggcctcacttttttttttccccttttttgttgattgtcagcgtccgtataatagtgttaggcga

SEQ ID NO: 101095 - DNA, 778 bp, Mimulus guttatus
  Intron number 2 from transcript mgv1a009714m (locus mgv1a0 09714m.g) derived from phytozome v7.0 (chr-ID scaffold_37; pos 853415 to 854192)
gtgcaggttgacatcttagctcgatttgattatgatttactttatattatttccaatagtttaaggtgtcgtttggttgataagattaaagtggaccttattgaatatttgattagtccaataacttttcggtccggcacgcgattgtggaaaaaatggctccaatctttgctaattgagagattattagttgaaccttccatggtccaacaaaataattgtttttcataagactatttactcttatcttggctaatcttatcttaggagccaaacggggcctaagtggttaaagaatgtattatcttgactgaaaggaacgcattgccaaaatcatacagaactttacaccgctatagatacacgatgagtttgtgtgagattagatacaggggattctaacacatgagtatgttaaattggtatggaactggttgcgcaaatagcattttcacctttttcttttttttttcttcattttgtcatatttccgttgcactaaatgaattaaatcgggaaccagatagaatgtgtccaatttttctgtgtttttatgctgcctcagagttaatgccctgtggcagcacactcattttcttgctaatgtttgaagtattttccgagtttgcatggtagtacagaatatacatttataattctcggcaatatacgtagacctatgattgttatcattgtaaaacatctgttacaatagaccagtaactcatgattattgtcttcaggttcttttggccactttcaagcaagcaagtcaggc

SEQ ID NO: 101096 - DNA, 838 bp, Mimulus guttatus
  Intron number 3 from transcript mgv1a014761m (locus mgv1a0 14761m.g) derived from phytozome v7.0 (chr-ID scaffold_108 ; pos 710756 to 711593 reverse strand)
gcgactatacatcttcgtctctagaggaagataaggtatgtatatatataatatatttacttgttttttttttcgcttttcaagatttcgttcttcctccgtttcttgtttttgagtttcttcgacttggtgcatcttgagtaaaagtgttgtacgattcaattgttttcttattctataagtcatgatagtagatacggtatatttcaaaaatcgaagattgttttgaactgcgattccgttcattatatggttgctcgagttttttttttttgcatttctcaatattgttgtgatgcaatgtagatgattggcatgaagaggccatccccctttcctctagaaattccaccgacgtataccttcccctttgtttttcatcctatcttcgctccttcaaaatcaacatcagacgaattaccttctagtaacagtgggcatacagctaaaatcgaatcaataaataaattcgtcaggttcattcgctttttagaaacatgttattttacggggtttttttcgtgtttttgtgtgtgtgtgtgtgtgtgtgtgtgtgaatcctgacagcatttcgttcactgacgtctcagggatgggaagctaaatcgagattttttaacattggctcctcctaaggctgcttctcctcctcatccgcctttgaactcggatcaggtgccctgcaaataattattcatccttcgattttttttttatttaaaaaaaaatcggtttttttaattttaaaaaaatcgattttttatttttttttgactaaaatttctcatttattaaattgataggaaaatctaagaagccaagttgatcatacttttag

SEQ ID NO: 101097 - DNA, 877 bp, Mimulus guttatus
  Intron number 3 from transcript mgv1a011752m (locus mgv1a0 11752m.g) derived from phytozome v7.0 (chr-ID scaffold_68; pos 309504 to 310380 reverse strand)
aattaaacggttagtgaatttttttgtctttggaatatttttgataaaacaggttcttacaaaattttatttcctcaaatgtaaaggagatgaagatattgaagagcttgaagaaggagagtgggtcccggatgatcccgatttttggaggaattttagtgacaagattttagctgaaggtatgtaatactcgacattattaaagcaagatctattctcttatttagttatttactcatccatatcgagcttccgaaactgtaacttgagccatttatctatgtgttgagaataaaattaggaatttgccctagattaagaatataattagggcctcgtttggttgagaagattagccatgattaactaaataattagactttgtttgatgtttggcatacccaataacttctcgtgtcgacccggaaatattatgtcatctggcttatcttgccttatagggattttttttattggactttccatggcccaataatacaatcgggtttcattagattagttaatcttatcttggcaaccaaacgagagtgggttccttcaatattttctttttggctattctataatagtttattagttattctatctgattgaatcttggggttttttttttctaattttttttatatatatttttttctcagctgtatttcatgttcatgaaatttgagttcaaagcatgtagaagctcgttattttttacgtagacgagcctaaatcccgtaatttggaaaagtaggacagcggaaaaaaggcttcatttttatcacaaaattatagtttgtaatgcattgatagttggagcaatcatcttctgctaggtgtaactgaggaagaagaaaattggcgcgcacaa

SEQ ID NO: 101098 - DNA, 681 bp, Mimulus guttatus
  Intron number 1 from transcript mgv1a020766m (locus mgv1a0 20766m.g) derived from phytozome v7.0 (chr-ID scaffold_1; pos 2028329 to 2029009)
gttggcccacttaactcttctcgagtatctcagaggtcaaaaaacactatcattttgagctgttcataatttgtttgttacttatatctttcttgattttgggtatgtgattttttttttttttttgtcttttaatgttttgatctgactaattagtgaactccattaattaatacccagctcagtggcgttaatcaccatttagtggcaactaattcactcatccctcagttaattaggtcacagtacctttatgcattatgtgggggcaagctggccttttttctcttttagcagtatcttgaagtgatccagttttatgtttaattgcgtttcttaagtttcattcattttgttgaattaataattttgaagcatctttgttattcttcaatgttgatgatcataagaactaagaaattgcactttgattatgtgattgtagtcagtctacacctgaaatttcaaacattatatttgcttgtgttgatttggatgctctaacatgatgcagtttatgccttcatttatgtaggctcttctttgttttaagtttttcacccctccggaaaatcttcgtcttcttgaatttttttttttattaaatttttgttttgaacgtcttctttgttcatccttaatgcagatatagggctgactgggacaaaacttggctgtggc

SEQ ID NO: 101099 - DNA, 600 bp, Mimulus guttatus
  Intron number 2 from transcript mgv1a010224m (locus mgv1a0 10224m.g) derived from phytozome v7.0 (chr-ID scaffold_54; pos 1225037 to 1225636)
tcactcgccaaggtgttgcagcctctgatttcaaggtattttattgcatttcaatttttattttatttcattgattatttggggtaaaatgaattgcaatattggggtgcggtaatttatttcactaatcccgacagtaattttattgagtgatttaaccgtgtttaattaaaggcgaaccttgtataatttaattatttttttgttgttgtttcgtgttgtgtttttggcagagcaatataatctgttaatttatttagcatactgaaacgaaaaactgttcgaatgatagtaaagaagaatgtctgcacaatagctttaaaaaaaaatcaagcttgaatcgttaccaattatggttataagttaacagtcattccacagatgaaatgcagtttctttctaaaaattagtctaattcgacatatctcggtttcagttttagtcgaacaatattcggtactcaattttcgagaaattcaattttagccgaacagtatgcgaactttgtttcttttcaaatttgattggtggaagcttgacttcgtgtaaatttattgatttttagcgtaatttccaggctgctcctttattgccgaacct

SEQ ID NO: 101100 - DNA, 957 bp, Mimulus guttatus
  Intron number 1 from transcript mgv1a013291m (locus mgv1a0 13291m.g) derived from phytozome v7.0 (chr-ID scaffold_11; pos 458819 to 459775)
aaaggcaagctctttgagttttcttctgattctaggtctgtaatttccatctctctctctctctctctctctctctctctctctctctctctcatgatcaagaacatcaattttttttataaagattaatgaggggaattttatgtggcgaccttgttttagtgaaaaagcttgagtctttggtttttctttcctgcttcaaatgaaatgtttttttattttttttattttatggtgctttatacttaagaattatgctatttttttaaatcttgtactgaacatatgaattgatgttatgaatttgtccttaataattagtttgtgtgtacctattagtgtagactatatatatgtatggaccaagttggtgacttagtttttgtttgagggaacagtttcaaaagtggacattaaaataaatatataaaagaaataaaaaaataaaaagaaaaaccctttgatctttggagatgtataaaagcagtttgtatttgttcaacaaattaataatttgagagtttaatttgagtatgaattaatccaattttttttgggtttgtgaatcgggtgaccaaagtgaatcctgtcggaattcataaagacttcatttttatttttgggttttcattattcctctttttaatgcagtgatgatgactcatcatttgtttgtgcttagtgattttcattattcagtagaaataaatgtgatttatgttattatatatataaatatatagtaatgataataataataactatatacctaagaagtaatgtctgagaagagtagcaaatgcatctatttgaggttgtctgctaagctagttcagttagtggttacgttttagtagcgtttattgaacgtgtcaaatggatcgatggttctttctctacgcgttttgacgtatatatttcatttcatatttaatttttttgctttgatatttcagc

SEQ ID NO: 101101 - DNA, 634 bp, Mimulus guttatus
  Intron number 1 from transcript mgv1a022400m (locus mgv1a0 22400m.g) derived from phytozome v7.0 (chr-ID scaffold_17; pos 1741538 to 1742171 reverse strand)
aaatcgcacggtatatataatataatatatcatagtttaacctaatttctatttctagctaggttttcaaactccattaaagaaaccttcttcttcccaaatctaatttttttttagtaattaataattagcatgtataaattcaattcatcagtcgtctgtacgatgaggtcacactctttgttcatcggtcacataattaatgaagtatatttcatttttcttcgattaaacaagaaaattaaataccaagaaaatgacaagagcttaattagctccgagttcagtttcagaaaacccaccagggtctgactcatttctccattacttattccccactgtcttatttaaggcacaaagacccaatctttttgtcatcatcttccatcatcatttcagacaaagcttctgtagaatttatgaacagtaaaaaaaaaattaatttttttttctatttagagtttatcttttctattgaatcgaagaattcccccatgagtttccacatattcatcaaccatcattatcacatgatcagaagaaaaaaaaattagggtttcgattaatatatattttctgtgtaattaattaaaaaaaaaattgatcatttttttttttttgatattacaggata

SEQ ID NO: 101102 - DNA, 872 bp, Mimulus guttatus
  Intron number 1 from transcript mgv1a009387m (locus mgv1a0 09387m.g) derived from phytozome v7.0 (chr-ID scaffold_32; pos 1105555 to 1106426)
gctgccacgccactgcatcgccgtgccaaagtatgtaatttcatcttgacctaaacttctaattgtagtatagaatcaatctagccaagccattttatagagttgaagatgtggttgtagcttgagtttcggttcagatgctcgatgtatacattgagaaacaatatgtatagaacaagtatcaactgtattcggtttactaatcgaaccttcgaaaatgggctttaactgtttaatagtattcggatgaaggtatactttgtgttagaattgaactttcttttggcagagaagattgcgaaattcttctctttaaggcctcgtttggttggggagattagccatgattaactacataattggactttgtttgatgtttggtatacccaataacttctgtggtcgacccgaaaatattaggttatcatggcttatcttgccttttatgcagctttgtcattggacctggaaagtccaatatatttaatcttatattggctaatcctatcttggcaaccaaacgaggaattaagatattaatctatctcaagtattttttttcacctctatccagcactgcctcattcgatatacttaagtgacagcgtgcctcgtgattattcgtttcattagtcatgaaaatgttgacgttttcaaattatcttttgccaaagcagtaagttctcagaatacctcaaatttgttgccgatgatatcccacatgttttagtaacataggggcattactcaaacttatcatttgttctcaacattcttcctcaatacttcgactagaaaaaacgattaaaactatttcatgaactaagtcttattttctggatattgctaacacttgtgtgcaggttacgcgc

SEQ ID NO: 101103 - DNA, 1024 bp, Mimulus guttatus
  Intron number 1 from transcript mgv1a010878m (locus mgv1a0 10859m.g) derived from phytozome v7.0 (chr-ID scaffold_52; pos 351455 to 352478 reverse strand)
gagaagcctccggaattgcgtaagaggcgcaccaggtattttttttttactagtcttattgtagttgatgcaatgctatgtttattatttcttatacattttattatggaatgcgatttgggaggtattgtagtgatgcttgcttttgtatggggttacgttcttaatttatctgactggtctgactgaatgttggtgtagatttattatttgaggttttgttatgactaaagtatgcaatgtagttattgtttagtttgagatatcttcaggtcgttgttagtcgaagatatttggtgatttagttactgtttgaattgtatatcttagacatgatttagtaggaaagaatgtggtgtaaagataattcttcaagagaatagttactcgaaaggtatgatcctttcatcaacggattaaatcggaaagcaatttacgaaaaaccttcagcttcaatcctaaaaacaacttcgataaaaaatgtcatatagaagtttgcgaagaattcaaattcatggtattattcttctggatactgattaccaggaatctgaacagaatttgttttcgctaaaaacccattatcaacagaaattattggtttcttaagtggatttcttgatgagttggttagaggggctaatgaatgccttatccttgtgtagtttttgccaattgtttgtaggtatgatataatacagaagaatcgatagaagttattaatttcgaatactttgtctgaatgttggtagatttagtatttaggttttatgactcaagtatgctttgtagttcttgtttagtttgagatagtttctgtcattatttgtccaagatattgtcttgttcaattggtgattagttcatgtttagtttgagatagtttcattcactgttagtcaaagatattgtctttttcaattggtgattagttggttagaagggtctaatgaatcccttggtaatttgtttacttttatgtactggtttgttctgatgtagtttatgtctattgtttgtaggt

SEQ ID NO: 101104 - DNA, 603 bp, Mimulus guttatus
  Intron number 1 from transcript mgv1a015087m (locus mgv1a0 15087m.g) derived from phytozome v7.0 (chr-ID scaffold_13; pos 1801734 to 1802336)
tgatcagtgatcaccgatcgcttgttatcttcaaggtatgcttatttcttacttacttacatttattctactgtttattttgttgttaagaaactgaatttgctgcgttttttttccttctccaaattcatacgcaaaatagtgctcacgttttgctcgtcgcttttggtattttttttgttatttgttgtattttttgggtattgatcttagctagctgcctaatctgcttgattaactattttaatattttttttttatattttattctgaagtatgctgatttgtgtagctttgtatcagttgaatttttactgtttttagtcataattagtctgggcatgtaatcagctcttaaatttgcagaggtgataggagagacggagatgaactgtttattttagttcttagatttatgtttggctgtttttcttcattttcctgaatcttttttttttcggtttaggtacataattttgaattgtatgaacagctataattttgaattgtatgaactgtagatcgcatgattttaacataaaacttcatagcttaaatgtttttgattgactgtgtttatctgtgtgttatggctgtttagat

SEQ ID NO: 101105 - DNA, 874 bp, Mimulus guttatus
  Intron number 1 from transcript mgv11b024584m (locus mgv11 b024584m.g) derived from phytozome v7.0 (chr-ID scaffold_1 24; pos 278870 to 279743)
ctcggcatacggtacgtactgagtactgaaatatttaatatttatttttttcttttattttaaaccatttaaagttataaaatatttatagattgataaaaaaaattcattatttacaaattagcctctattgatgatcatttttttgcttttagggccggttattgaaatttgaatgtcaaattcaagaattattttgtttattaataatgtttaccttttctagaataagaaaatatatttcgattttaccaataccgaaccgaatagtttggtaaaaaaccatactggactgaataaacggtacaaatttttgaagtaccgaaattttagtttaccgaaatttcggtatggttcggtacagttttacactatgaacacccctacttattattcgaaaatagataaaacacgaatttagtagttgtgtcgctctatgagtacccgctataaaagttcaaattcaaattaataattcactagtatttacagataggaaaaaaaactatttaaatacatcataataataatgagctattataataataatgagctaatagcacagaccccctgtgttatttctaattaccaaaaaacgccctctattaaaacaattagcaagaagccccctattttgtgtttctcaaagcatacagacccttattttgaaatgtattgttgacttatatgaattgatgaaattacccttataaaataaatacaaaaaaaagaaattaaaaaaggaaaagtaaacgcaaagcatttgcagcaaaacctctgaaagtcctcttctccaacgcccttcggtgttcatgcctgacatctcgctgcaatcaaagtggtgttgtctggttggtccgaaaaacgtctgcct

SEQ ID NO: 101106 - DNA, 1026 bp, Mimulus guttatus
  Intron number 2 from transcript mgv11b024584m (locus mgv11 b024584m.g) derived from phytozome v7.0 (chr-ID scaffold_1 24; pos 279774 to 280799)
gtccaccactcttatatttcatcggaatcgaagttgtacggctcaatttggccggaaaatgtatgcccctcgttaaatctacattgaatcagcccccatagtcaaaagtagctttgactactaatggtagcttagtgtggtattgaggagggagatggatgggcgcgcaagggagggggggggggggggggtgttcaagaacttggcggtggaggagaaggggaattaacctctgtaatggagggtgtcaacggcaaggatagcggaagaggcaggtggtggaaggaaagggatggggcggaggcgttggtggtggtgattcaatgtggaagacattattttctctctgtatggcaattggcaacatacagtgacgatgcggagcagattgaagaagagggatttttcaataaggataaggactgaattgaaaattctgaaaattttaatttagggtttataaaatttcgggttgaaactataatttttaaattctgaagtttaagtgtatgtttaactttttctgtccaaaaagttactccggccgcacaatccgcgattgggcatcacgaaaagctgttaagggatttttcggctttgactaattttcacagggagtctttactaattcttttaacacgatggtttttttggaaattaaaaattacacaaggatagtctttgaaaaaaacctagtaataattgtaatagaaaaagatgtcctcactttgtaataaactttgacataattgtacacaaaagtccacttcatgtgcatgacacctatgtataccaaatgttcaaaaacttttggcttaggagataactacaaatttattatgtggctaatttttaagatatttatattaaataacaatataatttcatttttttttacttgtataaataatagagtttctgtcacacaaattactgaaaaaaaatggcatacaaatgtatcttgcttctagaaatattactactctctattttgatagttccgattcgcagttacaacttacaagc

SEQ ID NO: 101107 - DNA, 956 bp, Mimulus guttatus
  Intron number 1 from transcript mgv1a012381m (locus mgv1a0 12381m.g) derived from phytozome v7.0 (chr-ID scaffold_32; pos 1847353 to 1848308 reverse strand)
gtatctcaattctcccggcggcgctgttactgctggtattttttttattttttaattcatccccccattataatgttttttgttttgttgtcttaatttaattttgtaatgtgtttatgtaacggtcgaaggagatgcaaggacgaattacgtggacaaattgttcgatttttttaggaattgaagtattttatggaattatatttagttcgtattcaaattttgaatagattattaacccaagtccagctctgtgagcataatttatgggtccaaaatttaaagactgttttttttttttgcatgtatgttctctatcaatgaatttcagaaatcatttaatgaagtgcagaaaatctgcctgcacaagaatgtaatcctcgacacgaaacctgaaataaagaaaaaactcgttcactctgtgtacaatatgacatggttgtgagctttatttggttgtttgaagtttccgccgtattttgctcactttcatcattactgcatgttttattttggaattaaacggaactttgcggatgtgaataaaaatagataatcttgaaaatttccagctttagttgagcatgtgaataactgaagaaaagcactctccccagttcccactaaaagtgattttgtagcctagttttttgggtaatgaagatgctgatatgatttcttacaactaagttttaagatttttctttgctttttctgtaattttcatcaagaattatgtaattcccgataggcaatcaaaatataaattctatgtatgtttgagatctcaatttcccattcttgagattttataaaattttgggagagagagtgtcaagtttttctagttctttgttaagtatttcttgaagtgtaaatgcactacattctagatttgtcttttgttgttatttaactgaatactcttttatgcaggtcttgctatctacgacacg

SEQ ID NO: 101108 - DNA, 563 bp, Mimulus guttatus
  Intron number 1 from transcript mgv1a009993m (locus mgv1a0 09993m.g) derived from phytozome v7.0 (chr-ID scaffold_102 ; pos 75067 to 75629)
ttgtctctcgccgacactgacatcaactgggacaggtttactttcatctctactctacatatttcttcttcttcttcttcttcttttctgccagttgtgtttcatttcagaactaggtttcttcccggttatacacttacctttcaagaaaggacccttacaatttttagactgtttgttttctgatttagtactcctttctgcataatttacttgtcctattattttctgattttgggagagatggtactgtacaatacaagggccaatgggcggatttgagttttttcttttttagtcaaagcatatgatcatcatattgctcacaactcccattgttgcctaaacaaagttaagattgtaaaaatagatttttaccgactttgcttgcaaagggttatcttcttcgttttataggcaaacacaaaaagtaactgaaatgtgagataacaaatgcttaataattagctcttttgagttagaattgatgatattacgcattatgttgtttgtgtgggatcgcctaatctaattatgtgttaggttggataagacaaggttcc

SEQ ID NO: 101109 - DNA, 430 bp, Mimulus guttatus
  Intron number 1 from transcript mgv1a017680m (locus mgv1a0 17680m.g) derived from phytozome v7.0 (chr-ID scaffold_82; pos 830088 to 830517 reverse strand)
cccgtaagtgtttgattcccctctctcttaattttctctctctctctcttttttttttcctgatcatgttttgattatgaaattctccagatccttgattcacccattattgcgctaaacaaaaaaattaaaaaaaaatcttatgttgtttgttagtcatataatagaattgatttgggttaattcgaattaattgtgtgtagaattaaatgtgggtttttttttttttttttgattgattgattaattttgtagtagtggtgatcgattcagttgaggagcgttgcggtagtagaattgatttgggttgattcgaattaattgtgtgtagaattaaatttgggttttttttcttcttttttttttggtggctgcaattgattgattttgtagtagtggtgatttgattcagttgaggagcgttgtggta

SEQ ID NO: 101110 - DNA, 954 bp, Mimulus guttatus
  Intron number 2 from transcript mgv1a006765m (locus mgv1a0 06765m.g) derived from phytozome v7.0 (chr-ID scaffold_115 ; pos 105295 to 106248)
tgttgggagttttgaccaaaggagtcacacaagtatgttctcggatcacatgactcttttctctgcttccaaatggttataatggattatatttttactcacaaagttgttatcatccaaatattagcttagcatgcattttcacatccggagctgtacatcataacacaacttatgcctgcagtatttggaatgatatcaacattagttcaagcatttttcttgttgaaaattctatactttggctaagtcctgaggatacaggatatgttcttgaacctggggcagccaaggcaaaattgttacgccccaagatccttggaatctgacctatttatactaatcatttgatttccctcgagtatctcggatactttagtaagaacaaattgacttcatatacttttaaacttgtactggtgagactataaaattacattgttgtcttgtcccttggaaacccagaaaaatgtatgcctcgtgaactacatagaaaaatgtatgtcaattgataaactcctcttctcagtttagtttcctttattagagagagtggccttccttatttagttgggaggcttatcttcttggattttctatggactgagactttgaagcaagatttcatacatccagcaaaatggaacttttagagttccgaaaataactagtcacatccgagattcatgattcagatcattgtcatatttaataacttgctaattcgccttagttttcagtattcaattgaaatcatcttttttttaaacataagaaatgaagctctattatctttaatatttttagttagcatgtgccaacaagttctgttgcaaagggaacggagtttgtttcttgctgtttgtatggaaaaatgtatgtgccttcaaatttatcaaagatttcttactttatctaatgtctatgcagtgtttctttgatactcccggactt

SEQ ID NO: 101111 - DNA, 948 bp, Mimulus guttatus
  Intron number 1 from transcript mgv1a008070m (locus mgv1a0 08070m.g) derived from phytozome v7.0 (chr-ID scaffold_4; pos 2005950 to 2006897)
gggactgcccgtatcttgatactgttaatagacaggtattgttgctcgctcttccatagcttgagattgcgatagatgaattttttttactggaatgtgatattttatttgtgaagggatatgaaaatggggagttcgaaactaatgtatcgtaggtaagaaacaagacaaaaaacgaacaacatatttgctgggtgctgatgatatttgcagtacttaattgtacagtttgcggaaaccgtcttatatgtgttgagatattgatccaaatgaattatattgcatgaagtatttgattggctttctgtggtgaggtagaaggaactcgatctaattttaaaggtattgcttgtgcacggtttaagcgtttttacttttatctttaccctatcttagcaagtatttgattggaaaaagaaaagaagtggtagatgctacatgttactataatatttagattcaagctcgtttttgctgctgaaatgcgtatatgatatttaagaatgtagggtttggttgttgataaggtttgttgtaggtttggaaccatggaggatgtaaactgtagtgctgttcatattatagtatgaccggaataaatgagggctggaagttttctatacctggtaataaattagcttcgaagcatttgcttcttactatttcgattgttgtgttcctgagctggatgaggaactgattatttaaaaattctttacattgtggtaatgtcatagtcatttactcttccaaacatgatggtgaaactttgtggcaattaatctcgagacactgaattcttgcataatacgttttaatgtacactgaattatttgatatgaattaagctatttttcagttttttctcttggtcataattctgcctctgaatccatgttttgttacctttcaggttttagattttgactttgagaaattttgctcggt

SEQ ID NO: 101112 - DNA, 278 bp, Mimulus guttatus
  Intron number 1 from transcript mgv1a000378m (locus mgv1a0 00378m.g) derived from phytozome v7.0 (chr-ID scaffold_1; pos 4345158 to 4345435 reverse strand)
aaaagaaaggaaagaaagagttagggaaaaatcaggtgtggactctcaaattgcgtttactcgattatttaattttgtttggcatttgattgttttctgtttttgtttctgaaaagctcaatacaatgaacaagcctaagctaagcaaatcccagaaaagaaagttgaagaagctcgaggtacgtgaattagtagtacttgggtattatagttatattgaagtgtttcgttgttggttaagctgaattgctactgtataggaagagaaggaaaaggaa

SEQ ID NO: 101113 - DNA, 1052 bp, Mimulus guttatus
  Intron number 2 from transcript mgv1a016483m (locus mgv1a0 16483m.g) derived from phytozome v7.0 (chr-ID scaffold_245 ; pos 224035 to 225086 reverse strand)
aagaacttttggaacttcagaaaaaaatagacgaggtatttagcactgtgatgcgttttattaacaaattgatattcagatgtttgctcgttgaatatgtccgctggaatatgtgatcgttttatgatttggttgtctaccaactatttgttagtttgtcttaaacagattgggattttgacatatgcatacaaaattttgactttgattgtcttatgtagcaatgtggcgatgctcgtttgttagtctatgtttttatatgaagaaaatgaatcatctaaaggatggcctatgatccccgatacattttcgacacataatagagtaatgatggtagattcctttgactgggagagatagagaccaaattttatattgttaatcctgttactaacactcttatttctgctattctgtttgatggtattgtctgaatcaactagctattatcccctgtgaggaatttaattgctcgttggtttcttattttaggaggtctgaaaatgaaaattttcactttcttcttcatgtcgactttgactgttttgggtttttgaaatttgtaaagggtcaatttgatgattatagatatattttctatttgtaaaatctacatattcatcttcccatttccatcatttttcttctctgttttgctcaatgcactgaggtaaattttatagctgtatgataaaggtgtataggatgtaacgggtttcaggttggttgttaatgacatcgggacagaattgaaataaaaaaatgtgataccaatagcatgcttaacacttgtctttatgtgtgtggaagctcttgtatttgttttcacaattttcatcattttttcgactgatcgaatccgccatatttatgatttggtttatacaacctattaccaatcggtctacttttaatccagattttacatttacgaaacattttgctgtatataattttcatctgatttcttgcatgataagtgatgctttgattgagtaattaaccgattcttgaaataatacagcagccgtttacggacataaaaccggcag

SEQ ID NO: 101114 - DNA, 807 bp, Mimulus guttatus
  Intron number 6 from transcript mgv1a026248m (locus mgv1a0 26248m.g) derived from phytozome v7.0 (chr-ID scaffold_142 ; pos 483811 to 484617)
ttccggtgttgtaattcaagtttaacggcgtttccatcgatctactatacgcaagcgtgtccctctcctctattcctgaagtacgaaccctcttttgtttccgactttcattatctttgtccgttttattgtacttcaaattcgatttgaaatattatataattggtaattattatttggtttgggaattgctttttgcggtttgaaaattgctatttgcggtttataacaaaacccccaaaaaatactttatttcactaaaactcctaaacttcccaaaaaaatccaaaaaccccccagaaacgcgtaaaaccccatcttgggcgcccattcatgcagtgcacgcccaagttgggcgtgcaagctgcatttgggcgcctgagttgggcgtccagtgcaaaaattttttttttttttttttaaatgtttgaacgcgggcgttcgtacacgccttgggtgcccatcttgggcgttcgaacatttttttgcgaaaagaaaagccctacaaatcgatttgtagggctttttaacatgaaattggtttcttaatcgacctacccaatgcatattatacataaaagagtcgaaattacatcaaaaaatagaagcccaacccttcttcaagcttaatttcgaattttcgaacttttttttttttgctaattgcagttttggggggttttttgatatttttaaaagttttggggggttttgttataaaccgcgaatagcaattttgtgaccgcaaatagcatttcattttggtttttaggacttggatatttcacaagattctatactgcaaaa

SEQ ID NO: 101115 - DNA, 452 bp, Mimulus guttatus
  Intron number 4 from transcript mgv1a013136m (locus mgv1a0 13136m.g) derived from phytozome v7.0 (chr-ID scaffold_24; pos 1079600 to 1080051 reverse strand)
aaaagattcggtccgtgctctcttctcgcaatacatatgtttctcttatatgctaatctgaaatgtgttaagcgtcgtttcaattttaatggtaccgctatgtacttcaaatgcgattttaaccatttttaaacccgaatttgtcaaaattcacaacaccacatattgagttgactttctaatacaacttgaatcggttagatttatatgtctacttcaaacgttattttgtcaatcttacggcccgaatttggaaaaactcaaaacatcaaagttgtagctctttaaattttctttctagcgcaacttgaaccagctatatcgatggctggacgagaaagttatgcataatcttgaatttaccgtaccaataaaattgactttgttgtctaatgatggattagcttcgtaaatttcgactgttgtaaagtgttttttgtttggcagaggaa

SEQ ID NO: 101116 - DNA, 858 bp, Mimulus guttatus
  Intron number 1 from transcript mgv1a001030m (locus mgv1a0 01030m.g) derived from phytozome v7.0 (chr-ID scaffold_1; pos 3812626 to 3813483)
cctccatttcgccgtcggacgatcgcaaagagcaggtcgatatttgtaaatctgttattaagtgtattatctctagtggagttttttttgccttggtgatttactgtgctgaaatggttttctgttattttgttcgttttgtacttgattgaatagagcataatagagttgtctgttatagaaatttatccaattgttaggttcttatttctgtgcactggataattgttcgaattttatttccacccccaagtaatgcaaataaattgattgtcatcactaactgtaacttgaaatgtattattctttggagcacctattcatatgattttagccaattcagaagcccttggtataaggttccgttgttcattgaagtttcaatatcttgttgtttgaattcagtgctgttttatttgttcgacataaatgatttgtgttgatcatttaagtcgcctgatgttaattattcaattggagctattatttacacaacattatcatttttatatttcatccggaagcatagatatttcacaatcttttatatctttagtgatttcatattattgattgacttgttataattaccgttggaaaatcttcaattgttttctttatctgtataatttggaaatattgtgtgagatctcgctttagtattataagcatgtattttctaagtgtatcaatacagtgcagttttactttctcctctgattccatgcttattctggttagcttccatttaagcaattagcgacatgaactcttaattctgatgaaaatgtgttgttattcactagtcatgatgcttctcatgttgatatacagctcctttcgtgttaatcaggtatt

SEQ ID NO: 101117 - DNA, 835 bp, Mimulus guttatus
  Intron number 1 from transcript mgv1a016909m (locus mgv1a0 16909m.g) derived from phytozome v7.0 (chr-ID scaffold_4; pos 410141 to 410975 reverse strand)
acatcaccatcaaagtgaatagcaattataagcaggtctcactttttttttttttttttttttatatccttttctcacattttctttttttaaatcctgattttttgattatttataaattatcctctgttaatattgcatgatttttttttaattattaattttcctggactttcctctttatgtgaaaattagcaaaccaccatttcgttcttcatcaattatgggcttgttgactgattttgaccaaaaaaaaaaaaagaaaaaaaaaagtgttcttgaaatcgaagggtggggttgaggatacattgctcttgatgcacttaggaggttacatacttccatatgaaataaatttgattaaggtcccatttggctaaacttattttaaacagttgataagctcttacagcttcttgtcttacagcttgttttaagagctgataagttgttacgtcttaatttttaatttttaagattatttaaaaaaaaaattaccaaacattctggaagagcttataagctcttaaacatgttataagctctttttaacagtttataagcgtagccaaacaccctccaagtcttgttaaaccaaaatcaagaaagaatgatctacatctcctagctaaagattagatttttcctttcttcttttcatgaaattgtctatttcgcatcgttttgaaattttttaatcaagtgtttctgttgttttgattttgttaattcatatacttgtttaacttgaataaaatatgaccgttcgttcgtttaaaaaatgttgcagaaacagtaactttgttattttgtgttgtgttgtgttgattgaagg

SEQ ID NO: 101118 - DNA, 270 bp, Mimulus guttatus
  Intron number 3 from transcript mgv1a011612m (locus mgv1a0 11612m.g) derived from phytozome v7.0 (chr-ID scaffold_2; pos 1594126 to 1594395)
ggtcaatacactttgaaaatctataggttgcagaggtaaattaaattaaatcatttattttagttattaaatagtttatttcgtgtttgaacttttttgtttcgagaaagttgttatctttaccgaagaatgttctgtctgataagtggcattcttgttttcaatcataaattaatgtgggatcatgtgtttatatttcaattttttaattaatttattattatgttctttacagcaaagctccaacttggttggcaagatttgcaccaa

SEQ ID NO: 101119 - DNA, 940 bp, Mimulus guttatus
  Intron number 1 from transcript mgv1a007437m (locus mgv1a0 07437m.g) derived from phytozome v7.0 (chr-ID scaffold_682 ; pos 20005 to 20944 reverse strand)
gacggattttgcttacacttcagctaatcggtgagtcggaaaaaggggattttttttttttttttttttggttttgattttgtgtatattttatttcctcgtatttgatggtttaaggtttgaagtttgaactacattaaatgaatttttctaatatgtgtatataatgttctgttagtggtgtttgggattctgaatcttagtgccatttgtcatctgtttataattactgcctaattctgttaacgtagtcgattttgagtggttataattgtttctacgtcgtcttgttttgttgaaatgattcaagtatttaaatctgaccaagaaacaactgaaattcgaaaacccgaaaccggataccaaatgaaaacgagattctctttccaattgctctgtttgccaagacttctactcgcaatcgtttacgtttcttggagatttgtgaattggaaaaaatgatttcaagcaagtggagatgtaaaatccatcaacgaatgatatgattccgaagtaatatttcgaatgaatttgctaatgattgctcttgtatctgtacgagtaaattattacgcgtcctcgatttcttgattgcgttgggcttctgcgttttgttgatatttaatatgtgacgaaagtttgcttcgcacgtttgagcctttcttgtcgaaccaagttgattgattgaaatagaatgtcaagattctataattttattatcttcgctagtttcctcgtagattggtatccgtatcactgtgtatatatatatatataagcatcttcttctctctctatttttgtttcgaaattgtagaatcacttctttgtaattatagcgagcgaaccctatatatattactcaaattcgatttaagcatattttcctcgtccgtaacattatttcaggtcaggcctttgtgatccaaaaccatcaccg

SEQ ID NO: 101120 - DNA, 813 bp, Mimulus guttatus
  Intron number 3 from transcript mgv1a016767m (locus mgv1a0 16767m.g) derived from phytozome v7.0 (chr-ID scaffold_18; pos 1353420 to 1354232 reverse strand)
tcatcactccttccgttctctccgatcgtctcagggtacaaacaattccttttttttttttttaattcctcagatctgataaaccttattcatgtttatatatctcgaacctttttttcttcgtttgttagttatttgattgcgtttttgtttgatgatatgtggtcaatgttcttgtagataatgttttttttaatttgctgtgcttttctgtttatattgtgctcatatttatgctcaatgatgtaaacgtggaatagttgttattggaaacatatatatacttagcttgcttatcgtacactgttctacaactcgtttaatcacaatttatcatgatactaaacagtttcaaatgcattatgtttcttgttgtttagtttatattttatgctatatgtgtattgtaaatagggaagttgtagctttggtcagtcgtaagtaatgttaattcatatacgttttatcctttttcaatcgtccttatgtattctttttcaacatagagctgttgaaaaatcacgggatcagctttagagtatagacatgttaccgaaatccgtagagtttaagtggcgattaggttactggaattatctgggttaatatttgttccctcatccggtgtttattttatgtttcgagtgtttgtgaaattatgttttgagtgttttgatcaaccaaagtttgttcgctcgttacttctgttctttctcaaatgattgtgcaatttgcaatgtacattttgatattaaatccgattgtttgaacattgcagatcagtggatctcttgcaaggaaagctatcagaga

SEQ ID NO: 101121 - DNA, 615 bp, Mimulus guttatus
  Intron number 1 from transcript mgv1a000881m (locus mgv1a0 00881m.g) derived from phytozome v7.0 (chr-ID scaffold_18; pos 2130928 to 2131542)
tcccatttcaagattccgctccccttttcccgccggtaatctctttgtccagatttttcgatctttacttggaaatttcgtgtctcgtgcgtttgtttctttcttatctgttttattaatttgattttcgtctcaaggagttcgacccatcacccatgttcaatttttataggattttctgtaatttcatttgtttaggattaggatatatatccattttctcaagcatgtggataagtaaccattttttgaaaggcaaacatttttctttcttggtcatgattttgtttgataaaactcaatttggtaataatatattagagggttaaacattcttgtgtaatagttgatgattctagtgattgaaatacaggggcgagagactatagaggcttcatcatacaaactctaccctcagtggatccttgtcggttgagctatacaaattcccatgacaaagtttctcattttttcactgcaagaggtaaacatcactgtatgttttagaggggcgactctcgtaatttatacatcactaatgtgttagagtaaattattcatgcataaattttaatttcagcttcagcagaacccttgactgagccgattgtggaa

SEQ ID NO: 101122 - DNA, 883 bp, Mimulus guttatus
  Intron number 1 from transcript mgv1a015715m (locus mgv1a0 15728m.g) derived from phytozome v7.0 (chr-ID scaffold_55; pos 909405 to 910287 reverse strand)
ggtacttttcttcatttatttatttagctagctaacatcatttagtaattagcaagaattatttaatttaggcctcgtttggtttggttggattcattactttgaagttttgaacttatcttgattaagtgaatctagtttaatttccaccaccaataactttttcaggttaaaactttaaagtccctaaaaaatattttgtattacgaacaggccgaacggatattttgtatttgctataagtcaattgggcagtttagttggacaacttagactgaaaatacacagtttagactgaaaatagacagcttgcttggacagcttatagggaaagtagaaagcttagactgcaaataaacagcttagttgaaaagtttagaatgaaaattgacagtctagactgagagtggacaaattagtgggagaatttaaaccgaaaatcaatgaaaataacatgtttccaatgacgtggttggcggaaattagacgatcggcggcagaggactagtagggatggacaaaaatgccatttttgggagtgggtgttgttctgaggacgaatgatgagttagaggcgaataaggtttttccggtctaaaatgactatttttcagtctaaactctccaactaagctgcccgacggacttatagcaaaatgcaaaaatatgaatattccgatcttaaagagtattagcgcccaggagtgttcagcaaattgccccttatttttattctagaaaatcccattgaggcaaccaaacgaggccttagtctgtagttgcatttacatatatctatgtattaatgcctgttttttttgtggtctattttcttgtgtcgaatgtagccccgaggatacaccgtggagtggaggtcagttgt

SEQ ID NO: 101123 - DNA, 867 bp, Mimulus guttatus
  Intron number 3 from transcript mgv1a013861m (locus mgv1a0 13880m.g) derived from phytozome v7.0 (chr-ID scaffold_39; pos 24373 to 25239)
caggacccggagcaccaagaatcttcaattgtgtaaggatatattatttcgtctagtcttttcatttcttgtacaatttcaaatagtgatggtttcacatgttaattgaacgctgaagtgaaattttgccaattgctctattttaccccaagtaacttgaattttttctaatctatcagaaatgatttgtcatataacattgcattgaattgtattcataagacacattaagctgtttgtcttagaatgcaacaatttgagtcaaagaacacatttgataatgtgcatccagcttttattttttgtaactttttttatttgcagtttattcaataagtaatagctccacacgaatgtgttcaacaaggccttgcccttccactcagttgctgactatatgactgtttattaactcttttcttttttcagtcagactatttatgatcaacccttttatttctctaaagctatatttccacttctatattcatgtcatcttgttgaactttttactagcttattttcactcgatgtctcacttctgattggtacttttatctattcccatgtatttttatttccatttttacataattctgttcttccccatcttgtatgactgcgtggacagatggatataattgctctgtttacaatgaactagactgaatatgtattcttaggaacggaaatttactttcatttactcaacctgaccatatgaacatgtgagctgagcaatatatagctttaagattgttttttttcccatgaatatttggtttgctttgtttatggtgctttccaaaactaactagcgtgacttctgcaggtggttgagataagtaagggaagtaaggtgaagta

SEQ ID NO: 101124 - DNA, 711 bp, Mimulus guttatus
  Intron number 2 from transcript mgv1a009586m (locus mgv1a0 09586m.g) derived from phytozome v7.0 (chr-ID scaffold_1; pos 1439076 to 1439786)
tcatagcaacacagttccaaagactcgatattttggtaagtacaactatcgttttcataaaccagacgccgaatttacgttggcattttgcttacaccattgattatgggggaatttttttcttgagaaaaaaaataattagggatttgaaaaaaaagaaacaatcattctctgtatagtgtttcactaatagtgtagtggaaaaagttttttgcctttgattccgaaagcaacattcagttgttagatcgaattcaatagttgcaagtgtttcagtatattagtgtagtggaaatattcttgagaagtttttgtgtatttgattgcaaaagcattggagaacgagtataactttaaagaaatcgtaaaataggagttcctttgtaaaaaagaactatctattcgtacttggtatttcctttctttcatttaacttttttggtgttttgtgtagttgtaggtaacaatttaaacattgcacgttctacgtagtaatacctcttgcaccacaacatttaaatcttgtatgggtttcagacgaagatggttaaaattcgtctaaatttagagattactgcaaaaatggatcagactaatccaattcttcgttaaatgaccaagtagttttgctgatttggtaaaatttcatggcagtggtacgcaatgcattccctttaaattgagtggtgatttaattccgacaggtaaata

SEQ ID NO: 101125 - DNA, 898 bp, Mimulus guttatus
  Intron number 1 from transcript mgv1a005535m (locus mgv1a0 05535m.g) derived from phytozome v7.0 (chr-ID scaffold_39; pos 705324 to 706221 reverse strand)
cctgagcagaggcttcttctttaccagcagtgagtgtgagctttcccttcttgctaattaagtgttttattagtggttaattaatgtgggattttattggaaagtagactcgatttgcgtttaaagattgtgtttttatccattcaatttctcaatgggttgtctctgaaactcttcttttttgattctccgtttccgggtttctgcgattatgtgaaattattgttcaaggatcttgagtgttgcattatcattattttctttaattggtttattttttgctaataatcattagcattttgggtataaggtatgtttctcgttcctgcatatttgattacaaagaatatcctgaaggagctgcttgattttgataattttgatgccgaaaaaaaatcgtttattttaaaaccattcttgattttattgcatcatcagagtattgacttttgaataacccttcaattcaaaggcttaggtaagaatgtagactttggtttggatgtttgtgtccccccatgtaataataaatccaggattttagttttagttttagttttagttttagttttagttcatttttgttttcttgattgactgtatatgaatcatttgttttacgttcgatttctcaacacctgaatattagttggattacgatatctgaatctggttagtgagtttagaaaaaaaaaaaaaaggagtagttcatgcgaaactgttaaaactaggcgtcccgtttttcagttcagtcggagtaattacaagaattatgctcttaatgtgttcttgcataatcactttcttacttatctgaatttattgtagcctaattatataaatttattttcttcacttctcaggttgggacctaattaggttctaagtcttgtaattg

SEQ ID NO: 101126 - DNA, 774 bp, Mimulus guttatus
  Intron number 1 from transcript mgv1a023350m (locus mgv1a0 23350m.g) derived from phytozome v7.0 (chr-ID scaffold_76; pos 1081526 to 1082299 reverse strand)
gtggtggattgaaacagttacattacatcgaacaagtaattacatatcagctacaaattcttcctttggttttgaatatatattgttgtattcccccattcttttataaatttaattagatgacatatacatggatctaaactagatgccattgatgtaatctagatgccatggatgtaaagttatcttccataagttgatgtagaaaattttattcgattttttttttttatttgaaatacttgttcctcttcatcttggtgataggtattgattattgctagaaacatttaacttaatttaattaaccgtagaaagcaagaatgaaaaattgtaggaaaagaaaaggataaatacgttgtgaaaaaatatagggataattacacttttggtccctgtattgtacatcagaattaattttagtccataatttcttgtgttcatttatttgctttaagtagtttataactgtgttaacacaagaattatagttgtaactgaatactgtttccacaacttaactgttacaacttaggttaattgatttctataggcatataaatctacaaaatccaataagtggcaaaccaaagggacgaaaaatgtaattatcccaaacatatgttgtaacacttcaagttttatacgttagtttttaaatttttttcatttacattttatagttttctgtttcagttttaaacaaacaaaatgcgcaaagtatatattaaatataaataaactaatttaaagaaaaaaaagaccaaaaagaaa

SEQ ID NO: 101127 - DNA, 779 bp, Mimulus guttatus
  Intron number 2 from transcript mgv1a017060m (locus mgv1a0 17060m.g) derived from phytozome v7.0 (chr-ID scaffold_18; pos 1262745 to 1263523 reverse strand)
gataccagctactggagtttgctttctcaaggttttacttatttcatttcctttttttttcgtccctcaatgaatctctcgactcgaattgattttttttttttttttttggcgaagtaatgctctatctcgtcttggtaaattttaacgtatttgattcttcggtgatgttgttgatgtagtaaagcgattgagaccactgattggtgatcttctcgaatgtgaataaagtcgtgtatttatatgttgattctgaaaacgatgcttaatgatcaaatgcaatggaaataacttgagcggcgattgcttcagttggttttaattccaaattgcagccgtaataatgcaacggaaacactttgaacacaagtgtaaatagtttagttgtttgaccttacacggatggtcaaagactaaagaatagatcattcgagttcattttagtcgtttataattaatgagaatgatttgactatcattacagtgttggccatgaatctgccatattagtttctttcatcggaattttatttataaaaaaaaaccaagcggaccagatgaatcatcgactcttgtatttcataaaaaaagaaattgcgttgtgtttaatttaatttgcagttatctgtgattcttgtatagtgtaacttatcacacgattgtcatactgatttgatatttcttatacacggtttgttttttccactgattttcgacttttgtgtgttctctttatgcatgtagattttgcagttcctcggtgaaaagtgagtgaggtc

SEQ ID NO: 101128 - DNA, 712 bp, Mimulus guttatus
  Intron number 2 from transcript mgv1a022774m (locus mgv1a0 22774m.g) derived from phytozome v7.0 (chr-ID scaffold_101 ; pos 245770 to 246481 reverse strand)
tttgtctccgacggcgcctccagggttctcgttgagtacgtctttcgattaatctccgcctttcgtgctttcattttcgtgcaatttccgattttgatttctgtgttgttacagtgaacttagtgactgaaatgaaataattaggccgaaaaatatgcatcactgagaattttaagagtactgtaggattctctcaccgtagaaacaaactaagaatgaaaaaaaattaaaaaataaaaaatcttcaagaatttcgattttcatgaagaatttaggcatttccccctttttatttcttgagctgatgaagatatttttgttaatgtcttactttgcttttcggtttctcgtatctgtatagatgcatcagttcattcatttggttgaaatcacgtattttttgtcgttggagtttgtatatgcagtagaacctcgataaattaataacctcgcttaaattataatttctccatgacccgactcaataaagatgtattaaattattagttcgataaattaatattttgctaaattaatagaattttgctaattccgactgtattaatttatagaggtttaactgtatttgttacgtattagttatgcaagttcttcactctgtatttagtctcttttctttgggtttagtactatttcttaagtttaatggatcggtttttgactgattgtctgtctatcaattggcgtagtt

SEQ ID NO: 101129 - DNA, 364 bp, Mimulus guttatus
  Intron number 1 from transcript mgv1a007501m (locus mgv1a0 07501m.g) derived from phytozome v7.0 (chr-ID scaffold_109 ; pos 570362 to 570725)
catcatcagattctagagctcgattcttcaattaggtaattaatacccacattgtcggaatactgctgtttttatcttcagatttgtttttttctttttttgaaatgattcatccttttgttgtgcgcgcgcgtgtgtttgagctgccatgtttttttttctttcgtaagcgtagattaattagtagttgagactctactctgtgactgatctatatacatttattactacttgttcatgttttttgtcttaattgattttcattaccagattcaaatttcataatcccctgtttcatgatttatatttgggtatcttttattatatatacatattatgatttgacaaataatcagatactgat

SEQ ID NO: 101130 - DNA, 538 bp, Mimulus guttatus
  Intron number 1 from transcript mgv1a013253m (locus mgv1a0 13253m.g) derived from phytozome v7.0 (chr-ID scaffold_11; pos 264008 to 264545 reverse strand)
ctctctcttcagtctctgcgtctctcctacctctggtactgctgcactctctctttcttgctttcattatacattgctgtgcgtatatatgtatacatatttcgtggtttctgtatgttcgtatgtttcttcttcttctgtgtgtgtgtgtgtgtttattttttgcttgatgttttgaaattgaaaatgcttctcgggtgattctccggaactggaaaatgatatgaattctttgaattttctggtgggggttttggatttatcttccactagctgctgtttggaagttgtaaaattgtacgtgaagtgttcgacgaatgttctaagagagtatatgtaattctgcaagggtcaagaaaagtaaatgtacttgtttgggttttgtacattgtatatttgtattcttgttgagtttaagctatgttggaaataattgtagttttacagggaggggaagtgaaaattatattgtccaaccaagatgaatgattttgttactgcagggggggctttggaatattggcgatcgtttaattcg

SEQ ID NO: 101131 - DNA, 645 bp, Mimulus guttatus
  Intron number 1 from transcript mgv1a013122m (locus mgv1a0 13122m.g) derived from phytozome v7.0 (chr-ID scaffold_54; pos 1024135 to 1024779 reverse strand)
gggaaattcgtcagccgtggatcttttccgcgcaggtctgtgatcatatcgtaatcaaaattgaattgttttgtagcttaattgtatttgtaatttgtagcttttgaagataaaaaataaaataaaataaaaatctgatctttatttgttttacttttagatagatctgcctgtattgtttttttcgatgattatgcttaaggagaagtcggtttatactaaatcagctttaattgtgaatcgggattagtgaattttatgataattagattaattaattatttatattaatatttggagcatcctcgttgttccggaaaaaaaagaagaagctttgaatcggcctgaattatgcgaaattatctgatattccgattttgtcgaatgaattatcgggcgtagggttgagaattttgttttcgcaatttctaacatgtacaccggaacattaatatattattatttttggagtttcgattatttttggagtttcgattatatttggagctttgattatatttggagctggaactgtagtcaaaggcggaagccaattttgtgatatgcaacgaaaaacgagagaataaaagcatgttttattttctttcagcttctggtaaagcagcttcgaaagagctggagcga

SEQ ID NO: 101132 - DNA, 772 bp, Mimulus guttatus
  Intron number 1 from transcript mgv1a005198m (locus mgv1a0 05198m.g) derived from phytozome v7.0 (chr-ID scaffold_324 ; pos 107502 to 108273 reverse strand)
gtctacgttatccaacgggctctcgccctctactcgtatgcctcgtttctctttcatcgataacattgcaatctgttcactgaatatcttgtgtgtgtgtgtatctgtttaaccaaagaggaatgcatgtatttgaatttagatgatggcatctaataattataattcatgtggcattgatgtttgtgctgaaggcttgttagattcaagctattgtcgatgcttttgcgtgtttgtctctgggaagttctgaacggatcttttttattcatttatggatgggactggctgttatccgtatttcatacattaataaattcggatagcttttcgtataagtggactagtggaaatacgatatgtatatgaacaagttttggaaattatccagattaggaatttaggatactggtttacccatgaactgaaatgtggcacattccgcatattttcaggttttccgaaatcggcagattcgattttgtggtccctacatttgttcgtttgtcatatcaataaagtttgtcatgggaactttctgtttctgtctcttaagatacatatagaaccataatttttttttgattggctaatattctctctcgggtgatgtacgaaagaaaatatggtcataaatgtcttgaagaaagagacccggatgagaatttcctttttatgctagttttgcattatcttttaactgacctcggaaaactagattcagtactaaatattttcatcgacagtgttgaagaggttgccttaagcctca

SEQ ID NO: 101133 - DNA, 899 bp, Mimulus guttatus
  Intron number 2 from transcript mgv1a007532m (locus mgv1a0 07532m.g) derived from phytozome v7.0 (chr-ID scaffold_89; pos 452466 to 453364 reverse strand)
tccgcagatcccatcgctacaagcacgcccttgaggtatttaaatttttcctcctttattttttttcttttaaataataaattatctaatttgttcgttatttcgtttgtttcatggatttgagatggttcctttttcatttttgcactttttttttttttttgttcttgcttgatttaatgctctgcgtttgaaaagaacgaggcccatcttcaatttgtgattacttgcatgaatttccattatttatgaggggtttggtaataaatagcatgattaacgaatatatcgtttcattgtgaattttcgtataataaacgggacaagaaaagtttgaatctggttcttggttctccggatgtcctggcttttgtgaaatattagttgctttagccggtcaatttgagcatgtgcggtgaactaatggtgaaacgtctcttgttgatcttctctctttacatcggagggtgtttcgcgagggtcatcgttccaataaatcaatatcgttgctaaaatgctttccggaatagatactaaacaaaaaagtgagtagctcccaactatttcaacccattagttttaagataaagctacgttcttgagaaacttgaaaaaacctcgtgtagatttacttgttctaagaggttgttattatgagacgattcctttaaacttagttaaacaaccctcctgtctggctcggcactagttttctcgatgggataaagaagagttcatctttaatagaatagtttttgttttttcaatttcggaattttttttgggaccatggatgtaagaaatgttagcataatcttgaaaagtagttgtctcattcaaaattaacatattgagatattaactttttaaactactttcataaattcgcagatatcaga

SEQ ID NO: 101134 - DNA, 605 bp, Mimulus guttatus
  Intron number 3 from transcript mgv1a018686m (locus mgv1a0 18686m.g) derived from phytozome v7.0 (chr-ID scaffold_155 ; pos 475266 to 475870 reverse strand)
ttgactcgggaggagaccccaatttagatcctaaggttcgcgttaaatttaaagtggtttatttattcaataaaccgtgattgtatctacgttaactgtttgattgaagatgatatgaagtttatagatggtggagttttactttagttactctgtctctaagataagttagctttgtagaaaatatttggttcttgtacaagtatcttacgtcgtcgagccgttgattttggtgcgttttgcgtgttttgatgataaatattgctcgtttttagcattgtggagatcaaatataattagcttttgggtgtttatttccgtgttccgtttcctttttcttgggctacttttggatcttgggcaatagtgcattactaaagaaattgcttcgttttcttagcttcgaaagaaatgcagatgaaacttcattaaaacatctatacgggaagttatttatgcattaatacacatgtttcgtttgttttttcatgttaggcaactccactggaaaagtacttttaagttgttaaaagtacttttctagtgtttatgtaatctcctttgtatgcattctcaaacgacacctttttcgacttctttcaggt

SEQ ID NO: 101135 - DNA, 859 bp, Mimulus guttatus
  Intron number 1 from transcript mgv1a008714m (locus mgv1a0 08714m.g) derived from phytozome v7.0 (chr-ID scaffold_75; pos 668989 to 669847 reverse strand)
cgaggctcttcaaaaccctcgtcatcgtttaactagttagcttttcttcttccccttaaaatttatttttaaatttagttcaattttgctttgatttttcttaattgtttattggtggttttgtttgagatttgtatcttgctatatgttgttacttgttagggttggagctgatttgaagtttgaattagtttcacttggatctaatgggatttgattctacgaatgagtttcttcgttttatttaattattttaatttaggtgctagttgatgtagatccggatttggaaaatgtgaattatgtaccattgagcttattggtccctctgaattggcaaacaaaatcgagggatactgagaacagaattttgatacgggagagcgaattactagagctaatattgatgtatttgtttcttgttttatctcaaaatcttgtttgtgtgatgcttgtgatactccgtatttagtaacgattatttgaatgctagagttgaaatgcaggcgagcatgatctatagcttgaagaagaacgtaaaaaaatcacatgtatataaccatgactaagagaactatagttatgttacattcgtttcttctaccgatatatttctttaattgctcatagtaattttttgctttggttgttttttcctcaacgtacgtagaaatccaaacttccaaactgtcatctcttgttgtcacgttgcacattgtgtcgaggactgtaaaacccttctacgtggctgttgagatctgcacgtgcttgatatttggttaatttctttattatgtttttggtaagtaaatttatttcttaccttttttactctatttattatttgtcagttcttcga

SEQ ID NO: 101136 - DNA, 665 bp, Mimulus guttatus
  Intron number 2 from transcript mgv1a003263m (locus mgv1a0 03263m.g) derived from phytozome v7.0 (chr-ID scaffold_85; pos 152961 to 153625 reverse strand)
ctgtcggtcttactcttggccctaggggtaatttcttggttcactttgttttgtttcaattttgagctgactttcctgaattgtttgtttgttctcttcagtactatggtgttgtgggatgagtggagagtaatgtaattgatgacgatataattgtttaaaaaattgtctgaatatcgataagtcttgatagtttcagtggtacacattactcaggtttgatagttcgatttcaaattacttttgagggaaattgatgttgattagttgttgctgattttagagttcgttgtactgattgctttaacattgtaatcctgcataaaactaatttgagagatgatatagttgactgtttgtgtgagtaaattcattgatggcgatttgtaattgtttatttcttttgtaggcacctttttttattggtgcgttgcacgataatcaacgcgtttatgctttttcttgtataaagagaccgacaatcttgtagatagaatgtagttttcttggattgaaagagtgtagattatttagctagtgggacttctgctaggtgtgattgtggtgactgtaggaagagtactagcgtttcatttttcagcttatcgatgatttttatttgtgctgatgaatgattttcttttcttactattatgtaggaagaa

SEQ ID NO: 101137 - DNA, 625 bp, Mimulus guttatus
  Intron number 1 from transcript mgv1a006711m (locus mgv1a0 06711m.g) derived from phytozome v7.0 (chr-ID scaffold_64; pos 647031 to 647655)
cctggtgcggtcactgcaaacgtctggcgcctgaggtttatttatttaatcatttttaggttttctattggatttcaatttattgatttgagtttctgcttgtactaacatagatgagtgtgcttaagttgtattgacatgcttgttgcttgcaggtttaagatttattgagaaaaaaaaaaactgccgaaatcactgtttaaaatggattaaacttatgaataccaaaatattttcagttagcctgatgaaaaaaaaagttgtgatcccatgcttgtgggtgttgatgattttatatgtgattaggcaggactatgggttgttccttttactggtaaaacgggagatttttcgttcaccaagagaagttctaaatcaatgttttttttatttcagttgggactttatcgatccgattaaaatgttcattgaatcaacaaatgcaactgtctacttttacctccctgtatcgtgtttctatgagttcatcgtatagtattagtgaaccccagttgctcctggtatcaaattgagtcattatattataccatgtgtaaagaagaatgacgaatgtgaactttgcactgcagttagataaagcggcgcctattctagctggattgaa

SEQ ID NO: 101138 - DNA, 538 bp, Mimulus guttatus
  Intron number 2 from transcript mgv1a004479m (locus mgv1a0 04479m.g) derived from phytozome v7.0 (chr-ID scaffold_233 ; pos 118976 to 119513)
ggttagttacaattctcaatttttatttacattctttatatttggttaaagtaatctaaatccaacaattgaacattagaaattgaaataagtaggtgtactaaaattatttaattgaattttagatatttttggtgttgaagaaaaggcccacaagatctggtttttgttacaaggcattagagggatgggtcaaatacacagcatgattaggtggagatttgaataggttgttaattaattaatgaagcattaattgtcacattttcttcaaatggtatcctgtaataaatattaaaagaatcacaagtacccaacaaatgaaattatataatattaatacaatttccatgtttacaagaacaacatatgtcaaaagtcaaatggagtaataatttaagttgattgcagttgatcttgttttcttgtttttttcatatgaaaaaagaagagcgttttcattacaaagtttcgatctttaagacaaccctaatccgattctactaaaaaaacgcaggttttctgcagctaaaggatc

SEQ ID NO: 101139 - DNA, 989 bp, Mimulus guttatus
  Intron number 2 from transcript mgv1a016722m (locus mgv1a0 16711m.g) derived from phytozome v7.0 (chr-ID scaffold_51; pos 801990 to 802978 reverse strand)
aggaattagctcctcgcccttcagatcggaaaggggtaagttcaattcttctccggtagactttcagtttggtggatcagtatctccttttgattgcatttatcatttatttttagtgaatttaacctgtcaatcttaaaatatgcagctcaaatttgtacacctttattttttttatagagcttgatatcttgattgatgtgctagtttgactacctctgttaagtgttttaacatttgcaccatcaaatttggttatgtatgactgtttatatgctgaatatattgatacaaccagtcattggtccaattattgaaagttcagattgcttaagatgttgtttgttaaagcttgtgaaaactgcttgtgaatttttttggtgtttctatgaataacttttgattttgcatttgcttttttaactaattgaaagtttcattttccttatttttaattatttacagttctaacacaacattggtgttgacgtattcttaaaacatagataagttttgaaattagttcaatgaaaagataaatgagctttgtgttatttatgtatttgtctactttttaatcaatatgtatctcaaagtaaggtgacagtctcaatcaaaataagctgacagttaatggtttgattgcaaaggcatgaaactactaagttgtctgttcggtaggtgatttttcagggtatttatacatatcccaaacttgtagagtgaagtgcttatcccaacttttattcacagccaactttttcattcgtatccttggtagtactagtagtttagaggtttcattgagttaatgattgatgattttatgcaagtcgagataggttgacttattgactgccacttcttgactgctgttaatatcaaatatggagacgagcactagagttcattttctgactgtatttgttttgcataatctgtcgaataaaacagaaaacaagcaagagagtgcattttgttaggagcct

SEQ ID NO: 101140 - DNA, 512 bp, Mimulus guttatus
  Intron number 2 from transcript mgv1a015110m (locus mgv1a0 15110m.g) derived from phytozome v7.0 (chr-ID scaffold_137 ; pos 13326 to 13837 reverse strand)
ttgagattctactatcccgatgtacgtgcctttgatttaaattaatttcaattaattaccgcttcttctaatttgataatggagactatgatacaaaaataaagaattttcgcgtccggttttagtgattgttttgaagctaaatctccaaaaatgtgacaaatgtaccacctatagattaaaggattttcgcaatctgtacgtggttgtaatttgagaattgggtatgcgaaatccaattgtcaggaaaatttacgtttaatcttcggaaagtttttataaaaattcttcgttttttttccttcccaaagttaatattggtttttgttttgaaaaaagaaaagaaaattatcatcccctctctgtgcatgatttggcaaacgagacataacgaagctgtttcctccgattatttcaatctttatttctaagtctcggaggcaaataatttatttgcacgtattatgacttatatagctatcaacaagccttggggtgggagctcaatacaa

SEQ ID NO: 101141 - DNA, 625 bp, Mimulus guttatus
  Intron number 1 from transcript mgv1a015110m (locus mgv1a0 15110m.g) derived from phytozome v7.0 (chr-ID scaffold_137 ; pos 13888 to 14512 reverse strand)
aaaaattgcccgtcggcgacaatattatctgggaggtatttttcagtccttttcgccgcccaattttaatattttttattttttttgctacaatagatggatttgtgtgtagatggacggcggagatacgccggcgcaataaaccctgtgtagtagctatatcaatttcaattatatgtgtgtgtgtgtgtgtgtgtgtgtgtgtgtgtgtgtgtgtgtgtgtgtgtgtgtgtgtgtgtgtgtgtgtgtgtgtgtgtgtgtgtatgtgtgcaaaatgccgtttgtgtttgattttggtttcatgtatgaatatcaaatgttgtgtatctttgcatcgcatttgcaataaataaaaaaaaaggggttggttcaatttgttgttaacttcagaagaactaatgcaatgtggaatcgagcaaatcgggttcttgtttctcaattgtgttgcaggagtgagtgatttatcaattttaacttaggctcagattttgtttgttaacgagttttttttttccggtttcgtaatattgcctgttcggctatattcatctgatgttcttttattttatgctgacattaatctcgaacttctaattcatgtgtttgtattcgaattggcagtctc

SEQ ID NO: 101142 - DNA, 840 bp, Mimulus guttatus
  Intron number 1 from transcript mgv1a011457m (locus mgv1a0 11457m.g) derived from phytozome v7.0 (chr-ID scaffold_8; pos 582593 to 583432 reverse strand)
cccgaacacgataaatttctcgaggcactgcagctgtaagttcgaaaattttgatttccacaataatttttcggatacaaatttggtgattttgtactattgtctttaatctagggttgtggggttatgatcggaataccaaacgcagttcggtgtgtgaatttgggctttttttatcatggattttatgttttagggtttgtttctacgacatggataattaaagttggaatcttgagaggaagaaataggtgttggagatattaatactaaatgatacatttcactaacaacttaagcttttggttgagatggtcattcaacatggtatcagagccaggccaaatgaaaggtcctgagttcgaatcccaccgccacccaattcaaatatttcaagtgcaaggcttcaaatgtaattcgtttgcacttgagggggcgtgttggagatattaatactaaatgatacatttcactaacaacttaagcttttggttgagatggtcattcaacagttcatttagtttttgatttgagatattttgtgggtcgggttatggtatttttctagttccgcggagctcgtaaattgttagctaagttcgagattgattaccgtgttattgaagaaattgacagttggtttttttttcgatattcaaattgtggcatctttactagtgttattttcggcagctacgttctcgttattcttatgccttttatttactctattgcccaaaccagacttctcgttttctctgttataatcgatatgtgtaaaaggattttatgttttctgatacagatttgatcgtgattggaaaaagattgaagcctttg

SEQ ID NO: 101143 - DNA, 937 bp, Mimulus guttatus
  Intron number 1 from transcript mgv1a013394m (locus mgv1a0 13394m.g) derived from phytozome v7.0 (chr-ID scaffold_104 ; pos 822356 to 823292)
ctcccacttctcacccgctcgttttcctcacgctggtattattatcacttccatttttttttctctgttctaatttaaatttaattaattccgaaaatttctggttcaaaacttcaattcatgatatattattaccgttgcatctgttgtgatttgggttgttgacatcgttatgtacctcaagcaagctggcaaaatttctgtgggggcaaccaataatgtggttttgagttgtttgtacatgctttttgtttcttccccaatcataaaattgaatttattttattttattttgttttgttactttttactttttctcttggctctttactcaatatgattgaattaattagttttgcgaaaattatacttttcgatatttgctattcgaattctgtatcactccaatttagatggtttatatttctccggatttttcgttatttgtgttattcgaaaactatactattataagagactttgaaataattctttgtgttatgaatgttttcgttatgtcggattagtggagatggaaacctatgcatacttcgagtaacgtggaatttattctggtaggtgaatcagttattactgaaaattgaaagacggaagttttttcgtaaagcaagcatgctatttgttttaaatgttgcagtcgcttgtttaaatgaaaactgacgagtagccctccggaaaacctaacacagttggctgatgtagacaatgcatttgttgctaaaattcgaggattttccacattatgtaggacctaacaaacccataactctatccagatctaaaaattaaagaattcttttttttttttttcaatttcgaacaaccggacgatgaaaagtgggtgcgtttttattacaatgcagaccgattaatgtttattgacttattgcagaccgatttcttgcaggtagcaaag

SEQ ID NO: 101144 - DNA, 627 bp, Mimulus guttatus
  Intron number 1 from transcript mgv1a006516m (locus mgv1a0 06516m.g) derived from phytozome v7.0 (chr-ID scaffold_129 ; pos 629952 to 630578)
ggtttgtttatttttatttttcctttcgctttattatttttctgcgttttgttgattcttcgtgcttcgttgtttcttccttctttgttgtttctttgttcttcgtttcttctctgtttcttctttgtctgaaaatgagtataaactgaacggcaaagagcgtgtaacacaaacggcgcgttggaagttgaaaagaagttatgtaaaattagtataaagtaaagggtattttagtatttgcacattttgttagggactgatctgcatgttaggcgcataagtggggactgatttgcttaggaaaactacctagggactgatgtgtgttttgagttttggattagggatttatctgtagtttaccctttatataaagataaatattgtctattccaagaaattcgaaaattcaattccgatttttccaccctaatagatatttctaaaaattaccaataaaaaaagaagacgtaaagccccaaatcacctatttccccaaaaattgtcaatcaaaaaagcccactacaatttgtgcttcctatttttgtcaccttcttcaccatttttcccccacccaccaaccacctctcagaatctctacaaaaggaacgattaaccagtgagaga

SEQ ID NO: 101145 - DNA, 908 bp, Mimulus guttatus
  Intron number 2 from transcript mgv1a006516m (locus mgv1a0 06516m.g) derived from phytozome v7.0 (chr-ID scaffold_129 ; pos 630843 to 631750)
tactcctccaccgttggtattcctcccgctcgcaggtattttcgaattagtaatagctccgccgtgagttgtgagctgtcgattggtttaccagtttccatggattcgtgtttcatgcgtgcattgtattgaataggatcttttctcccctcttctgaacatcgttacgagatatatgcgcaaaagtacactgttttattgctcacttttgggaaaagaggggattgattttagggtattttagaagaataatttgaagtgatataattttgtgtacttgggcctcgtttggttatggagattagtcatgatgaactaaataataggactttgtttaatgcttggtatccaaaataacttgccgggtcgacccgtaaatattatgttatcatggcttatcacgccttctatgcatattttttattggatcatcgaaagttcaataaaacaatacagtttcattagattatttaatcttatctcggcaaccaaacgaggcctcgtttggttgccgagataggattaaataatctaacgaaattcaattatattattgaaccttcgataatccaataaaaaacatgcatagaaggcaagataagtcatgataacataatatctgcgggtcgacccggcaagttattgtgaataccaaacatcaaacaaattcctattatttagttaatcatgactaatctccataaccaaacgaggccttaatggagagaatttttgatgtagcagccaaatcaagtatgtgcacaagttttgacgatttccaaatcttaattatgaaaatgtattgaaaagcttaacaaacacaatttgcataccgttccaaatgatttatgtgaaactaatttgtgtgagcagggcagtggcagaacacctttcgaaagaccttcctt

SEQ ID NO: 101146 - DNA, 1041 bp, Mimulus guttatus
  Intron number 1 from transcript mgv1a006308m (locus mgv1a0 06308m.g) derived from phytozome v7.0 (chr-ID scaffold_2; pos 4291685 to 4292725 reverse strand)
caggaaggaggcagaaaattgtgattgcttgcaaggtttgaattagttttcgtcgccgtttctgttgctaaataatgcactaccttttttttttttttttcatttgtgcattagtacattcatgtgcatgtttttagaatatagttttgattcttcttctagaattttgattgatgaatcattttcagatccccaaatggcattgtcaaatcgaagtatgttttatttgaaaattgatgtgagtgagcaacggacgcgtatattaaacatatgtgaaaatctggtggtgtaagatatccacactgtattgaattatatatgcacaatgcatggataccttttttttagggattacagaaacatctcctgtttagtttgtgcatctctggatcgaagttctgtttcattatatccaaactctgattgtgaatacttaaattatgcttgtcaatcgcgttgaaattgttcttattattgtcggtgaaatttgttgtatgtggatctcttcggtcttgcatttctttttcaaagtcgaaacttactgacattgaccaggcatcactagatgtatctagtaacataatttggccaaagtgcacagctgtcggtaccttttgatggatcaacgaatatactgaatttattttagagattgttcactatttgttcaattaatttaatctatacatggtatgtggaaatatactacataatatgttaaaagagcttatgtatttgtcggtttaatcaaatattcatatagcggtttctttctatgcaacaactgtgatcaattgttacttactatttacctgcacatttttcttcttcgtggcatatggattctgtaatttctgttgctagaggattacaatattcgagtatgtgtttttcaattaatagtcagtcatcaatttgcaatagctaaatttttgtctctaactatagcttaaaaaaagagattttactaatattgagcatttgaaatttgttttcactttgccagggttccaggtgtgtcactcccttggaggaggcaca

SEQ ID NO: 101147 - DNA, 187 bp, Mimulus guttatus
  Intron number 1 from transcript mgv1a007707m (locus mgv1a0 07707m.g) derived from phytozome v7.0 (chr-ID scaffold_48; pos 773844 to 774030 reverse strand)
ggcaagttcgatctctcccacaggtccttcattttctcctcctctcccttaattcttctctccaattatgctatcaaaactcggatcactcaaattactcaccaccgaatttgatcggaaaaacaaaaattgaattcaatttgatttcggattataaatttgtaattatagggtggtgctggctccg

SEQ ID NO: 101148 - DNA, 645 bp, Mimulus guttatus
  Intron number 1 from transcript mgv1a000911m (locus mgv1a0 00911m.g) derived from phytozome v7.0 (chr-ID scaffold_52; pos 40169 to 40813)
cactaattgcagtggatttcttggcactgtcgaaggtaattaattaattaatcaatccatctacgtgttttttttaatcgtcttccgtcccaatggagaaatgccctctaaatattgtaaaaaactagtcttttttatctaggattgatcaaaatgttagttaatgttcttgatgtatactccgtttttcattttttttatcgtcttcgtttgcacgtctttgatttaattgacaatgctcgattttaacttgtgtatttcttttagtaaaattccatgaaaaattgatgatttaaccacaaaaaaaaaaagaaaaaaaaatcgagaacttttttttgacacggcctcgttgactcgtgtaactatgtggttgctggagaaaaaagtcctcttacataaacatgtcttaagattgtacgaaattagttttttttgttgttggaaatgttaattcatgtgcttgatattacttcgttttcgtgttttttatcgtcttctttctcacatctttgctctgactgaaaatgctcgattttaacatgcttttttcgtcgtagtacaaggccacccaaaatcgatgatttagccacgaaaaaaaaaatcgacgaaatttttgacgggtcctcattatactcttgtgtagct

SEQ ID NO: 101149 - DNA, 953 bp, Mimulus guttatus
  Intron number 2 from transcript mgv1a009847m (locus mgv1a0 09847m.g) derived from phytozome v7.0 (chr-ID scaffold_125 ; pos 461297 to 462249)
ccaagttataataattacctggacagcctaacaaggtaatataaatacttcatcaaagttcgtatatatgtatatgtatttgtatatatgtatgtatatgtaaatggaattttcttgtgctaaaagctagcaactgttttcattacatcttagtttaatgtttactgtaatataataataatgttacaacagaagttattagatgttgatttactctatatatagtttgatagatatggttagtgttgactaatttactaattaaccactacagatctttttatttggttgtgtggcagtttgcttgattatatattgaatgaataatgcttcttgtattacaattaatagaatgataaataattaaaatcatctaattttacttattgtgtatcgatttaatagaacaaataaaaataatatttttattttgtaacacatgataccaaactataaacatatatgtaagataataactttattcagtgggtatcgtatcctataggtaattgcatccttcataatgaagagatctcaaaagttggaaaagataaataaaaataaataaataaaataaaagaaataaataaaataaaataaataaataaaataaaataaataaataaaataaaataaaataaaataaataaataatgcacgaaagaaatgaaggaacaaaatggatagaataaaaggacaaaaataatacacatgcataggataaatacttatcttatatgattcaatgaagaccacagaaaaatattgggaccaattcaatcgacactgacagcttcaattttaaattttacgataattaatcacccccaattgaatttaaaattcatatgaaattaatttggatctaaaattcaaaataattaattttatttatttatttatttattattatttttcttttatgttttacagcccgaacttgaggttcggaa

SEQ ID NO: 101150 - DNA, 596 bp, Mimulus guttatus
  Intron number 2 from transcript mgv1a004754m (locus mgv1a0 04754m.g) derived from phytozome v7.0 (chr-ID scaffold_3; pos 2460440 to 2461035)
attttagcccgggtaagttaattatcctgatctttattttttcttatgttcgattctatttgattcgatacgatttttactgaatgagaagtcgaaactcaacgagagtgaattcttggtgtattatcgaagccgacgctaactagattgaggtgcattatttttgttggcattcaattgagtaatcccatcacatgtgaaattgctgtcacacttgacaaattattatgagactaataaatggttgcaattgcaacctatgtgttttcactttattaatttgcagagacatgtcaactgacaatgtttatttaataatgggggtagcaatttattgagttataatggtggcttcaataaaatagttggtagggtgtcaagttatggaactagtaactaccccactcgaaaataaatcgagagctaaaccctttgactgtgttcgatttaagatggtgtattagttttaagtccgagtcttaagtcacttttcttatcgtgttcccaatgaatatttctcgagccatcaaatatcgatgggacctacaaagttgttacctgttaactgacacttggactcgtattttttgatttag

SEQ ID NO: 101151 - DNA, 711 bp, Mimulus guttatus
  Intron number 3 from transcript mgv1a005765m (locus mgv1a0 05765m.g) derived from phytozome v7.0 (chr-ID scaffold_174 ; pos 172235 to 172945 reverse strand)
gaggtatgcttgtatcctgtgatggcctaatgaaaatctgttgtttgtttttttaagcatgattctgttctttaattatataactctttttctgcatcatatactattgcaatgtcaattataggttatatgtaagatttgattgaactgaatgcgatataattggctaccactaacttatattgatattggttcatgctttcgattttgtaaattactcttgttatcggtattactattttactgattgtatcgctgtttctatttcttatggacatgggatatgggtggattttatgcttaacaagtagctgttcgaacgcttttctagataatatttagctctatagtaatgtacctaaaaatgcacatttattggagtaagcattagattcctctcacacaactcatataatcctataaaaagcacagtcaaagaagctaaaaaatcctataacacggtatagacaataatctgtaggaaggaggacccaacactgtatttttgcctgttgaaaatcaattttgaactgcaaaaattggaaattattgcttagttctattagttattaaacctacttgattgtgtaattctttttttcttcttcttttgggtaatgcatttactaaacagatgaccacttatcgtatcttttcctacttgatctttggataggttcagagccccacatttcagtgttagagcaccaa

SEQ ID NO: 101152 - DNA, 854 bp, Mimulus guttatus
  Intron number 1 from transcript mgv1a013538m (locus mgv1a0 13538m.g) derived from phytozome v7.0 (chr-ID scaffold_12; pos 2540997 to 2541850)
aaggcccagatttgggataccgccggccaggaaaggtaatcaattgttaatttctccgtgaatttctgaatacgaagatcttatgatgcgtactgtgattcgtttgatttttcatttctgtatgcctgattttttttttgtatttctgtgatttttgcttgtgccgtaatgaattggtttgatcggtcggaatttcgaatatttagctggatcatttcatatgtgatggtgaaaatgtctatctcatgagaattctgcccaaatgcgtgttttttttacgtcgaaaatgacgataatttcttcaaatttgaattatgtgggacatagaaagtatattttcgggataattagctcatatgtttatatatatatgcttatgtatagacgtactgattgaaatcaacacgaccaattgacgatttgatcaaatgtcactggttacatgtcgaatcgtgttaaaccgtgtgtttgtctgctaaaaacaaaatcggtaactgtgtgtttgtcgacacgaaaaagaaaaatcaaggttaatttatttgcataagctcgtcaacattcatgagtgttgacggtgccattgttaacttaaaccagaagcgtattttgttaggaaatgtttacgaatctctaacagcttattaacagttgttcacatcggagttattgatgcaacgaagggtatggaaacttgtagtaaatatatagtattttctggcatcataaattttagccatatataaccatctactactgcagtttcatcccgtttatatcatcacttaacaaaatgcaattatcgtttttctttaaacaaaggtaccgagcaattacaagcgcatactacagaggag

SEQ ID NO: 101153 - DNA, 391 bp, Mimulus guttatus
  Intron number 1 from transcript mgv1a008750m (locus mgv1a0 08750m.g) derived from phytozome v7.0 (chr-ID scaffold_32; pos 14285 to 14675)
cccgctcgcttcgcgcagcccttgccctccatgtatgtgatttgcccgcaaggtgtttgtgttattgcccctgtgagcttgttcacctttattcttctatcctgctgtaacttttaatttttgtgattttggtatttgcaatgattggagatttttaagttttctttgatgttttccatctattcatcatgggctagatgtgttaatagtctctgaatattgttgtttgctctatgatgttaaaatttagggtgataagttgggttaattggaaattctgttattacttgttcacaaaatttagaaaattttggaaccctaaattgtttttgcttgattaattcacgggttctaattttcttgcatgtgttcttgaaatgaagatttaaaa

SEQ ID NO: 101154 - DNA, 557 bp, Mimulus guttatus
  Intron number 3 from transcript mgv1a008999m (locus mgv1a0 08999m.g) derived from phytozome v7.0 (chr-ID scaffold_27; pos 745913 to 746469 reverse strand)
ccggttattacattcatcttagcattgcctctcgggtaagttcgatcagtggcggaaccagaattttctattcttgatggggccaaattaataaatccaaaaattgagtttattgcatttagcaccctttcattatatcaaattgctaaaagttgcttgtgttattaatattagcaaataaccccttatgatgcctttttttttcattacaatcccctaaatggcgagttgtagggggcaatttgctaaaataattggattatagggaggtgtttgataatattaataacatgaggacttttttaacagttagagtcaacaaaagggtgttgaatgcaataaaacaaattttctttttaataatattacattacttcaaaaaataattatagtacgtttttgtagaagattgttagccctatacaaaaacacacaaacacacacccatgtgcgtgtgtgtatccgaatcaacgcatatctttacgcacattcaccacgtgcaacatataaataattgacgatccatttatgcttttcttttctatatatatatcagg

SEQ ID NO: 101155 - DNA, 749 bp, Mimulus guttatus
  Intron number 1 from transcript mgv1a008433m (locus mgv1a0 08433m.g) derived from phytozome v7.0 (chr-ID scaffold_12; pos 815123 to 815871)
tttatttgatcggaactgcccacgtttctacggtaattatttcatccattttggccgtcttgtttctgttgattttattgccttttttgggggaatttgattctcgatctttttgctcaattgctcatttttctcttgatttttttctcttttttgggtttttgaggtcttattgaaagttcaattgttgaatttcgacatgcgagattactgatctttttactttatcaatcaaactttatatctctgacatggtagagtaggatttttttagggttttacagtgttgtggtagaaatttgggagaatgaagacaatgttgaagtacattaagttattgtagtcagaggaggtgaagcaaatcggttgataatggtgacaattgtaattttgattaaaaattttatgttcagatttgtaggattaaggtggtcaagtgatttaatatgaacaaactttagtggagaagttgatttattttattttacaaatggattcttgatgattgttatgttcttacttctcttggaaaatacagaaaaagttcaatcaatttctaattgaatttaaagcttttagttatctttcttctttctggaatgctgggaatatcattttggtttcccatgtatcgctacccatgtaaaatattaatagaaacaaaaaatgtacttatattaacactgttgattaaattattatatttatttgcaggaatcttgccaagaagttcaagctgtgattgaatt

SEQ ID NO: 101156 - DNA, 562 bp, Mimulus guttatus
  Intron number 1 from transcript mgv1a012479m (locus mgv1a0 12479m.g) derived from phytozome v7.0 (chr-ID scaffold_79; pos 727022 to 727583 reverse strand)
gtgaggttattcagcagtagtttccagaatccagagttagtaatatttatcttttgatttctatccgtttctacactcaattctctgtttacgtttcacagtattcaattatgttctgttatatatgcataaatttgttagggttgtttcatttgaattttgaactgaaacctacaggtaatatcgtacgaggaaaataaattaagtcgtttttctatttttgtttgttttggccatgattgcatttttcttaggcgccgccataattaccatttcttcaatgtatttttttggttttggtagggcttcctcgtggtgttttgttgaagcatattagcagaacatgttgttgagaattaatttttggtgcttcaaaattttttgttaaaagattatatcatgtttggctcgtcattacgatccagtattacaatttacacacaagtttgtcaaagtacagtttaaatactgcaaaccacaatttaatgtaattttttgttcaattttatgctcttatgtggagagtatttgacttgaatggctactgcagctacttgatcac

SEQ ID NO: 101157 - DNA, 656 bp, Mimulus guttatus
  Intron number 1 from transcript mgv1a013179m (locus mgv1a0 13179m.g) derived from phytozome v7.0 (chr-ID scaffold_92; pos 907558 to 908213)
atttcataatctgaaaacggatttacaaggcaggtaggtactcttctttcttgggttcttcaattcgaagccgttgaattcggataagtaccttctgattatgctttgttgaatttggtatgaataaaataagctgatacaattatttttgcattttatcctctcccattggttgactttgtttatttcatcaaacttctgaatttattttggattgcccattgcagatttttgcaaaaaaaacaagagactggtttgcttcgattttgccctaaattgtttcctattatatatagcattggggaaataggtcaaacaatgtatagctaaacatctgttttcttctgatatttgctgtctatgtgtttaactccatttatatataaacaagtaatattagagatatcgtaaaatttagtttagatatggggcaaacgttgctgttcaatttccttacagataaaaacatgtctgtgtctgtcctcattggaattccggttttccggtttcgagttttcgggtttttttttttttattattattatatatatttgatctttgtatgatgcttcttcgttgaaaagttatgcaagagctttcggtggatgaatcttgaaatgtcagtctttaacatccgatatgatcgttcagggaaa

SEQ ID NO: 101158 - DNA, 367 bp, Mimulus guttatus
  Intron number 1 from transcript mgv1a012915m (locus mgv1a0 12915m.g) derived from phytozome v7.0 (chr-ID scaffold_233 ; pos 150599 to 150965 reverse strand)
tgtctacgaggtttgtttcttgtctcaattacttgtttataatttccattttgtctgcttcctatgttacttttgttgttttgcttggccgaattgcagttgtttgtattaggattatggatttggggatttttataattgtcgcctaattgtttgataaaattacaaattgaaaaaatgatttattgcttaattaccttatatatagtacaacgtctttaatttgatgtgtaagagctaagaattttcagttttgatttagtctggatgattattttcttgtctgtgttctgttactgctgcaagaaagatatattggggttgagatttgagaagacactcattagtttttctgattctgcagaaa

SEQ ID NO: 101159 - DNA, 981 bp, Mimulus guttatus
  Intron number 1 from transcript mgv11b008070m (locus mgv11 b008070m.g) derived from phytozome v7.0 (chr-ID scaffold_6 89; pos 7486 to 8466 reverse strand)
aattacaagactgccatcactctatttctcaacaggtcttttttcttgtctcctttactgttcgaaatgaatttcgatttcgtgttttttatcagtggattaatgcttagaattgaaaactgtcggtgggattgaagctgtgtgtaaattacccagtctgaaatttattgtaaaattcatttgaatctgcagtcgacactggataggcaaatatcagattgatgaaataaaaaaaaaaaaaaaaattgatttggggatgatgatacagtgccaaaaaatacaataattgtttgccttttggtgttgattttagtgagatgttgaatgtaaaatcatacaagtacagttttttagtgaagtatgttcagttgactttgtggaagatgaactgtgaaacagtgaaactagattttggttagctaatatgttttcgatcacactcgagccgataattaactgctcgtgattgacgaaatttgcatctccctttttaaggaaaaattagttgatcatggttacatgggctcgatagttgctacatagctttcatcgatcaagacgagctatttgtttttatgcagctctttggcctgcaaatttgttttcaccaaatgctgtatcatttcttttttttacggttttctattgttctagtgaatccgttttcttcctatctttgtgttttacttctcgttttcgtatttattctttcgaagaatttcctatgtatcatattgctcctgtctttccgacaaatttgaatgtaaagtatttagagtcctctactttagtttgcacgtattaggtaacgagtatatgatctgaaatttgatatattatcttttccttactcacaactagactataaattttcccgtctagaaagacaaacaaacattgctgaattcattctctcaatttgtttgttcattttttccccaatcagagtgagaaagaagagagagagagagagagatccga

SEQ ID NO: 101160 - DNA, 964 bp, Mimulus guttatus
  Intron number 1 from transcript mgv1a019811m (locus mgv1a0 19811m.g) derived from phytozome v7.0 (chr-ID scaffold_58; pos 1189610 to 1190573 reverse strand)
tatgtgagttatcgtttaccttgaaatttagttgtgtagaaattggagcacctatatctttgatgattaaattttttcctttgttgaagatcacaagcatgcaaagatacccttgcagatgttaaacaccgttaaaaccaaatcgtgcccgtagaactgaatatctctctctccaactggaaattgtgatctttagatattcataatagacatctgcttcttatgtttccattttgtgtatttatcacaactagaagttatataaatatcagaagaattgtggcaacatatctgcaactttcgtttgaatgaggactttaaaggttattggagttatcatttatcagaacatgtgtgctgtatacgctcactgctccaattttcaaattaattcattacttcaccgttcagagctagaggccatttttggagttctgctctagaatttgaactagtatatttgctgtaatcgcttcacctgtttgctatgaccatcccaaatatttggattagcatcttttactgcccacaagtttctactattgttatctgcaagatagattttcattcgtgattatttatatgttttgttgccaaaactgttttaaccaatgatctgtcctatttttttttattttttttttttttttttttaattattattttatgtattatatcattctagtggttttaatgaagatctctgtaggaatttgatgactttgatgacaatgctagcaaagtagacactgcgagtcatcaagataacagggaaggctgcattaaagaaaaagaaataaagaaatcacatgtaaaaatgaaatcaacaaggctatcgaaggaggagagacttcgtttaatggaagaaaagaaacagttcaaagaagtaaggacacaaaacgacatatttgatgacaaagctagtaaagtagacactgcaagtcaaatctcgagtcatcaagat

SEQ ID NO: 101161 - DNA, 541 bp, Mimulus guttatus
  Intron number 1 from transcript mgv1a000396m (locus mgv1a0 00396m.g) derived from phytozome v7.0 (chr-ID scaffold_3; pos 2674640 to 2675180 reverse strand)
cgcatttctcattttctctcacgagaattcgcattgtaagtggttatggtaatttctggagtttttttatttttgagtttttattttttttattttatggtgatttttggcacaaacttcgagagcaattgaatcagttctgtagatatttttttttttggaaattgagttgtgttctgcattggggatttatgacgagttaattctcccaaattagggttttaacactgcgtttcgctgctgaaaaacaaaactcgattcacaaattctagttcaaaatcaagttctcttttgtttgttcttcttcgtgaagaaatttggtatgcttaaagcttcgatttctccgttgattaattatctatatctgttcggtgcgcatgtgttttgggttgtgcgccaagtgttttgggttgtgcgccaggtgtttgtttatatgtcccaaaagcaagaagtaaaggaattttttatttaatttacttttttcttgagatatttgaaatttggatttggaatatgtttgggaacaggtgaaatttctcaa

SEQ ID NO: 101162 - DNA, 860 bp, Mimulus guttatus
  Intron number 1 from transcript mgv1a026000m (locus mgv1a0 26000m.g) derived from phytozome v7.0 (chr-ID scaffold_3; pos 4286743 to 4287602)
tagatccgtttattgcgaccagtgccgtgtcgttggtgagttctcaacaccgagtcagccgcctaactcggtctttttattattttttttttgtaattctaatttcccaaaaaatattggtaaatattttaaagaaattgacctccttttgtttttaagttttaggatctttatggaggatgcgttgttattatcttctaggaatttaaaaaaaaaaaaatctaacccatattttggtgttgacaaatattttaccaaaatatcccgcagtattagtgtcctatgtgagtttattttaaaaattgttttttttaattttatttaatacgagaattctgaggaaagccatgttgatatccgatatttccaaagctggaagtgggactgatctatctaatcttgtgataggtgtaacgttaaactcaattcgttggacccaaatcaaaggagagctaaatttgaaaataagaaaatatatatataattaaataaattaattaattaattggaaatttacaagtgggccactctgtcatgtgatatttgttgactattttttgattttccggaactaccctcaactataaaaatttcattaaatttgagcagtagtccacgtggttgctaggaggggttaaaatgtcttttggtaattgacttatgttatccacaaattagtcctgacgtggaatagcgtgttataatgcttagactttttgtaattattacgcgattccttttttttttttttttttttttttattccttctttcaatcctggctgaggttaaattttgggggttaattacaattaaccttgacctaatttactcattgtttatggaatctgaatgaatagg

SEQ ID NO: 101163 - DNA, 574 bp, Mimulus guttatus
  Intron number 1 from transcript mgv1a004219m (locus mgv1a0 04219m.g) derived from phytozome v7.0 (chr-ID scaffold_196 ; pos 527159 to 527732 reverse strand)
actgagctgctcactaggtatattacctaattctggattttttttgggatgttattgtatagataaagtaatttgggtgctataaagtaattattgatattcagttgttttatcgacggctctgataccaattgaaacgaccttttttaatgatagataaaccggatcgggtcgggggcgattgggattgaaaaccacccgaaaccttctccacacgaactcagatgaagatacagaggaagaaaaaccaacatacatcaaaacatttcatttctcgtctccttgtattggggaagatgattccccatttatacattttaattcataaagtgctactagaaataaagtgctactacctctacgacaacttataaaagtgttaaacctattatttaaataaaatgctatttgacttaaagaagtgctacacccctttttacgtttctttgttcccttcaattttggatcgttacaatatctgtacttttcttcatgaatcttgctataagaaaactcgtatattagagtgaagatcgccaattcattcgattttcttgcttatgttggggcagat

SEQ ID NO: 101164 - DNA, 745 bp, Mimulus guttatus
  Intron number 1 from transcript mgv1a006672m (locus mgv1a0 06672m.g) derived from phytozome v7.0 (chr-ID scaffold_8; pos 3089506 to 3090250 reverse strand)
gatccaaacgaagttcttcttccccttcaccaaaggtttgatttttatttatttttttaatttttttctgcaactccatttccgttatttaaagtttctgtagtaatcccttttgaggttttgttttatttcttgtcattttactgtctgaaattaacaagggcttctgttttctcatggcaattttttttttaaatttggattttgattcttgaaaagcttgcatatttatatgctctgtagccccttgtgatatatattatgtctggttaatatattttatgggcttttggaatgtgtgatattgtttatagggtccttgttgcaaaaatctgattaatttgaggctggatctcaaaaatggatgatagcctctatctaaattgtaatagatcaggcaaaaatttaaaataactttttttttgttgccacctgagattttgttctctcccttgcgattaattgttcgatttgtgtctatgaatcttgattgatgcttatacggaggatcgaaaacatggctgtcgtcttttacattgtttgtggatcaaaatagaaagatgcatcccagctatttgtctaagcaagatcctttgtagcctgagtaatcgatcgctcgattttgttgacgagacaaatcttgcttattaatcgatagttatatataatatatgtgtatgtatctaacttttgatctgtttaaatttcagaatcaccgatatctttgggttgatatccaagtgcc

SEQ ID NO: 101165 - DNA, 650 bp, Mimulus guttatus
  Intron number 3 from transcript mgv1a003273m (locus mgv1a0 03273m.g) derived from phytozome v7.0 (chr-ID scaffold_351 ; pos 97336 to 97985 reverse strand)
cgaggtaattgtatagtttgtctggtctactagtaatcgaattgaatttagctgcttaaatggcttttgttttgaactgtgatttgtgcggattcagttttcgtccatagctgtcccgtaaaattgtagtctgtattttgaggtttttgaagaggcttatttaattctatcctggtatggtttaattttcttcatttacgataaaaatattcttagctttcagaagtacttggattttctctgttttgagaatccactcttttaatatatctcgagaagaggctcagtttttctaagtaaattacattcatcttctcattgatatatatatatatatatatatatatatatatatatatatatatatataacagcttccatgtgagacctcactatttgtcgtccagaagtgagaatggctttaatgactagacttccgttagttaatgagcatgctatatagaagggtcaccttacagtacttatttgtcacttcttaaaccgagcagtgaaaatatgcaaatgtctttctcgtattcgctctagactggtatttgtctttaatctttacaatatgtcgaataattttggatatacccatcttttaactcccaggcaataagttctccgagcgatcttttcgtgattcc

SEQ ID NO: 101166 - DNA, 372 bp, Mimulus guttatus
  Intron number 2 from transcript mgv1a010046m (locus mgv1a0 10046m.g) derived from phytozome v7.0 (chr-ID scaffold_206 ; pos 300072 to 300443)
atctctccgaacactttactaatatttctggtatgatgattatgtatatattttttttaatccttattttcttctttaattattgctactattttgttttttcgtagataaataaaaccatatacaaattaataataaataattttggttgggttttagttttggttaataatataaaattgggtggtttgaacgaagaaatattcaaaggttttattttaactaatcccttgactagtggggtggcatgtgattaggggtatctgttttgacttttgactagggattaatgtaatttaattttgattattttaatttaattttgttaattattaattaattaatgcagaaaagagagaaaataagaaaaga

SEQ ID NO: 101167 - DNA, 380 bp, Mimulus guttatus
  Intron number 3 from transcript mgv1a010046m (locus mgv1a0 10046m.g) derived from phytozome v7.0 (chr-ID scaffold_206 ; pos 300546 to 300925)
tgtaaggtatgtcacttttttttttttactttgcccgtttctgcactttgtcaccttaataaaataaaaaaaattatacagccaaactaaaaccaattattttaactcacttaacaaaatagagagaatattctgatgaatcttcaaaattttcattgcatgtgaattgcacatgccctagtgtaatggttttttcgtcttttcaactcaaaataatactagtaatatgcaccgagaacgtggtttactttgtacatatttagatttgcggctttatttataaaataaaaataatagaaatatcatttatgacgtcataaagtacaactttttcaacttgtgatgtaaaaaaattgtttgtataattacgcagattgctg

SEQ ID NO: 101168 - DNA, 753 bp, Mimulus guttatus
  Intron number 2 from transcript mgv1a009306m (locus mgv1a0 09306m.g) derived from phytozome v7.0 (chr-ID scaffold_56; pos 1062399 to 1063151 reverse strand)
acagaatcgatacacgacttcccattgaagtcacggttagccccttttatctctgttttgccatttccgaactctgctaaaaacggctcttacattagctgcactgacatggactagctttctcaattttatttatttattctaatcgaacttggagaagtgaatcaatctcggtgaacgattcgatcctcaaagaaaatggatatgcaagataatagttactgtcttaccgatggggccgttttgtttcttattgtatctatgccttgtatttatttatatatatattgtatccatctttcctcgggttaaaaatatttatgatatcgtcaaactaaaaatctgcaatggtttctgatttttactaaaagatatccgcgaggaatccaatataacacccactgcaataataaattaaacccagcttttataatgtttgaaatgtcatgtaaacccttacaaattttcagtgattcgtagttgtcagcatttttattagttttgtttagcatatataattgaccatagtattgttgaaacttgaaagtctgaacttatgcagagttctttcacaaagtcggtagatattaaccgatttctcaattttcagatgatacggttcgcttctaatttctgttatccggtgaaaaggaaagagtgtagagagtgagagagagagatgagattaacaagaagaatcttgcatgttggttgtacttattttgatattattattttatttatgcatgcaag

SEQ ID NO: 101169 - DNA, 509 bp, Mimulus guttatus
  Intron number 1 from transcript mgv1a009306m (locus mgv1a0 09306m.g) derived from phytozome v7.0 (chr-ID scaffold_56; pos 1063308 to 1063816 reverse strand)
aattcctcctctccgtttttctctactttctatattcccccaattatcaatttttttattgatcggaacgtgtttgtgtttatgtctgtgtgactgtgtcagtgtatatatatgttcactcaaatctatctttaatatatatactcattaattatacctgctttttttttttttttttttgtatccttatattagaaatactcttcttttatttgtgaatttgtttttctgctgactggaagaaactgatatactccatcaaattagtagtttcttttttttcttttcttttctttcttttttttttttttttttttttttgtgatatggaaaatatgaaatgtttgaaggcaagcatcatttttacaacttacaagctggtattttgcttctactttttttttttctttcttttgttcgtgttgatctttgtttgttggtgagtaagtgattgtgtgtgcaatgagtaaatatgtgtgattgtggagtttttgtgtaggctttgaaag

SEQ ID NO: 101170 - DNA, 609 bp, Mimulus guttatus
  Intron number 3 from transcript mgv1a014381m (locus mgv1a0 14381m.g) derived from phytozome v7.0 (chr-ID scaffold_100 ; pos 140975 to 141583 reverse strand)
aggttattctatttagttacataaagaaaaatgttacaagttttgattaggaatttgttgaggagctgaagtgccagttcatttttagtatgtgaaatttgagatttttaggcatagaaactacacgaggcttataatgtagtgccggcttgacatcttaattttatgaaagcagcattcatattgtgtaatgctggaaccggagaacctcttacctgtgatttttctccggcccgaagaaaaggttctgtttcttaaaatataagtcttttttctcttaaaaaaacatactcacttatgatacgatacttttaattcttgaccgctacttttaagtgtttatgaataagaataaataaaacttctactttccatgtgggttcagttgtaggccaaatgcaagggataatttttttttaaaccctctagatccgtacgtgggacggagggagtaataaaacagctgcgatgttgtacccctttttattgggaagcacgattgatctagggtctcttagtgctgaagaatattatttattattactgtcaattgacttttcttacactgtcactttttgtttgttcaggctattgaaaagctcaaatcca

SEQ ID NO: 101171 - DNA, 589 bp, Mimulus guttatus
  Intron number 3 from transcript mgv1a003152m (locus mgv1a0 03152m.g) derived from phytozome v7.0 (chr-ID scaffold_7; pos 328262 to 328850 reverse strand)
caagatcctaaggtgatgtcatgtaagaaactaggatagtttatgagaacaataaaaataatttgaagaatacaaggacaaaccaagattgtaaaaacaaatgcatttttcttgaaactgtagtgatttatgctggtaatacagagttaataggacttgcgtaaggttacgattttcaagtttttaaaactttaatgtttccctttttctcgttatccttgtcagttatcttgaattaaatttcaccactctcttgctttagctattccggaatgtacagttcctttatcttcattagcaacccgttattcttggtgaaatcaggtctggacagatgattttagctcgagtaacctaagaaatattttatgacttagaccttgttgcttagtttgagttacacagctaacctaggcttccatcgttttcactttcattgatgtgcaacttctattttgttctttttacatgtgcaaccattaagttgcctgtctattccgcataacggtttctgcttgtgaatagctgttcatattcaagtttggagattcgaacgaggcactaatgattttctccaaaacaggtcaag

SEQ ID NO: 101172 - DNA, 893 bp, Mimulus guttatus
  Intron number 1 from transcript mgv1a013515m (locus mgv1a0 13515m.g) derived from phytozome v7.0 (chr-ID scaffold_220 ; pos 175906 to 176798)
gcagccttgccaattgccgtaacagtaagtttccttaatttaattttaacacatgatttataatataattaattaatttgagttatgatgtttctattttgttgtttattactccatgttccacaataattgtctctttttaaaaatattttcattccatattatctgtcactttagatttccaatactgtattaaatgcattttttcctgttttaaccttagtaattcaactagaagtattaactctctcttatcacatcattaaataatgaaggttattttagtctttataatatattttacctaaaatcaagatacatttattcaacttcttaatccttgtgcaaagccaacaacgatatttaatagggaacggagggagtattatttatctgttagtctatatttgtagggtttgataatgcatacaagtcaaccttgtcttgtagcccatggatttatttctttaacttcaaaccactgagaataaatagcatgtgtgtattatcatataagtcaaatgtcatcttgtatgagtcttctgcatggatagggacatttaatttcatgatatatatataatatttgtttatattttgggtaccgaaaatattgtaacagtatcatataattaatttgaagttgttagagaaaacgtattttagaaaaggaatttgaaaaataaaataatatgttttttcaataaatgtatatttttagtatataatttagaatcattattgaaaagtttaacaaatatatttttatttagggaaagtgtgttaagaaaaaaaaaaatttgatctaagattgcattagacatactaacatgcgcactatgggtgtgaaatttgcagggaaagctggtggcacttcatcaccttgtcattta

SEQ ID NO: 101173 - DNA, 412 bp, Mimulus guttatus
  Intron number 3 from transcript mgv1a024854m (locus mgv1a0 24854m.g) derived from phytozome v7.0 (chr-ID scaffold_2; pos 1380978 to 1381389)
atctcacttctggtaccactcctttaacacctaaggtactctttttgctcatacatattcctttggtgtctttgtcactttcgttgaaactttgaagttttctgtcattttacaagcagtgattattgtccatgactagtggtacatttatatttacgaactcaatcttgtgaactccagaaatatcttcgacgaaattgtttaccttttgcttgtcttgtttgtggaaacttagcaggcgtcttatttctttcttgatccagtcttttgcttattgatttggcctggatctgtggttactactttctttactgtgctttgtttggtttttttgacttttgatgtctgtttaagataaattaattcgtgtttacattttatttttatttttggatttttgggtttcaggtgt

SEQ ID NO: 101174 - DNA, 868 bp, Mimulus guttatus
  Intron number 2 from transcript mgv1a007242m (locus mgv1a0 07242m.g) derived from phytozome v7.0 (chr-ID scaffold_36; pos 1454854 to 1455721)
ccttccacttctgagacttcctctacctccgtaaagtattaatctatttatttatttaattttttttttgtactggcttcgtgtattggtttgagaatctgcttgtgcttacgttttgtttggtatgaagcaatttttggaagagtttgagttacttactttaaatgtttcggtgtatggatccgaagtcactagtaattcttattgatgccaagactgcttgtcatttttttggattaatatttgtagacttgtgcttttgacgaatcctggtgtttgtggaatctcgattcagtttgaaagttggagaagattagcaaatgtgataattatctgatggttgaagtttaatttaacacagccttatttgtagtcattttgattagcagtcattgaccttctattcaccatttcactggctgaaatgcccgctgtaggccttacgagcttccttaatgttacagtcagtattctgctatatgtccgagtgtgaggccatgcattgtttgtaggtaccgagattgatccaaacctgaatagcttgttctcattctggcaataaaatcctattactcttaattagtggacagagataaatccatctacatgacggtgtatgttgcttaatagttatggaagtttatgacacatgcacgaaccatatgccaagcggcttgttattatgtttgttaaataataataatacatgtcagaattgatgcttgttttgtttttctaaaggggaaaaaagggaattacatcattgcattgccttatacttacatcaaaattatttgataaaacctgataatatttggtttcttcttttataggaagagaatagtctctggtgtccagcccacaggat

SEQ ID NO: 101175 - DNA, 859 bp, Mimulus guttatus
  Intron number 4 from transcript mgv1a014042m (locus mgv1a0 14042m.g) derived from phytozome v7.0 (chr-ID scaffold_121 ; pos 186606 to 187464)
cggttcaagcacaagaaaaggagaaattgcatttagtacgtcttcttgttttgctcttggctttttattcttttatctcgccttcttggaaaagtttgattaattgtggggcaaaatggtaaattgcattcacattcgtacttgatgattttcgatttcgcaagacttgcaagtcttgactgaagattttcgtcgagctttttctgtaggaaggttcaatttgttaatggcatgaaaggagggttattaagttcattattttgctttgtcatatcaatattttgttgacgggtttattgcaattagtacccctgtgctgtatcgaatttctaaaaaaccacccccatgattcaattttgtttttagcgcacacccccctgaatgggggtactaattgctaaaaaaagattcataggggcacttttgccaaaaaaaaaatatggggtagttttatagcaatacgacataacacaggggtaataattgcaataaactcatatgttgaatcgtttgttttcaggcatgcaaaaaggtaatgaagcttttttttttaaatgggtagaggcatttcttcgtaatcgaagaacatgttagtgataatcaagatatatatatttttttaaatgatcgcgtgcgtatagtttaataggatattagaattatattgggaaaaaaaagacatctttcagcgaatgcgtagtaatatttaaagatgatctccgatttagaagttccgtgttactaatcatgtttattcattatatatatattaaaaaaaaaaaaaaaagaactaatgattattcggtgctgcattttgttttcagacagccacaattcaagtgctgaagaaatcgggtcg

SEQ ID NO: 101176 - DNA, 324 bp, Mimulus guttatus
  Intron number 2 from transcript mgv1a014307m (locus mgv1a0 14307m.g) derived from phytozome v7.0 (chr-ID scaffold_2; pos 4050615 to 4050938)
tcttctgcccaagctcaagaaatctgctaattggggtaatgcttcttttcttactttatgaatcagccatttttatttatttttttgttattacaacaactgtgtatgtgtaatttgatcttcttgaaatgattgcatgtgtgtgtgttcaactatggtgtttgcagtacaatccaaatttcttgctagatacaagaatgaagaaacattaatattaacaaaagacacgagtaaattggatcgttcgtcctttttcgtttaatctcgtctgtttcgtcgtcaaattgtctaatttcaatttgatgggattttgttttaatgcag

SEQ ID NO: 101177 - DNA, 944 bp, Mimulus guttatus
  Intron number 1 from transcript mgv1a016572m (locus mgv1a0 15156m.g) derived from phytozome v7.0 (chr-ID scaffold_27; pos 213238 to 214181)
actagtggcaatcgaggcaaattttgagatttgaggtaaatatttgtgtttaattttatttatatttttttgtttgaagcttcgaattgttaaaagaagcaccaccgcacacggcggcgcactagctgacttcacgtgatgcgtcactgtgtgatcatatgtcacaaaattgattactctggaactgtggattcaccattttttttgtctagggtttaagaaatatttaggtaaccttaaaatgcctacccgaactttgggtatccgacccgacccgcttgattgttcgactacccgaaccgcctatgtgatttcatagctagcttcaactgataaaccataatgcaactctccagaagtggaagacattattcagtaattggtttgcagatagtgagataatgtttttacagttagatatagatcagtgcgaagtgcaaatatatatacatatatgtacatataagttaacttattttactgaaggtgttacgtttcagaaacagggaaactcatcgccccagctgtttccatgctacctagcttatagtcattgttgcttctgcggttttcgctgtagcatatttgttatgttgcgtacaatgtacatatgtttagtttgtgatggtgttttatatttcaaattatattttcgttgtcattttatcctggtagattaagaatatctcgttaacggcacatttgagcgttttccagttttggaagcacgaggcatctcgctactatattttttgttcttactttggggatttcgcgtttctaggatttcattgccttgcatttttcttttccaagccgatatcctagaatctaactaggtgtgtgtttgatgtgctaatttttttcaaatttagtttcctgatcaactttttgttgtgtatgtaacagttattgcattgtctctcaaagagtttttatcttaa

SEQ ID NO: 101178 - DNA, 573 bp, Mimulus guttatus
  Intron number 1 from transcript mgv1a005070m (locus mgv1a0 05070m.g) derived from phytozome v7.0 (chr-ID scaffold_7; pos 1335389 to 1335961)
tcgatagtctccccactgggtaaattcaaatcgattttttttcgatcttttttgttattttatttatgatgattgaattgtgattgtttgttgagaatgtgggggataatgtagatcttgatatttttctggaaaagggaatttggagcagttttgagttgttcagctgattcgaattgagttggaaattgtttattgttgaattggtaattgcagaggaaatttgagtgctcgtgtttttcgttttttggaatttttgatttgctatagtatggggttcaattccagctgcaagagattacgataagttactgaagtggatttaatgaagtgtagtttgttgtcataataaaatccaagctccagctaacaaaaaattaggtttctttattgaactttatgcagtggtttatggtgcagttgattctttcactttaatcatcgatggaacaataaataaaattcatagtaatttacaatgtatgttcgctaagcatgatctgcttttgcttcttcctatcttgattgtaactaaaacaattttttgtattcgcgttttattctgtcttagca

SEQ ID NO: 101179 - DNA, 1037 bp, Mimulus guttatus
  Intron number 1 from transcript mgv1a010098m (locus mgv1a0 10098m.g) derived from phytozome v7.0 (chr-ID scaffold_19; pos 406815 to 407851)
gctcctttaagtactgaagatccaggaacctccaggtatttttgctttctcttgtgaaactactttgaagttgttatctctcatgtattgttcttttattttctttttagtaaatttagtaatcacgaagattgaaaaatggcacgaattttcgtatgctttgatttgttggatcttctatctgattattgcttcaatactttgcctattgatctgaaactctgttgaattcaatgcttgaagatcctagtatgtattacacgaggcggaatccttacgagaaattctttacccgtgagatagagcatgtcacattttattctgcattacacctctatctcaaattgaagagaaatttcctaaatttcacctgtcaagtaatgatcatgactgtagcatattgcagagcatttgccactgtgctaaaagctatagtttataagaacggtgcaattcgaatgtaaattgtacaataaccgaaaattcatgttttggctatggtcccatcttaacggcaatggctgcttcacaggcaaataattctatataggctggtgctatcatgcaatacaataatcccctacccggaaaacgaaaattgaaaccatgacctttgttcttataccaattgttggatcgagcaattgcaaaactatagcagattgccgtgcaactcaaatattttaagagtgcagcagccaagctcaaaatttcaattttaatcccatcatggtgcaatttttgctgcataggctaacaattcccacgagggttattgctgtgtgcagcacatgtatcacttacgtcacatttcttaatccacttgaaagaagttggttagatgtaaagacgagaaaataatcaggctagaataaacgaagaagaagaagaatagatatagagaatttattgaataacagtttcattttcagagtctaaccaaagattcctaatttactgatataatcaaagacacccatttctgaggtattcctttgttacaataggggtacagttgcagtaggtttaccaccagc

SEQ ID NO: 101180 - DNA, 710 bp, Mimulus guttatus
  Intron number 2 from transcript mgv1a017030m (locus mgv1a0 17030m.g) derived from phytozome v7.0 (chr-ID scaffold_4; pos 2440457 to 2441166)
atcaacgagaacaaactcctctccaagaaaaataggtccgtaaatctccccctttttctctgcttgtaattatactgagggagaaagaaccttctttttccttttatcatttattgaataattaattatttataggtttgaggttcataatcatgcatgtagattgcgagatgcaaacttagttttatgaggtgcaaaattgaaattacaagtattttgttgtttttcttcccttttgggcaattgatttgatctttaatttgggcatttgggccaattttgtttacatgtctgtgaatgtttatgttgtttgttgttgtttatgccctaggaaagaaattgggatagcttgaattttccgtaaattcgtagctgcagttgtttctattattagtttttcactttgtccattgcttcgatactagaccgactctttgtagaaagctcgtattttattttatattatgatttcccttctgtttggtttttcatacagacgtttttttttttttttttttgtatttcttatccatttatgctgtaaataatatgattgggtttccgggtgtcccctagtgggtattttagtgtcgaattcccgagtggtttctcttagtaatttctttatttgtgaatgatgttcttgttataaatttgatatgtgctatgccttgtatctaataagtaatttgaaatcggttgctttgcag

SEQ ID NO: 101181 - DNA, 546 bp, Mimulus guttatus
  Intron number 1 from transcript mgv1a010034m (locus mgv1a0 10034m.g) derived from phytozome v7.0 (chr-ID scaffold_89; pos 619941 to 620486 reverse strand)
gggttccttccttcttcctctccgattacattgatgtgagtttattttattcattattttataatttcaaaattatcatctcatacctaatcatctgattcattccctttgacaatttgactcatacttcttaatttctctgtatgatttgaatgttcttttttggggcttgttaaagctttaaaatgtaaaaaaacccctaaaacaattctaaaatttttatgtttcatgaattccagcatgatttgaccgttacagtaaaaaaaaaaatgtcttgatttctttttcaaactcatcttctaaatacatttttttccaacatgattttgtcagcttccagtgtttttccatctcgtccaaaaaaaatcgataaatgaaaattactttcattctcaaattattatgtcaaaacatatttccccaaataaataaataataaatccctaaaacggctccaaaacattctttagcatctagacaagaattttcaagatggtttttgtgaatgatgttttttgttacatggacaggttttctgtacagatc

SEQ ID NO: 101182 - DNA, 488 bp, Mimulus guttatus
  Intron number 1 from transcript mgv1a024522m (locus mgv1a0 24522m.g) derived from phytozome v7.0 (chr-ID scaffold_105 ; pos 781205 to 781692)
gtaagtgactaagtgcttttgaattgacaacatgcgaatgtttaagaattttcattataattagagtaaaaagcagtttgccccctaaacaaatggccgtttcgcactttgccccccaaacaaaaaaattttgcacgtttttacctaaacttcggtttttgttgcacggtgcctcaaaattggaatattccggccattttgaccggaatcttacacacgtgcttttcacgtgagttttaaaggggcaaaatagtctattcacttacattcttcataaattaaaaaaaaaaaaaaaagaaaaaaaaaaagaaagaaagaaaaagaagaagaagacggttggaaaatgtgcaattggagacagaacatgtcaacacattcgacgagctggaggaggaagtactctccgccgtcagatccagattccacaccgtctacacgatcggccccctctagcttctcgagaaggagatttacggcggcggcggcga

SEQ ID NO: 101183 - DNA, 547 bp, Mimulus guttatus
  Intron number 2 from transcript mgv1a001632m (locus mgv1a0 01632m.g) derived from phytozome v7.0 (chr-ID scaffold_143 ; pos 351313 to 351859)
tgccagaagctgtacaaaggctgtaagaaatacacgtgagtgcatttttgctcttgctatatataaagtgtttacatcttgggagttgtgtacgatgttgtctaatttgtgaactcaatgtactgttaattgttcttgtcagaaacttcatccagttgttgtgaatttgggattttggatgaggttcaattgtgacctagtttatcaatgggttgattgatgcaactcgtataattgatttgaatgattgtatcaatctacgaactaggttttcgactttttgatttaagctttcgctttcccatatagtagcattacaagtataattttaacagatcttttgaaatggatcagaaattcgtctttccgatgcattgtatgaatcagtgctcgtctaaattagtggtcaatgaatgtagtaataacattatgtttatataaaaactcgatatttgattaattaattggtcacaagtaacaacatacgcatttgattttggggtttttacggtacagggaagggcttggggacgcgttgaattgtgac

SEQ ID NO: 101184 - DNA, 878 bp, Mimulus guttatus
  Intron number 1 from transcript mgv1a011956m (locus mgv1a0 11956m.g) derived from phytozome v7.0 (chr-ID scaffold_721 ; pos 33687 to 34564)
ctcaaaagcccggcccgcacaacaaaggtcagtttactatgtatggagagtataatccgttatattatgttatttttatatgcaaaaataaggtcctaattatatatacagaagaaggtgactagtaagtagagatctttcacacacaccaaaaacaattaaagattcaatttttatgttatttttatgcaaaattaaggtcctaactatatgtatacagaacaaggttactagtaagtagatatccttcacacaaaagaaaagagaaaaaatcaattaaagattcaatttttatgttatttatatgcaaaattaaggtcctaactatatatatatacagaacaaggttactagcaagtacaaagtagagatctttttctcacatacaaaaaaaaaaaaaacaattaaagattcaatttttatgttatttgtatgcaaacttaaggtcctgactatatatacagaacaaggtgactagtaagtagagatctttcacacaaaaaataaaaaacaaatcaattaaagattcaatttttatgttatttgtatgcaaaattaagttcctaactatatatacagaagaaggttactagtaagtagagatctttcacacaaaaaaaatataataattaattaattaaagattcaatttttatggttaaatagtgagtaaatcaaaatctagaccccaaataaaatatttttcgtcttttttggcaaatctatatgaattcccatgtagtgtgtgtgtgtgtgtgtgtggaagttgaaacatggtatgatataattggtgtgtcaaaagcaaatataattaaaagaaaaaggacttgatggaaaatgtaggaaaaaaagaaaaggaagagaagggcaaagaaagg

SEQ ID NO: 101185 - DNA, 942 bp, Mimulus guttatus
  Intron number 1 from transcript mgv1a008644m (locus mgv1a0 08644m.g) derived from phytozome v7.0 (chr-ID scaffold_25; pos 1358405 to 1359346)
tctccggcctcgacattctccgcgcactcgatcgtgtatctatctccatctctctcctcaattttaattttattttattttttgcagtttgttttattactgtacgatttttattgccttaattcagtcgaaggttttagttttgctttcatgacaccgttttaaaacccagaccttaattctcgatctattagtttatatgaaaactaggaaacagttataatgcaagggtgaacttcaaactcgcatagtatttagcagattttaattgataattcaaaaaggaaatcatgtcaaaatctgtatagagctcactggctggggtttaatttaattgttatctaagtaattagcactaacaagtgcgcgagaatcaatcacaaatcgagaagctaattataaatattggatttagctatagataaatctctataatgcattagagatgggaaatctcttagtccgtcttgaattaacccaagtcgaagagaaatttgttttccattctgcattaatcaagatgcaggagttggcatttttacttttactttttagacagaaaacactcgtttttttttgtctaggattataagtgttgtaaatggataggtgagtatcgaaactcgaaaggggtttagaattttgcggttttctcaaagcgagaatggttttgacgaagtcttggcctaggttttattcgttgcataacatgggacagggagtttgaggtggcagagatttcagtgttgatcgcagtcaagattcagtttttctacttcttattatattatatacacctttttgattgtttaggatgcgacaaaatgagtggatttgtagttagtagatagtgttaagttaaagtctacagaagacgacttccttgactattttgtttttccattaggttgacaaagaatcggtaattaactgggtcttatc

SEQ ID NO: 101186 - DNA, 542 bp, Mimulus guttatus
  Intron number 1 from transcript mgv1a023596m (locus mgv1a0 23596m.g) derived from phytozome v7.0 (chr-ID scaffold_242 ; pos 153991 to 154532)
gaggaatctcttcatctacactcatcacggtttctttctttctttctttattcttctttcccttttctccatttctgtaatcattttcgttaatgcattcctatttttcgggcacattttctttaaaatttgtcttttgtgtacaagattttcaaacccttcaattcaaatgcaccccccaagtgtttgtgaaaatgattcttccataattttagggtctatttggatggagggatttgatttcgggaatggatttgaaatgaatccaattttggagtcatttgaaatccaccactattgctccaaaaaacaactaaaaaagaggggtggggatttgaaatccatctccaaatccctcaatccaaacaagtccgggggatttgttattatggatctgaaatccctccatccaaatgcaccctaagtgttttcttggagagagagaacaaaaaatagctcccgaaggaaaatgaagctgatggtttttcattctacattgtatttcaggcatctacgtcggtgacaacaaagtggtgcacttc

SEQ ID NO: 101187 - DNA, 493 bp, Mimulus guttatus
  Intron number 1 from transcript mgv1a011549m (locus mgv1a0 11030m.g) derived from phytozome v7.0 (chr-ID scaffold_273 ; pos 135214 to 135706 reverse strand)
aggttcattctctctctctctctctctctctctctctctctctctctctctctctctctctctctattttatggcaatttcgtaattgttgtttttaattcagctggatttgttggttttttgatgcttgaattgtgatttagtagaattcgagccgaatatctcgactaatagtatgcgaataagtagacaattgattattattaaccgaattaggaattttttattttgttataattcagctggatttgttggtttttgaggcacattgtgattgaattgatgttttgagggttgtttgtgatttagtagaattcgcgccgaatatctcgactagtagtatgcgaattagtagacaattaattattaaccggaaaaaaaataccggattaggaatttttctctgttattcaaaacacgaacacgaacaccgagagtttcttctcgttcataattaataaacattcagattttctttaactacattgcagct

SEQ ID NO: 101188 - DNA, 993 bp, Mimulus guttatus
  Intron number 1 from transcript mgv1a012133m (locus mgv1a0 12133m.g) derived from phytozome v7.0 (chr-ID scaffold_2; pos 526529 to 527521)
gtcagcgaggttgagcgcgataacgaagtcaacaggtttttcctcttctatatgcatatataggtttccggtggaaaaacaaaattcttctaatttcttcaactgtgcttgtttctgcgctatattgatataaaaatcatgaaggtttttgcatcatgtaattgctgaaatatatatatttgaatgcgtgaaggaaatatatagaggtttgtaattgtatctagatatgattggaagtgaaacgaacgagtgattatgaggagaaatttctaaaaaggagaaatattgtggataatcctatcctaattgttcgagctgtgggtagtgggaatttaagctcaatttttatgtaggttaggttatttagcaggattcatttttttatttcatgccaaaatatgtcaatagaatccaatgtttaagatttcgactaaagggctgtaattgctcgttattgtggcttcatttcgtcatattcaatcttttttgaactttctgatagttgtgtattttacccttctatacaattactgaaataaggtaatgaaagtgcttgagcttttgagcttcatattttagatgtatgatgcaacggttatcttcatgaataaccagttgttactgtcattatctacagatgatccgcgaatcattaaggccttcgcaataaaagaatcattaagctgacagtctttgtaatataacatctgatgttagtttgtgttcagtatgagatgataaccgccccgtgcaatcatattacagaattcatgttagaagtgtgatacctaaacacaggaaccagtggactttctatgtgattatgtttggaacatatttttcttttgtttgagactcaagatttttatttaatgaacaaattgatgtgacgagtgattttatagtctgactcacgtgcaagcatccttaactactgatgatttactgcttgctgaatatccagtaacttttgtgctgctgtaggatcctttc

SEQ ID NO: 101189 - DNA, 881 bp, Mimulus guttatus
  Intron number 1 from transcript mgv1a023341m (locus mgv1a0 23341m.g) derived from phytozome v7.0 (chr-ID scaffold_29; pos 69036 to 69916)
atcaagaaaccaatttcagaccagcagtaagcgtttatttacatatttattattgtggacgtaaatagcacttaagcccctgtgattataagtttttgcagatgaactccctgtgcttgtaattttcgcttaaccatctgtgtcaagtgttgaagtaatttttttgcagatggccgttttgtgctttcattttccctttcattttttagatgacccccttgaaatttgacacacgctgttaagtttgacggaaaaactaacggaagctacccgtaaatcaataagaaaaccaagaagatatattttgaagataaaattgacataagtttacaagtattatttgattaaaattgactgtaaaaagccctattatatttgttctgcaatcttttgtagatggcactcttgtgctcgtaatatcagcacataaccccccctttgtagtttagatggggtaacttctgttactttttctgttagatttaactgtctgtttcaaacttcaagggggtcatctgcaaaaatgaaatggaaaatgtaagcacaagggggtcatatgcaaaaaaacaaaaattctgtaaagtttgacacaaacggttaagtttgacgaacaaactagcggaagctacccctcctaaaccacaaggggtttatgtgttgatattacgagcacaaagagattatctgcaaaagcttgtaaccacagggggtcaagtgctttttacagtcaattttaatcaaataatacttgtaaacttatgtcaattttatcttcaaaatatatcttcttggttttcttattgctaatacattaacaattaatcgcatcgcctttcgaaactctaggaacagaatttttccttcgacgaaaagaccggaaa

SEQ ID NO: 101190 - DNA, 603 bp, Mimulus guttatus
  Intron number 1 from transcript mgv1a008723m (locus mgv1a0 08723m.g) derived from phytozome v7.0 (chr-ID scaffold_104 ; pos 450322 to 450924 reverse strand)
tgggtcgacctcttatccagaccaatccgtacgaggttacgattttagctcttcagtttgtacctaccgatgtatttgcctattgcatctggtattttgctgttattctgagttaatgtttgaattgtggaaatttcggtgctcaacttcttcttttagggctagattttggttaagtctctgtattatttgctcggaggttttatttggcaagttttatgtggctattaacacttgacagggtaatttattgtttggggtttggtaattatggtttttggttggtaatttacagatttaggctaacaaaatacaatttatttacgaagaaaacggacgttttagcaaaatctcaaaagataccaaaatcaaaatgtccgccctctgcaacagctttacttatgagtgcgaatctcgttactattagtcgaatcttctgaatatcaagtagatgaggtaagggtttaagtatcgttgcaatcttagacataatcgatttaactagctgtctgtttggaagaagagaatttagttcgttgattttttaccagctagatattatatttgtcgttcttattattatttgtgtgaattcattttagg

SEQ ID NO: 101191 - DNA, 958 bp, Mimulus guttatus
  Intron number 4 from transcript mgv1a013950m (locus mgv1a0 13950m.g) derived from phytozome v7.0 (chr-ID scaffold_2; pos 3261574 to 3262531)
aagaatttctcaagcaggttggtacttctattctgtatttacaagtagcacaggtggctagagtgtcctttgagaaattaatgtttacttttcagttgtaaatccagcaagacggtatctttattatggtcaacttatgtaggaggggaagtttagcttgttttggtagataattatcagatttttgtcaaaaaatttaaaagctatgattgttatacggtgcattcctgctatgacgacattgagacaataagcatatgaatgggttttttcgttttgaacgaacacaacatttccttttaagagcattttttttatgctcttagttattttatatcattttattatgaggtgtgtcgtgagaattaatacatgcggagaactgcttgtgctggtaggattcaagtgaacgattatatatgatctttgcaatctctcttgttttagtaaattcaccatatttatctttggaaatgagctccatcgagccgaatgaagcaagtttatgtattgatagttgttctcttaaatctgaattaattcttatctttggattctttcactaataaggatactagtatttactacactatttctcaccttcacttttttttttggtttaaatttctattttgtgcattcatgacaagcataacgtggtatttgtcttacctgtataaaacatatgatcttaagtttagtgtgttaggcaaataggacttcatctcctatttgttttccccattgttctggagtgatacaatatcccgcatgtttgacttacacaaccagtaataggtcatttacatattataacattgcgtaatttattccagtaccaacaacatgttggaatggtgaaattatagtccgatcatattgagtaccggacccgtaattgacagaattcggttgtgatgcaggctaacccacctgacccgaagacatttccgtttgt

SEQ ID NO: 101192 - DNA, 907 bp, Mimulus guttatus
  Intron number 1 from transcript mgv1a011736m (locus mgv1a0 11736m.g) derived from phytozome v7.0 (chr-ID scaffold_58; pos 491499 to 492405)
ttgcctcgtacgcttgctgatcttcgattgctcaagtaagcaattcttcagattttttgcccttgtattatagtcctttgttttggctaagctatatttttttgttatgattttcagattctacctgaaatattcagttcattctattaggtgtaggggatgaaagctgttaaccttcttcattatatcttaggttttgtgtttcctaacaagtatatgtcttttggttagctataagatcctatggatcaaagctatttgttaatctcccatcatcgtaacttagtctgtttaggttcagttcgggaacataacacatacgaccctatggatgagtacattttctggtgactgatacatttatgcttaacatgtaacaatttgatatatattttgccattggttttgcaccactcatttgactgtggggtgttgatttattcttcttcttttctaatggaaagattcattagggaatcaccgttgccgcaatgtacttcattaaaaactctgtttatctcagttactggacttgccctgaacgtttgttcagattccgatcccaaacccttgtaaggaaggaatatgtaggttgtatgtatgatagctttcttaaaccttgtgatcgttgaatttttatctgaatggaaaacgataagttatgtggactaactgatatcagagtttgacagtacaataagtggaaaaggtttggttgaagtgaattgggagttgaatagactaactcatatcagttccaaatgcttgtttcccttgggtagtggaagtttctaattttgatgcctttttagtttctgtaatgttttccactcttcactgatttgattttttcactttccgatatgctccagggatcatcttgtgacttacgctcaagtgaatccag

SEQ ID NO: 101193 - DNA, 252 bp, Mimulus guttatus
  Intron number 1 from transcript mgv1a008775m (locus mgv1a0 08775m.g) derived from phytozome v7.0 (chr-ID scaffold_51; pos 624094 to 624345 reverse strand)
cttttctaattcagcttttcccccctctgtagaaggtgaaatctctctctctctctctctctctattctctattttatttgttgattttcaattaattttgaagaaattaagttattgctcaatttagttaatcaaattttggtttctcgctgctcaattgtttttgttgtttgattgcgatggacattgatttttttttttttttctgcgtgatagtcttagttaggtctgagaggcgcgattaggattcc

SEQ ID NO: 101194 - DNA, 643 bp, Mimulus guttatus
  Intron number 1 from transcript mgv1a008856m (locus mgv1a0 08856m.g) derived from phytozome v7.0 (chr-ID scaffold_2; pos 3471384 to 3472026 reverse strand)
gaagctataggtaattaactttatatattcaatatgatttgttaaatatatgtctgaagcttttagtttgtgttagttatatagttaaatcgagggaacgaactataaataggtcaatcatggtgttttattttgatgctggaatatatttacagtgttgcaaatggattttttgtggtgctgctttaaagatgaatgatcttttatttattagatccgggaatctgctccgggaatctgctgtatctaagcaactcaagaatctaatagaagtggaatttacaagcatgcccctctctattattcttcttgccttttcttaaatatgtatgctgacttgtatcgtcgcatgttgtttcacatttgttatcttgtccatatcttgtccatcttttatgagttgaaaaagaaaaaaaaagaattggttgagactcgagaagtcgagattatagttttatggtatttatctctttaacattttatgattaacaatccttgtgctccacaatcttgctttcttttcgattactctttatttggtttgtgtggcaatgtactcattgtttttccacttatcttataacttgaaaatcggatctaaagttactcgtaacaggttcaactgggattgggtttatacctc

SEQ ID NO: 101195 - DNA, 314 bp, Mimulus guttatus
  Intron number 1 from transcript mgv1a013687m (locus mgv1a0 13673m.g) derived from phytozome v7.0 (chr-ID scaffold_18; pos 315448 to 315761 reverse strand)
tttcttttctgcagtactctccactaattctgaaggtaacaacttctaattttttttttttgtatttttgtatgtatccattagctgcttaattgctctgtcaagacttctgcttcattgattggagtcttttttttttctttttcttgaaccgtgtatctattattttactgggtttctgtctaattacttcaaagggtttcttatttgattgaattcatgaagaacccatctcccaaaaaatcttctttttttcttattcaaattcttaaaaaaaattattaaatcagagttttcttgatttattgcaggaa

SEQ ID NO: 101196 - DNA, 1013 bp, Mimulus guttatus
  Intron number 3 from transcript mgv1a012397m (locus mgv1a0 12397m.g) derived from phytozome v7.0 (chr-ID scaffold_164 ; pos 86448 to 87460 reverse strand)
gcagaagcttcagtcgcagaaccgacagtgagcttttagctattgttattgctctgtttattttcttgttttttttcgtttttgttcgtcggaggttctttgaaacgtaatttgttactcttatggatttcaatgttgcatgagttagttatattatatgcttcaattgcatttcgcaacgagcctattttcccaaactcgtttctgttcagatatttcgaaaaaagcaagattatttaggaaactggtaaatcgaaataatataatggttaaattacaaccacccctgaggtatggtcgatttacgaaaaaaccactcttgtttggataattacatctacccctcaactatgattttttcttgcacctccacccctatggtgtcgaattcaacataatcatctagatttcgtggaatgtgctctagtttgtactcgttttgtggaaaaatacagtttctgatgcaccacaatttgatatatacaagccaaaaaacacatcttatgatcatcttgcttcaaaatgtagagttcgaatgggttaaaacgggtacaaaagtgataatattccatataatctcgaagattccactaaatttgaaaccgcaaaaatggacgtgtaaggagatttatagttgaggggtggttgtaattacccaaacatgagggggattttcgcaatttgaccatccctcaggggtggttgtaatttactctaatataattgacctgacccccccccccccccccccccccccccccgctgctttgtatatcttctagtttcatgattttccggacttgtctgaaagctcctctattctttattcataagagtagagtgcctagcttctcgatagtcgactttcttctgctatttgacataagagatggaactaagatttttttattaaagcaatttcggaagtacttgctttggggtggaaatgaatctttatcaagaactgattgtctgaaatatatatatttttttattttttctcaagaacgtgg

SEQ ID NO: 101197 - DNA, 593 bp, Mimulus guttatus
  Intron number 1 from transcript mgv1a003680m (locus mgv1a0 03650m.g) derived from phytozome v7.0 (chr-ID scaffold_8; pos 122984 to 123576)
caatacaatcagcattgaatcattcccccggaacggtaacggtactctctcttgctgtaatttctggtttatttcttaattgaataatggatctgtgtatacaacgatgaactatttagcggtgaattgctatttttgtttagtgttaaattaaattacccagacctatcattttcttctgatttttgaatgcatgcaattggggaaaaaagaaaagactgtacctttggctgtagattgtatttgaaattgtattcccccctaaatacagagccctaatttttagaatgcaaagttatcgattgtaaagaaagagtggtaaaggttggccagtgcttggtaactttcttactaacttgttaattcttcagttttttcggtgagctttttctctttaagtttttgaaagagaggtctgtagtttgttgattacatgctgaactgttcttgttagctgacctacttccttgtatcaaagattggaaattaatgattgaatttgggaattaacactgaaatttgatcgttttcatcaatgttagttgcatatgactgccgatggcataattggatgtattttcacatgtttgcag

SEQ ID NO: 101198 - DNA, 559 bp, Mimulus guttatus
  Intron number 2 from transcript mgv1a003680m (locus mgv1a0 03650m.g) derived from phytozome v7.0 (chr-ID scaffold_8; pos 123656 to 124214)
tagctcaaaaagggtcatccaattcagggtccaaggtttgcatctctactaatataacttaacttgtgctggcaaagaatttggttttttgagtacttttcatggaatatgatgaaagaagggtcatccagttcaggatactcttaatagaatatgataaaataatgctatgagataatttgatgtttgttttttggcatataatttatgcattaaaataggaattatggaaaaaaatccttttcgtggttgatgcactgcagttatgactttcgggcacagtttttgtaccaaaaactctccaagtgctgaggctattggtatctatcttattagtgtaataatagctgaactatatttatatgagctctgaatagtggaactattgctgttcacatggtggtattcataaatatgctcttttgttttttgaatttggttgaccaacattggatggaattaaatcaatgttctgtttctttgatatgtttaaaatgtttgttttttagtgtaacgttttgtctgtttcatgtgttcttactgctataatttttacagc

SEQ ID NO: 101199 - DNA, 485 bp, Mimulus guttatus
  Intron number 1 from transcript mgv1a012184m (locus mgv1a0 12184m.g) derived from phytozome v7.0 (chr-ID scaffold_20; pos 1212336 to 1212820 reverse strand)
attatccacctccaagctcttcttggcaatcggtatgtatatacatacacgtgtgtgtgtgtgtgtgtgtgtgtgtgtttaatttccatattaaaaaaaaacactctgaaatcatgccatgcaagaagatctcaacatttttcttgaaaactagggttttgatctaataatcaagattctttgaattgtgtggtgtatttattttttaaaaaaaatagaaaatttatattttgaaaaaaaattatcagggtttaattaattttagtgtacttttttttttattacaatttccccccttcaaaactagggttggatctcataatcaataatcttttgaatttagttatgtattagatatagatatttaaaattggtagggctttaattacattttgtgtgtgtgtgtgtgtgtgtgtgagtggtttttttttttcaattacaattttgttttaatttttattttttaattttttttaattttgcag

SEQ ID NO: 101200 - DNA, 650 bp, Mimulus guttatus
  Intron number 3 from transcript mgv1a022842m (locus mgv1a0 22842m.g) derived from phytozome v7.0 (chr-ID scaffold_140 ; pos 668857 to 669506 reverse strand)
ccaaaagagatttaaagctcacaaggtagacgaaagaggcggccgcttaagatccagccaattttttttgttggtttttagggtccaaacaaatttttaattaactaaatttataatatattttttgagtccccttttagataaatcttactaaaataattattattctagaatatttttttaaaaacccaaaatcttattattactttaaaaaaatccaaaatcaaaaatcttattaaaaaaaatgtaaaatttccaaaattttctagattcgcgcttcctctttgtttttttatctttgttaggatccaaatctctaaaacccgaattttctaatgcgtattgacgaagaagaattattttatgaactaagagtaatgagagaaattttgctgatgaaagaagtgacgatgacaatcgaagttttaaactacttgaaaacgatggatattttagttttctaaaggctttctacttatagaatatattgtaaacatataacatataccatctacaattgcttctacataaatacattatatatatatatatatatatatatatatatatatatatatatatatatatataattgctatttgaaaataaaaatgagttggtatcaatgaaataggataccaaaggacata

SEQ ID NO: 101201 - DNA, 915 bp, Mimulus guttatus
  Intron number 1 from transcript mgv1a013594m (locus mgv1a0 13594m.g) derived from phytozome v7.0 (chr-ID scaffold_148 ; pos 554031 to 554945)
ctgagcttcaaactgtcgagattcacaggaatctagtaagttttcatcaaatttctctcatatttaagtctgttcatcataatcatcagctaaaaaaacttcaattttttgaaattgtaatagatttgattctaattcaaataaacaatcaatgtgaaattaacttgagaagcagtgatttagctctcaactttaatgcacgccgtgaaaataaaaaaagagagtagaaattcgtaatacatgatttgataatgctatgaaattcttccatgttcagtttccgagttataaattattgatctgagtataatttggccactgataaggtcaaattacaaagaaaagaaaaaaaaaacctcgtgtttggataattacaaccacccctcaattatgaatcttcttacatgtccaccttgcagagtcaaatttagtggaatcttctagattatatagaatattctccagtttgtacgcattttacctcattcgagcttcacgttttgaaacaagatgattattagatgtgtctcttggcttgtaaatatatagattttattgtggtgcggcatcagaaactgcattatttcacaaagcaagtacgaacgagagaacattccacggaatctagaagattatgttgaatttgacaccataagagtggacgtgtaagaaaattcatagttgaaggaggtggttgtaattacccatacatgaggggggttttcgtaatttgacattacctaaagggcggccgtaatttaccccttgatcttaaacactaagtagtcgaatcatattatagctagaattttgtatggcttctgtcgtttcttaatttgaagttggagcttttgattttcctaatcaaagatgatgaaatgtagagtttaagccctaatttatgctatgcagtgg

SEQ ID NO: 101202 - DNA, 900 bp, Mimulus guttatus
  Intron number 1 from transcript mgv1a014765m (locus mgv1a0 14765m.g) derived from phytozome v7.0 (chr-ID scaffold_2; pos 2008083 to 2008982 reverse strand)
ggagtaattgttcattttgctttgtcgctatcgtggtatggtctcaaaccctagctttccttctcttttgttcgagtcatgcgcactaattgttgaaaaagttgataattctgtttcgcttcattgtttgattgggtacagtaaactgtgattaaatgcccatttgactatttgaagaggtaatttcagatttttttaggttctgtttgttcgatttcctgctatgttgaatgggaatgtagaatgcataatttagggcttgttaatatttataccaaggatatttttctggattagttttgaattcatcatagatgtaggtagatatgttttgtaaatcataagatagttgttaactgactaaatttattttgtcgagcattttgttggtcttgctcaagaaatttaccagtttgtaataaccgttcatattagtcgataaacaattatgttagttgaacacgggcatgacgaatgatgctgaataccctaatttatttagttcaatttaacaactgtactttttagttcggtgaagtaccgtggttactcatttgggttctttggcatgtcaaatacatcttgtgaaagatgaaaatcgctatgtcgttttttagattggtgtttgggtcttagaagtgatttgctcgaatttgttatcgtaacttgtgatcggcttctagaagatttttactttttagagggccatcgtgtaatatggacaagtgaggttggtgttgtgaggccaactcatgcggaaagtatatatttatttatttatttttgtgccttatagttctttctatttattcgttattcaaattcccgcaaattctcatcggttaatgttttgatactcctgcagcaaaaaaaagtttttgggtgcaactctgagcagtc

SEQ ID NO: 101203 - DNA, 775 bp, Mimulus guttatus
  Intron number 4 from transcript mgv1a014193m (locus mgv1a0 14193m.g) derived from phytozome v7.0 (chr-ID scaffold_261 7; pos 3909 to 4683 reverse strand)
aagtcacaaatagatatactcaggagaagcagtctgtaagttttcgtccaagaatctctcgtatttggttgttttttttttgtcgggttttccttgcatttattacaagtcttctagtgcaaagtatcctcttaatcttgtcacagtttcttagtcataaatatgtagagctcaactacagaagcaaaggaaaaaaaatttgatcttctgtatacattcgttaatcatattattgaaataagcaattactccaagttttacgaacaaatcaccaacttctactttttcaaaagcttttgcaaataccaacttagagggtgtttggctaagcttattttaaacagctgataagctcttacgtctgataagatgttttttgatctgataagctgttacatcttatttttaggattattttttagagtgtttggataatgagcttatttaatattcttacacattataagatcttaaataaaaatgtggggtagaggtacttatttaaaaagatcttatttgctctccaacaacttatttttttaaaaattaagatctttttataaaaaactaccaaacactttggaagaacttataagctccaaaacatcttataagctcttctatccattagttgttgatcgaatatttttgcataatgggctctttctattttctggtcaatgattttttgtattgattaaacctcctcaactctttacatttcgatcgtagcttcatattgtgcgctattattatgcttgcgcaggtggacgag

SEQ ID NO: 101204 - DNA, 186 bp, Mimulus guttatus
  Intron number 1 from transcript mgv1a024703m (locus mgv1a0 24703m.g) derived from phytozome v7.0 (chr-ID scaffold_11; pos 2267838 to 2268023)
agaaggaaagtggcatcttgtccctctcagaactggtaataatcatcatattatatattattatttttttcaaattttgattttataaataatattatgtttttttcttcttctttttcatacgatcttagatctatttatttgttacatatattatatacatgggcatatatcagggctgaacag

SEQ ID NO: 101205 - DNA, 949 bp, Mimulus guttatus
  Intron number 1 from transcript mgv1a017096m (locus mgv1a0 17096m.g) derived from phytozome v7.0 (chr-ID scaffold_1; pos 2721452 to 2722400 reverse strand)
atcgaccagcttcaagttcgcgacaggtaatccatcgaaaaattaccttgttgattttgagctctgaaatgtgatagtttgcgcgtattttcaattcattgattccgtgaaaatgctgtgataatcgtagtgagagaaataagtgtttcagaagattttcattaatcgaattgaaaatttgtagaagttgtgttgaaattaatgagattttaatggaaaaattagtcttccctgctttatggttcaacagatggatcatctgttttgccacttttttgtatctgttgatgatttattgaaatcgtatttactatagagtttgccatgattaatgcgtaattcaagcggtagaagaagctgtttttttttttctggtgtaataccgagaattgcagttctttgccggtaatcaatgggaaagaaacaaccgagaatcgagatttgctaattgatgaaataaaagttgcctagagtatgaataattcttcgcgtttcatgcctctgtagttaaagctgccacgagttatgaatgattgttaactgaacaacgctcatccctgaacacctggcaaattctcgaacttggatttttggtgaaatgttaatcctctttcttattcagatagcttgacgtggatatggctatgtagttcttctttttagttgcgtcttttctttgtataacttgatttgttagaccaccaagtaaatagatatgtttaattcatttacacaatcgtggtatgggctgatcttcttctagcaatcttgatacgatgtttttagttattcatgtgaaactactcgatttacttctgctttctgttcctttttttcacctgagaatttacttttattcttgtagcagtttgatcgcaaatgattgtatcttcatttatttttagttactgcagtgttgaaatgtttgaatttgttgtacagtttaagg

SEQ ID NO: 101206 - DNA, 550 bp, Mimulus guttatus
  Intron number 1 from transcript mgv1a025812m (locus mgv1a0 25812m.g) derived from phytozome v7.0 (chr-ID scaffold_31; pos 574811 to 575360)
ctacacttgggaagaaagaaatttcttcattttcagtatatgtgatgacagaaaattcagatgaagattaagtattgatttgaatatatcatcgaaatatttgatggtgatcgacattgaattatctcaaatgttatatggattatctccaatccggagttcacatttcattttttcttttgttttagagctgctatttaaaataagatcaaattcttatagtgaaacttttctttccaaaactcgtatacaaaattcatacatagtgcttatcaactttcatctaaacccatgtctaacttaacttgtatgttaagataaaaagcattatgatttagtgaatatatatatatatatatatatatatatatatatatggatccgctgctttttggagataagtggattccatttaactcatgacacgtggagatttaattagctgtaaaatttaatttaacccttaatcttacccttaattgatttatttttattttttagaaaataacaaacccttattgtgtaggggccatttgatatacactcctag

SEQ ID NO: 101207 - DNA, 565 bp, Mimulus guttatus
  Intron number 1 from transcript mgv1a026237m (locus mgv1a0 26237m.g) derived from phytozome v7.0 (chr-ID scaffold_60; pos 550789 to 551353)
ccaccaccaggtctctctctctctctctctctctctctctctctctctctctctctctctctctctacatagatagatggttatatataaatgtatgtgtatgtatttacgagtgcttgtgtatcggtgtttcggacagatttcgtgtctgacaagtgccatttttgtaattttcaaaaacaaatgtagaaacacttattcaaaagtaaaattttcaaatacttggttgattacttagtttagttatgtaggtcatttaatgatggattccaaattgatagtttataatactattatgtgaggatatttgtatgaaaatatatacgaagaatttatttatacataaaaaaaaaaaaaaaaaaaaaaagcatatatacatatatttattatttataaatatacccctataatttttaatttttacacatatccccatattctcgtgtcctactttttagaatacgtaattttcccgtaattcgccgtatcatataatatgtgaacaaccctataactttataattcctttttttttttccccgatcggtttggtgtgtgatgaagt

SEQ ID NO: 101208 - DNA, 839 bp, Mimulus guttatus
  Intron number 2 from transcript mgv1a014671m (locus mgv1a0 14671m.g) derived from phytozome v7.0 (chr-ID scaffold_89; pos 750410 to 751248)
tgtacctgcaacagtgagtggtggagctgcaccaggtaaacacaaatctgattcctcttttgcatattttaaccttaaatgttggaattaatgtgggttcaacttgcttatcaacttttaatcggttctggttctgatcggtatcgtgtcgtagtttcttttcgtttttccgtggttctgatcggtattgtgtcgtagtttctttccgtttttcggtaattccgtttgcacatagaccgaaccgaatttattatgtgtcgtagtttctttcccttttttggtagttccgtctgcacatagaccgaaccaaatttattatgtgtcgtattttctttccgtttttcggtagttccgtctgcccatagaccgaaccgaatttgttatgcgtcgtagttcctttccctttccatttccggtagttccgtctgcacatggaccgaacctaatttattgtgtgatgtttccgtaatcttcttttcttcgtgtaggtgtgaatttggggtaagtttatttactctgttttgtccttttattatttatcatgttcttctgggattgtgtagggcatgttatttattattgtcaccttcctgacgcaaaaacggcgtgccggaattaattaatgaccccccaccccacattttcttgatttcgcatttgctttcgaccttggtggatttcaacaatgtttttaaaatgtgatttttgatatgaattagtctaatagtgatcttagaaactttaaatcgaagctcgattctttttcttgttgacatgattgtgtgatgctattttttgctgcagctttttcgccactggctgcagtgtctcccagccca

SEQ ID NO: 101209 - DNA, 466 bp, Mimulus guttatus
  Intron number 1 from transcript mgv1a017558m (locus mgv1a0 17328m.g) derived from phytozome v7.0 (chr-ID scaffold_113 ; pos 566278 to 566743 reverse strand)
gtacgctcttcttcaccgcctgagatttgaattcggtaactattttctctctgaatttccattcaacatcgcatcaattaatgtatgtttcttcatgggatcatatgattacttctgtcaaaatgcaattttccattttttattttattcagaagtagtttgattttgttctgttgcgttgatttgttaaaaggctgaaatctgtaaatgaattaattgaataatccatctgtatattccgttgatttctttgatgaaatgaaaacgaagaggaccttgaatctatcattttcattagtttgttgtatgtggattaatcttaattttaaattttttaaattggtgtttattgaatttttttttttttaatttaattttattaagtttacctctgttattacaagcatttatgctgttatttggtttgttttgatagttcatttgcttgttcaagacacctatcaag

SEQ ID NO: 101210 - DNA, 700 bp, Mimulus guttatus
  Intron number 2 from transcript mgv1a025431m (locus mgv1a0 25431m.g) derived from phytozome v7.0 (chr-ID scaffold_97; pos 152110 to 152809)
gcatcaggtatgtatagtaatttgaaatggggcccacttaagcaaaaaaaaaattgaatttcgccgattattgtctgtaaatttgagaccattaactaattgttttcgttccaatttttcttcgatatttcaatttatgaactctcaaagaatacattttttctagaatctaaattcgatacaaattttccgacattccaaaaattttatctgattttcaatttgaaaaacaatttaggaagtttaattagattaatattttgcaaggaattgattagatataaatattattataatatttataccgccattatatatatttgatgtattttatattgggagtgaaaaatgaaattaataattttgatattacaaattccaactttatagtaattcttatcattctgaattttttaattcatattttgatttttttttgtttcttggatgtaatcaaattgcttcacattccaacgaactttacgaatttggtggcattgaattctttcagtttcaaaaaatttaatttatatctcattattcgtttgattatataaaatatttatggtaacgacatgcatgtatacgctccgttatgcaatatacacgcaaaaatactacgacaattattttaacgatcttgacttgttctgtttcgaaaaaaacagcataggaagtctcggtagcagtgcaatagaaa

SEQ ID NO: 101211 - DNA, 725 bp, Mimulus guttatus
  Intron number 1 from transcript mgv1a018451m (locus mgv1a0 18451m.g) derived from phytozome v7.0 (chr-ID scaffold_128 ; pos 108528 to 109252)
tctaggctcaaaaacatcagcaaaggctgcgacaggtacgttcgttgtatatatgggtggtaaccgtaacagatttttcgatttccgtcgattctaatccgaaatattgtttttttttttttttaatgcaatcaacatatattttatgaatatatttcttaaattagattaattattacaaacttcgtctctagttaatcttggttttagggttttgctagaatatattttattccggattacgagcattctgatttttgactttttatggataaaatttgctatatatatgatattctgattttcggtttttcaatttttttattataggaattggaatttatatgagattctgatattaatttcgaaaaaaaaaaaaaaacctctgagtgtttcgattttttttataggaattgaaatatatataagattctggttttcaatcaaattttaatttttgtatataattcagaatatttcatttttttcttcttctgaaattacacttataatgtcaatattatttagtatgtattctatatttgaagtaactaaaaattgaaatattctaaagtccgccaattctgataggcaaatttccaattttggaacacttttaaaattttcacatccaaaagttagaatttttagaaagtctaaattctgatcagaccggtccggttttcacccctaggtacggtattcaaagccttggcgagcggact

SEQ ID NO: 101212 - DNA, 680 bp, Mimulus guttatus
  Intron number 1 from transcript mgv1a009707m (locus mgv1a0 09707m.g) derived from phytozome v7.0 (chr-ID scaffold_18; pos 916479 to 917158)
tctgatctacttcaaactctacaagactacaacgtgtaattgaaggcaacgaaatggacaaacggcgtcgtttctactcctacttccatactgtgtcgttttgaatattgagtatcggctctttctaatatttcaaaaattcgaactaatatttaccggctaaaaagcttgaaattaataattgttgatttatttattttggtcatatatttatattaatatttttttatttttcgtgtaatagtttgtaatttaattcttgaaattttgtttctattgtatataattatttatttaattttataaagattagctggttttagatgagtaatatggttttgctatgtccaaattaagttaatatcatgaaatccgagacataaaaagataagaattaacagtaatatagtgaagggggaaattgagtaataattataaataatttattatgaagtgtagcagtttggtttgatggaaagaataaattgtaaaataagagtggattaagctaaaaagattaaacctaataaaaatggcaagaacaaaacttagaaaatgagtttgtacattgatttatggactactacttgtgcaaaagaatataaagaagatgaaaacatgaagctctttaatagccctggatagctggcggaggtggtgactggtattgtgcgcccaag

SEQ ID NO: 101213 - DNA, 561 bp, Mimulus guttatus
  Intron number 2 from transcript mgv1a020187m (locus mgv1a0 20187m.g) derived from phytozome v7.0 (chr-ID scaffold_25; pos 722186 to 722746)
cttatcgttgcttctgacacaagtaaccctctttttttaatttttttttcgtaattatttctatatctatcccctccctccgtatatgttacggagtcataaactaaaagaatcttttgtaattgaatttatttgaatttttcgaaaataaaataaaatcatgaaataaagagataaaggcggcaaccatcaatggagaaatgctataattgtccgatcccgattcccgaaaacccttgtttcttcatttattttcttgcaattcagcaaatggttaatatgaacattaaaaaattgtaacttgtatttcccttttaatcgatggacgtaccgttttagccaattcacgctaggatatctgaaattataaagtttttactaattatgaaaaaaaatacgtgttttgcctgatttgatcttacctcagtgtgtgtggttgtaacttatcctgtaataaatgaaaagtttagtcacttgcgagattcgtgctgtataacccctcctcggtgtgaacggttgcttgcagttattatctcggttacaaaggaacaagtgaagttc

SEQ ID NO: 101214 - DNA, 824 bp, Mimulus guttatus
  Intron number 1 from transcript mgv1a005620m (locus mgv1a0 05620m.g) derived from phytozome v7.0 (chr-ID scaffold_36; pos 57880 to 58703)
tctcctctctctctctctctctccgattctgcaaagtaagctttctactcttcggtaatctccactctttcaatacaatcatttgtttttttttgttaattcgttttcgcaattgtgtgatgtgaatctccacgcaaaattgaagtacttagtcggagtgatttgctatcttaaaatcgagaatcgtcgtatcaataaattgaaaaagaggttgtgtttttaatttaattttatttgcattttggtcgggatcggtttgtgtgatcataagtctaaggtgtctagctcgccgatttttatgccctaaacgtagcccctgaatattgcagtgacgtggaaaatatgtcttctattttttacatgatcaaacttaattgtagagttgctatattagtaggtttgcggcatgatttttgtaggtattgtcgcaatgtctgatgagtgtgtgatccgtattttgctgtttccgaatcgaaagtcttagttcgtctctatttcattttcttccgattttccgctgggcagttttttcatgtgttttgtttttatgaggaaaagcaattcggctcaataaatggcgattcatgtgttcatttatttgacatgttataaaattgtagtggttttccctatcaccgaacttgtggtcggtgtttttgcttttatcttctttttggagaaagtcgaaattcaattggttcgaattaattcatcttgataaaatctggttagaactagctgaatgatggtctatttgaaaaggctttgatactgtgtatactcttgcagggctctcacgtattatctatttgtatagggaggcc

SEQ ID NO: 101215 - DNA, 831 bp, Mimulus guttatus
  Intron number 2 from transcript mgv1a007101m (locus mgv1a0 07101m.g) derived from phytozome v7.0 (chr-ID scaffold_1; pos 2809982 to 2810812 reverse strand)
atatagctggtgtactgagaagaatccagagaggggtaaatttagtatattccttgttcaaaagtttatgagggaccagtttgagtattcatattatgatagatggtctgatagtttgaatatgccacgtgtcggatattaattctgtgtcagaatatctgcgaatatcctatataaaaacatcagtcttttgtttcattgcaatttggggtgattcaagtgtccagtttatctaagtttcgctcttcttatggtaagaattatttgatcatgacatttggagatgtacgcatggttctccggaaattaacgtatgcgccccatgcacaatgcatgtgacatcatactccattaaagatactatataattggggaactgatattgttacagctaattcagcaagagatacatttatagtaaattaattagagattatagatgtataactgcttgtcacatcagaccgttatacattatcgtggataaatttgtttctctggcattaggaacaagttcatgtttaaaatggcactactgtttaaaatggcgctactgatgcttcaatgctaagcttcaatttgaaatgttttccttttaagttgaactccgtgcttgtgcagtcatggtaaggggttcttaaacgcttatcaagttgattaaagtattatttttacttataatatgcagttttaactggatttatttttacacaaattggtatacttatacatttggaatttaataatgaatcgccaatggaatgctaatttgttttaccttttgctgttgcttcaggggattcatcctacaattaaaggggcagtctggga

SEQ ID NO: 101216 - DNA, 495 bp, Mimulus guttatus
  Intron number 1 from transcript mgv1a007101m (locus mgv1a0 07101m.g) derived from phytozome v7.0 (chr-ID scaffold_1; pos 2810848 to 2811342 reverse strand)
acccgttttaaggcaagggtatgtaaaaatttcttgcttggattttttcaatttgatttgttggttttgtcaaacttgagcatttatttttattgacaagttagattgaatatgcatttcatatcattggaggaagatgtttgagatatggaatatattttgttttctggctcgatgaacgaaattattttgaaaatagtcaagcgggctttaacttataatcgtatgtctgtaaatttgtttgtgcgtgttaaaacaccagtaagtttgatctgaatatgctccacttaagcgagcattgtttgttggacgcagactctttcttcatgattaccgttgttatccattgaaaaccacgaaattagtttcttgtttatttcacgatgctattttactatagtaaatatgacttgctttctctagagcttattttgaaaatgtagtttatttcctctgaccttattcacaggtaggtaaaactctgagtccaagaag

SEQ ID NO: 101217 - DNA, 754 bp, Mimulus guttatus
  Intron number 1 from transcript mgv1a002302m (locus mgv1a0 02302m.g) derived from phytozome v7.0 (chr-ID scaffold_1; pos 2900745 to 2901498 reverse strand)
tttctgggacttcatcaagatctgttcttgcggaggtagcttactttttcagccaattaatccattttttattattttttttattgcatttagattgagctgtgaatatttatttgtgatatagatatttgtgccttgacagattatagagtagttttaactcttaagttgccttaagttcagattaattatgaaggtttggttctgagttctgaccagtgcaaataaggtggtttttgtttcttgatgaatttgcccttatttaattactgttgctgaaacaagatataagcatttaattaagaaaaattggagggatgttgctggatatttttggctttcttgttgaatgtggcagtggcggcacgagtacttagatgcgttttcgattcttgttttttcgtcgtattggttgtgatgaacgggtttctcaagttcagttcatcggtgatatgtgtgtgattcgtttgtatagcatttgccagtagttgacttctaacatggagtaacttttagttgttagcattagcaagacagagtttctggtgcaaaaagtcccgattcttccccaaactggaaatttcgcaccttttcgatattgttttccagacgatgtttttgaccggtcgagtgtttgtagtaactgtattcgcatcccacacacatgttagtttgatcactcatcaagaattataattcttgtttatttgagtttgatcgtttactactcttctggctttatcgaaacaggtca

SEQ ID NO: 101218 - DNA, 310 bp, Mimulus guttatus
  Intron number 1 from transcript mgv1a011397m (locus mgv1a0 11396m.g) derived from phytozome v7.0 (chr-ID scaffold_8; pos 3395195 to 3395504)
ttaattccgacgctaataaaccagtggtatgtgtagaaaacctaaaattattactttttcttccaatgatatatacaaattgtcatgagtttatttgtatgcatatgtgtttttttcgttcaaaaactttcggaagtttctaaattaggtttgacaatttttggttgggattgaaatgatttatgtagcttaatctcagaacaatagggtaattaatgattcaatttgattattgtgagagatgatgttgtacaactttgcatgatcggattcctaaagaactatatacgtgtaggttaacctgaacaag

SEQ ID NO: 101219 - DNA, 626 bp, Mimulus guttatus
  Intron number 2 from transcript mgv1a001489m (locus mgv1a0 01489m.g) derived from phytozome v7.0 (chr-ID scaffold_7; pos 2422904 to 2423529)
tccacgccggaaagggtgggaatttcttcggcaaggtacagattttgatctcgatatttgtttagattgtttaattttaatttaatttttttggttgatgatcgactatgtttatacttgtcctgtcaaagatgtttgacttgaattactgtgttttgggtagagattgtggatggattgaattaatttacttttttttttttttaaattctgttggttaaaatatttataaaatatcttgttgacatgatttatttggtttgatctcaaatgcttactttgagcaaggtttgagttgtgtgatgcatcgttatgctgtcggaagatcgtcgattctgatatcttccattttttctttttttaatttgatttccgattgaaatttcatttttaattgttaaataatcaaaattcttgcagtttttttactacatctaagtgtttatgatgcatcttgagcacaccttcgtttctgaatttgattcgtctgtgttacgagtcgtgattgatacatcaagacactctccgtttctgaatataggcttctattcatttgtttttgcaatttaaaatagttttcacgtatgtattctcgttgattaaagtatcgtaatcttgtacagctg

SEQ ID NO: 101220 - DNA, 723 bp, Mimulus guttatus
  Intron number 2 from transcript mgv1a021435m (locus mgv1a0 21435m.g) derived from phytozome v7.0 (chr-ID scaffold_37; pos 350589 to 351311 reverse strand)
ctgaggtatatatatacatatatatacatatctatgtgtgtgtgtgtttgttattaaaatttgaaactcttacttaaccctactctaattactcaccatcttccaaaaatgaagcaaatttgcaataaaatgttgtgtatgatttaggggtcctagtcggaacggaatttccgagttctgcggattttaatatgaaattttctaactttgggaaagttggatatcggatatcccgatttccaaattttttttggattagaattgaaattatttttggaaattcagatttccgatccaattttgatatacataaatactttcgatttttgcgaaatatattatactgtattgtatgtaaaaatatattacatattttataatttaataagtgggactatagtagtttttatttatatgtcattaaaaaacacaattcatttgttatattttgttttttgaaattttcgaaaattccaattaaatttaccgaaagaaaattggttccagttgtgtgatatctttccgaattttcggaatctccggaatcggaacacattttttgaattccaaaaaactttggaattgaaatcgaaagtgttatttaattttcgaaaagatctgtttccgaaccgatccatacgactttgcaccctaatctgatcgtacgagttataattgtttgatgaagataaaggcgttgaagaagagggagccgacggagtc

SEQ ID NO: 101221 - DNA, 819 bp, Mimulus guttatus
  Intron number 1 from transcript mgv1a022526m (locus mgv1a0 22526m.g) derived from phytozome v7.0 (chr-ID scaffold_2; pos 250863 to 251681 reverse strand)
tggggcatcattgcaacggcctagattcgtaccaggtaattttttttctattttgttcttccctttttgatgcatctgttaatgtaatggagattgatgttgagttttgtagctattctgtagtattatgcttaaaggcattgcaatttatgtgttaaattgtgtgcttccttctgtttttgatgagaatttatggaagttgttttccatgactgctctggcacagtgacagtgagtatgatcaagtgtttctgataagaaaattatgttacattgtaccttattcctcatccttgaattgccatgtaaagaaagagcaaacaagtcaaagtcataaggagattgttattattcattgtcacgaatataagttaggttttaaacacttgttgtttggattcttcccaacaattttagccgttgctggtgtcactattatcaggagttatcagatcattcttgtgttttactgaaacttacgttactctcccaataccaatagtcatgccaagttgctttatctctttagttcatgtcatgaagatgactcagttgtttagtcacatcaaaattccacttcttgatccttgtttaagatttttctttcatttttgctcgcgtaacagaagtttcatattcttgttatgttcctatgtctttcaagtagagtcgactatacctataattgagaaaaactggaatctgcctttcaatcatatgagtacatgctttgtttaagttctgttggaatgctgatttaagtgtaaaaagtttgtggttgtaagtatatattgcattgattggtgtcgataggtaaac

SEQ ID NO: 101222 - DNA, 978 bp, Mimulus guttatus
  Intron number 2 from transcript mgv1a012215m (locus mgv1a0 12215m.g) derived from phytozome v7.0 (chr-ID scaffold_90; pos 378553 to 379530)
gcgcacagcttatatttattctcaccacggttagttttcagtaaaaaaattgttcaatattcttcagatgcggcttctagattgggtaattgatgtatgtatattgtttgatgctcttttaattaataatttatatttttttgctatttttcttttagtttttttagtgtggtaactggtaaacctagagaaagctgactcctttacaaaaaacaaatcttaacaaaattgtgtgtgcaagtgaattgtgtttttcatagaacagtatttcttcaaagtaagtgtttgagttgtatctaaaaccgtagaacttgcgcgaaataaataatttttgtttctactattttataaaacttcacttaatgctttctgctgtgtataaatttctagagatggatggactccactgtttaattgatcataagttcattttttttttcttgaggcgactttattcggtttgttatttgcaagttgcgagcattcgagatataaagcagttaacacattgaaactctccttcttatactttttcacaggaaagtctgctgttgattgttatattattgttcctctcgtacttcgttgagcttaattgttcatttatagttcagtcttcgcaaaccagccatcttttctttcgacttttgcgacccaaaaccaaccttctgttgtcttctttgctttgctacgtgtgaattagaaccgattttgttgatttagtctgcgtttaatgagttcttggaaaagaagctgattagcccttttttttatgaaatctaatttaatgacgttagttcgttgaaggaatgagaaagttgcatgggagtcctatttataagtaattgtagcattcttatgtctatggaaaaaatattctcaaaattattctacatatatacctgaaacatgttttgttgcattgttgttcggacgagaataggcatctacatcggtgacaacaaagtcgtacatttc

SEQ ID NO: 101223 - DNA, 421 bp, Mimulus guttatus
  Intron number 1 from transcript mgv1a016541m (locus mgv1a0 16541m.g) derived from phytozome v7.0 (chr-ID scaffold_251 ; pos 41150 to 41570 reverse strand)
atccgttaatcttcctaaggtgggttctttcattttactgatttattcttatcctgatcattttttgtgtttctcacatgattatggttatctttgggttttacatgtatttaattgtttgcatatcaacatggttttcctgtcacataccaaaagaagattaacaaaaattgatttgggtttttcaattccagtattcttcacctaggtcaatttgagtccttatttatttctgtttctggattttttatttttaaatcaagctttttgttgcctctttaatttggtgtatgcactttgcaatttttaaaaaatactttccgtgtttgtgaagcataaacaagaagaattgtatacgaaatgatacaagtatttccgtgctgcaggtgtttgtaaaattgtctgtgagaagaagacccta

SEQ ID NO: 101224 - DNA, 764 bp, Mimulus guttatus
  Intron number 1 from transcript mgv1a018347m (locus mgv1a0 18347m.g) derived from phytozome v7.0 (chr-ID scaffold_20; pos 2076549 to 2077312)
tattttgagggtttgaaatacatttttacttaacagtcaaatagagtttaaaatgttgaattatatctcattgttacataattacaaacatatttttttcttcattaattattttgttgaataactcaacttcaaatccccttaatttaccgaacataaataattaattgcttgcaaaatccttcataattatcaaaaaaaaaaaaaaatatcttgtcatatctttcatttttctcgtttttgtctggatttattacttattagtactcattttaattttatttttgtatacatatcagtttctaaaattctttttttaacaatatatattttaagaatgaattaaaatattttaattaaatattagagttaaaaatgtatattcaaagcttttcttcattttcttttattaaaaatgttttcaaggatatatgcatcatggttaacaattataatttataattataaacaatataaataataagtagatgaaatatctatacttgcattgtaatgttgttgagaatttaaaattattttatatgtaaatatctaaattaattacgtggtatttaatttataccattttcattatcctcttttgtatattttatttttaaaaaatggtctaaattttatttatttaaaataaataatcaacattttctatatagtgtttattctaaatgtccaattacactttgaaaaataattaaatattaatttaagaattttttgttatcagatttcttgacaaggcggca

SEQ ID NO: 101225 - DNA, 512 bp, Mimulus guttatus
  Intron number 1 from transcript mgv1a012667m (locus mgv1a0 12667m.g) derived from phytozome v7.0 (chr-ID scaffold_125 ; pos 210954 to 211465 reverse strand)
gacggactcttactcggtaatcgccgttaattatagaattccaaatttttgaaattattcgctcaatttaatttaattttatctcccaatgtctatttttgaacaagtttcggaaacctaatttgattttatgttgttttcggtgggttgattaaatttttctgatggttttgttgatgaatagtttatccgtacaattgcagaattgcttcatattattcttctggtgtgcataatctggaaaatagttcagcattgattttctattcagttgcttctaattgattccttttgttaagaaatcgctcgattttgttcggtaatcggtatgcattgttagagtaaactgaatgcactgatagtatccaagcatacacattatatatatgatattgaaccggatgaattgatagaacaaactattggcttctgatcttgagtcgaaaccgatgagttttttttttttttttttatcagatacagagaaattgtacggtgaagtccaggagaat

SEQ ID NO: 101226 - DNA, 922 bp, Mimulus guttatus
  Intron number 2 from transcript mgv1a016042m (locus mgv1a0 16042m.g) derived from phytozome v7.0 (chr-ID scaffold_149 ; pos 672550 to 673471 reverse strand)
ttgtaagattttcacttacctttcacttttacccaaatcgtctcgagttaaataaataattatatgttttgtacgaatatatgcatgcatcgtatacttatgagagttgcattacggtatctattgattgtctggtagcatgcacgtgcttctttgccgaacgaagctttttccgaagtttcatttcattggcttatttaatagctctagtctttttcccttttccggatattaatttttcgtttattttcttgacgtttgactcctatggggaagtgtgtttcggattcttgaataatatacagtagaaactcgataaattaataagctcgattaagtaatagtttctctcggtctcgactcggtgaaaatgtgttaaattattaactcgataatttaataattcgctaatttaatagaatttccgtagtcccggctgtattactttgtagaggtttacttgtagaatgcatgtttttatatgtatatgctcgctctgttgttgtactgtatagcacagagtggtattacaaagcattttcattctccctcgatttctcgaaaattgaatcaagcacacattaaattacatgtttttttagtgaagtcctccttgtccagactgagggggcctggacctcctatcaatgtattaatacgaaaatcaaaagtcatttacaacataaattagaattcggtacggataaaaaagaattacgactcccttgtaacaaatctcaattggaatgaaaaccctagtggggcccgcaaattgaacctcgggtttttttttttaaatcacaaatttctctcgagatttttacactgttaattaagaagtaagcacgagtctatactgttcttgaattgttattttcttggatcaggtatcttaagaaaaagcatctagtcgacgtaaccg

SEQ ID NO: 101227 - DNA, 960 bp, Mimulus guttatus
  Intron number 1 from transcript mgv1a015206m (locus mgv1a0 15206m.g) derived from phytozome v7.0 (chr-ID scaffold_96; pos 116531 to 117490 reverse strand)
cggctgcggctccgccatcgcctcctcctccgtcggtattgtttcttctatatatagtttatagcatcagtgggtttcaatattttgctgtattatatttttttttttttttggtgcaagtctttctgaatttgaagttttggtactacaaaaatggaatttccatttttggagtttattttatgagaattgtttttggttggatatagtttgcaagtcttaatgagctccaagttagtattttcgaaaattaatgttgactttttttttgttgttgatttattactcgtatttaagttgctgcttcttatgcatatgggaagtttctacgcagaatcggatttttctaatttgaatggttgagtttagttgtgatgttgaggtgtagatttttcgttttcttttctattccctgaatttatatacattaaatgtatggctgaatgattctgatctaaatgacgatacttgtgtgctttctctctgctggcaatagatgtatgcagtgattaaggatccttgttcgtcataaaatacctagttaacagcattatgtaaggtgctacgttgttggatgttgtcttgatttatcgattttatgtcgttttagaaaacgatgcttctaactagatttcgctggttttgtgttttgtgtaaggttcgaatgagtttactatttgttgtctctgatgctttcgtaagtgtgatcattccatatgagttggtataatattgaattgtaattgatcttcggaagatgatattgcacagctgcaaatcttatcttgatcatttacaactcgatactctcttcgtgcatcatgtttaagaggcattaattccttttgcaccgagatctcccgagtcgtgattatgttattctcgtactgtgttggcatgtttcgttgccaaaattttccggctaaagcattctttttttttccatttttcagcaactga

SEQ ID NO: 101228 - DNA, 1023 bp, Mimulus guttatus
  Intron number 1 from transcript mgv1a012871m (locus mgv1a0 12871m.g) derived from phytozome v7.0 (chr-ID scaffold_1; pos 1596799 to 1597821)
cgccgacaagattttcagcctcggcgatttcctcagtaagtatttgttttcttcaccttcttgcgagtgtattctgtttcatactgattcttgattccgggatcatagttttacctgtgtcttgctcaagatcaaaacaaacatgttttgtgttgattcttgattcagggattttcacattcatcataagaaatcagttgagatattaattactaccttaacaggtaattagcagcaaaaaaaaatatatgtatatatatatatatgctgtaaagatatataatcatgggattaagtcacttctagactgggtttaattatcagttgagatataatcagggggcagaattttattacaagctagtttgggaaaagataagataaaaagtattattattacagttgaattatccgggtgcatgtgttgaactaattaatcccacagatagtcacaagaaggattagacaagtacaacctctgacagctgtttatgttggttgatatttctagtcaagagtgtagccatgttcatcttatttgcattattaatatttattatatctcatttaattattagatatgactttattgtaaagagctttgcatgtggtctctctcttgcaaatttggcaacactagattccaatttacatttccacaaaatcgacatgtgtttcggtgtggctgttcggacttgtttgaatttttatcgaacttttttctttttccccaacttaatttctaatatatgtagtattattttcagtggtggagccagaacatgactaattaggggggccatggcccccatcgttacgtaaaaatctagtattttatataaatatttattatttttagtgtgagataacattattggcaccgttgaaatataatcttggctccgctactgaattcatgtcgataaaaaatattataatacaatatttcgtaccatattataactttttgtttttttgtaaaatgtagttttcaacacggacaacaaccactcggtcatccaa

SEQ ID NO: 101229 - DNA, 748 bp, Mimulus guttatus
  Intron number 3 from transcript mgv1a004374m (locus mgv1a0 04374m.g) derived from phytozome v7.0 (chr-ID scaffold_42; pos 1607008 to 1607755)
aaaggccttacaaagaagaactcctgtcgaaaacggtaggttgaataaacaatctgcacaagtagattaaccttgtttgcttccattatttttagcgcttgagtttttaacagaatttcataaaaccatacttaggcctcgtttgcttggggagattagccatgattaactaagtaattggactctgtttgatgtatggtatccccaataacttgcccgcaaatattatgttatcatggcttattttgccttatcttgcttttgagggagctttttagttggacgtcacggggtccgatgaaataattgggttttcattagattatttaatcttatcttggcaaccaaacgagacctctactgtattctcataggacctatattttcactctctattaactcatgttctagtgtcatggtattctcagtcttttgacatctgtaagtgagtagctactttggctgcccaaatataatttttcttctaatgattttttcaatgttattctcggtgctgaatccaaataagcaactaaaatttgtagaatcaattttcccgtaatcatattttgacttttattttcccgtaattttattttggtgtaatgtaattctgccaggggattttgttgctattgcatttatggtttttggtaaatgtcttgttcgttcttttatttccaaaaaagcacattgtgtgtaccatttaacctatgtaatattacttcctggtatgaataggaatcag

SEQ ID NO: 101230 - DNA, 732 bp, Mimulus guttatus
  Intron number 2 from transcript mgv1a011166m (locus mgv1a0 11166m.g) derived from phytozome v7.0 (chr-ID scaffold_389 ; pos 99747 to 100478 reverse strand)
aagaagttgagagcttgaataaaaggttagcgatctacttcttttttatttatttttttaattttaatttatttttattattttattttgggtttttatttgtgagttaagcaagaaatcaatttttggctgcattttttaaatttgtatcatgcattgtatgaagttttcaaagccgaaaggcgatggtggattttgattcaataatattcatgttcagctggtatttatgtttctgatcatgagattggatgaacgtacgctaggatatcgggatcttgcatttgttcgtcttccgtcctaattcatataaaatcctttgtccatttttagatcttggattgatttgtcgaagattcgatatctaaaaagaatggacagctaaaatccagatgcttttatttagcttatagtgcatttctcatttcagccctttttaacgcgattttacccgattttaaggcacttgtggtttcagtgcgatcttactcctttttcagtgtgtaaaatcttaaaaatcttacgattttacgatttagatcttgattttgagtactttgttgaggagagcttatcgcaatattattcattaaagataaatatagatacaaatagtttatacaaattttacgttaactttgtaaataatatgacataaaagctcggtcccgatttttatgagacaatctttacaatcttataatttgcagaaagccgtgttcggactataaa

SEQ ID NO: 101231 - DNA, 652 bp, Mimulus guttatus
  Intron number 2 from transcript mgv1a002307m (locus mgv1a0 01916m.g) derived from phytozome v7.0 (chr-ID scaffold_89; pos 649730 to 650381 reverse strand)
ctggctgttatctgcctgtccaggcaaactggcaggtacttaacttctttctgttgcaggcattgtcttttaagcattgaaactaaaatactttgctgcagaacattcacccgatatagttatcaattggattactttttctttttggtatgctgttccatctcccagaggtgggtgggttcaatttcattggagaactaaaatttgtatcagagaggaaacaattgatgacctgctttatgttcactgttcaaaatcgttggatatctctgctattccatcctcatcaaagatttctttgttaccactcagttttgcacaaccgagcttatttataagccaatgtatagatgatgaatcaagattcaatgcctttttcaagaaaaaaagcatctctctaaccctaatatctcccaaaattttgaaatttggtatctgcactaattttagctttgaatactagcttatttggttttctgatcatattaaagattctctcctcgatatattcataaactgattttttagacttcaatacaggattcttttgaagacttctcgttgaaactgcacattccgaccatgaaccaaaatctgatcttgaatttacctcctgatcagggcaatacttcatttgaggagaaatcccttc

SEQ ID NO: 101232 - DNA, 837 bp, Mimulus guttatus
  Intron number 1 from transcript mgv1a004935m (locus mgv1a0 04935m.g) derived from phytozome v7.0 (chr-ID scaffold_37; pos 1004566 to 1005402 reverse strand)
gttttgtctttggcactgcttcttctgcttatcaggtttgttttttattttttaattattttaatttaaatttttctgataattaatatttttgttacatttttttttcaatttgcattcacacttgaggtatatatccacaaagttctgctgcattatttaataattctttccgtttcttttcttttctattttttttcattatctatttttcttcttttgataatcatcaaacataagtttttgattcttttcttgtagtttgatttgattggtcaattgaaatagtaaatttatagatttgtattaattatccactgtcattattaaagaatagctcaaatttaaagttttaataattcgaaattaattgtcattaaattctaagaatttatttctatgtacttcaaatcttatataaattcagatataacattaaattcctattcctatctttacaataatttgtgttcacatgtcaatttgaaattaagttttcgaataagtcgaaactaaaaataaactcgaatatctcaaaagaatgatcgttcatagttcatacttattgtatgattagttagttccaacaacatttttgttgacaaattaaatatcttctttattaatctttttatgcaaatcatgtgtatatcaatactagtaattctatattttaatgtaacaattttacagacatatatttataaataatctaaaacccgaaaatagaaattaaatttctatcatataaaacttgtctggtttattagagtggctggtttagtaattaactatattggtaataaatttgattttttttttattatatttttcagt

SEQ ID NO: 101233 - DNA, 812 bp, Mimulus guttatus
  Intron number 1 from transcript mgv1a007686m (locus mgv1a0 07686m.g) derived from phytozome v7.0 (chr-ID scaffold_121 ; pos 224439 to 225250)
caaaaaaaaaaagaaataaaaaattcctgaatcaggtaattgtttaattttgtgtttgatcgaagaattttcgtgatttttttacagtagaagaaatggaagctgaattgaatgagtagaaattacgaagctggaagttgcaataattaggtcaacccagctacatttattgccgtgtgttgagtgttttttttttttttttaattagggtgcatttattagcgtcaataaatgaagtaggaattgtttctgtgttgattctatatttggtaaattgtgttgtttttatttggggcgaaattcgcgatggaattcagtttgagctgaaaggttaattatggggaatttgaattaatcgcgattagcaaattttttcgtgttcgtatttgcagttttaatctttcgtttaattaataagttctcgatgtatacttatggtaataatctgcagaaaaaaaatatgttttaagctccgattcataattggctgtgaagttcaatttctagatattttgacttgctttgatttttatttatttttctaatctgcgtcgtttttcgatttacttcgttttcatggatgctgattttgattgattttagcttcccatgcttaaattcagtaggttttaataccattaatgaagccacttctgcatggggtatcaagaatttgattggggtttttttcttcccttgatttttcagccttacaaaggcttattcgatgcgaattaagttgctagatttgtggagtttaagaagttctttctctctctgacagacagacaaacacgcagagagtaataaaa

SEQ ID NO: 101234 - DNA, 868 bp, Mimulus guttatus
  Intron number 1 from transcript mgv1a011994m (locus mgv1a0 11994m.g) derived from phytozome v7.0 (chr-ID scaffold_85; pos 853325 to 854192)
tttgaaagccctagtatgtgttctctttcttcttttaccccctttttaattgatttattttgttgttgattttctctctgctgctatttgtgatagtttactcttttcccatcttacagtgaatggagtgaaggatgaaacataaacaaactgatttattatttaggaaatatagaaatgacctttggccttattcgatctcttgttaatttaatcatctcctcttgtatgtttgaaaagaaatagagatatgatagatctacagcaagttctcttgttaatgtgaagagatacgaacttttgcgattttttccattttttagtttgcaagtttgatagaagtttacaatcattctaccattttatttatttggttgtttgaaagagagtgagtttatatagggttgagatggtgaggaaggtgaatgaatgtgttgctctttgttggcacatatatttagggtaaaggataatgtgctgtggaaaaaccctcgatattggttgttgtgagttgttttagattttcagaagggtatcaaatggtacttatcaaaatataagaaagtttcataatctccttaccaatggtgactggtttgaactttaagtaatctaattttctaaaccttctttattttcagctacttaatcattgcaacatatgttttatcacatttttttatagttgtatccagttgttcaaaatttaaaattggttttatgtgtttagtacacgctgtatggtgctgtaggttgaatttgtaacaagattcatagaagtatagtctggtttataactgttgctttcttttaataatcattttttgattttgttcccacagctcaagacaagattgcagatttcgag

SEQ ID NO: 101235 - DNA, 410 bp, Mimulus guttatus
  Intron number 1 from transcript mgv1a006281m (locus mgv1a0 06281m.g) derived from phytozome v7.0 (chr-ID scaffold_278 ; pos 69340 to 69749)
cctaggtatttttcgattcggcttcttcttcttctaattatatttctctctttcaatttcgttgtgcctttttaaatggtaattgccgataaatttccatggttaggctccttaatttttgcaattgttcgtgttttttatggaatttattttggggatttccgtttaatttgtttcaatgtcaagtaattgggggttcccacggctgatctaggttagagatggcatgttttgatgattttgttttgtttcgacaagtaattatataactggtttctgaattaaaacggttaacgttgaagtaattgaaacatgtttcgaattctcagatttttgtttgatttgtgaattctgatatacatcgatttgtatgtgtgtttgcagcgataactctgtgggagtagcacacg

SEQ ID NO: 101236 - DNA, 642 bp, Mimulus guttatus
  Intron number 1 from transcript mgv1a022561m (locus mgv1a0 22561m.g) derived from phytozome v7.0 (chr-ID scaffold_288 ; pos 243401 to 244042)
ataacggttggttttctttatctatttttactcttatcttaaagtttatatgtagaaatatttgggcatttcggagagggtaaagatgtcatttattgagattggattatattttaaacgaacaaaaaaaacaattagagaagtttaggattgattcgagcacggttcaactcaattaaaaagatcaagtcagctcagctcatttacgtcgttaatcaatctaagtaatctagttagacatacttttgagggtgcatttggattgagcgatttggaagaggatttgatttggggaagtggatttgattttgtgaagggatttgaaagacaccaatttggagtgatttgaaatctaccgcaattgctcaaaaaacaactaagaagaaaggttgtgaatttgaaattcctcgtcaaatccttcaattcaagcaagtgcaaggatttgttattatggatttgaaatccctccatccaaatggaccctaaatgttttaaaggaagttagttgtggttcacccttaattttagatattcgagttaatatcttgtttacttgctttaagagattgatgttactaatatatatatcattcttggatcatgctaggagttattcatcggaggtacggatagcagcacaac

SEQ ID NO: 101237 - DNA, 297 bp, Mimulus guttatus
  Intron number 3 from transcript mgv1a003646m (locus mgv1a0 03646m.g) derived from phytozome v7.0 (chr-ID scaffold_51; pos 1354581 to 1354877 reverse strand)
gggcccacaggttcaggtaaattacttcgtgactggtttctatgttacgtgttattttcaataatgagaaaatattatacaacttttgttttggaaggatttaattttgaggcttttatttagtttcgtcggtgttcttagataggctttattttgtttctatggttcttgatgattttaagcatctaatttgaattaagtgcaattttgtatattctgtatactgtttcactatgtttcttcgatgtcatattaagaacagggaagacattactcgcgaaaactttggcacggttg

SEQ ID NO: 101238 - DNA, 212 bp, Mimulus guttatus
  Intron number 1 from transcript mgv1a017052m (locus mgv1a0 16938m.g) derived from phytozome v7.0 (chr-ID scaffold_30; pos 1766630 to 1766841)
aagcggaagaaactcgattccgcaccttcttccaggtaattaattttggtttcatgttttcgggatcttcttcccatcaatatctttttttttttgaattttttttccgcaagagattgtagcaatggtgttatcgaattgcaatacgttactgaaaccctgtttatatatgatcagcccttcttattacacacacggcgtcgtaccagccg

SEQ ID NO: 101239 - DNA, 856 bp, Mimulus guttatus
  Intron number 2 from transcript mgv1a017168m (locus mgv1a0 17168m.g) derived from phytozome v7.0 (chr-ID scaffold_36; pos 1419094 to 1419949)
tttctgtaagcatacttcattttttttttctttttatatatatcataaccaagattctgtattttctcgacaattagttgttcttatatgccctatttgattactcgggttctaatatttcgtcgcaaatgagttcaagttaaatcatttcaggatttctcgtgattttttaatttgggatttattgctgcctttcaatcggtgattttttttcatatctattctcgtttgtttgccttttttttctcaccatacgtttaacaattcgagaaggaatgttctgggaccagcctaccacctgattagttaggcttcaattgtctacatttgcgggcgcacaagtattaagaaagaggttatgttttttacctaactggaatgtgatcccgtagtatcaaaactattattcttttaataagaattgtattagttttttgttctcatgcccatcttaaacatacaataactgggctgaaaaatcattttcgttttagtttcttgatccttgctaaggtgttatcaagaaacgacgatattttctgctaaatttatcttatttacggacctaagaagttagcaataaaaataataaagtctcgggtcttaattaattacccccttttctttacttccttagatacaagatgctataagttactacttactaggaaacgagctattagtctttatcgaacaaggaggaactctatggcttaaattcttagtatatatatatttcttgtttgcacttttggggtgggggtgattagatacgaattacgatatctggatctcttccttatacattgttcattttcttatttcagaaatagggctctctgtgccccgataacag

SEQ ID NO: 101240 - DNA, 778 bp, Mimulus guttatus
  Intron number 1 from transcript mgv1a024666m (locus mgv1a0 24666m.g) derived from phytozome v7.0 (chr-ID scaffold_266 1; pos 4023 to 4800)
ggtggaatctatttaccgagattgtgtttatccaggtttgtacgtacgttgtgcttacgttttcggggtttcggattttgggtttttgagtttttgagttttcgttgtactctttcgggctcgaataaaatctgcattaataaatctaataataaaactttaactttatcgtttcagaattataattttacgaagaaaaaattaatttgaatttttatttcattggtagtgtaaacatttgaataattaaatcatgtgttatgttcattgcagccataatatatattcactgaattttcaattttatggtcaatatttcacttgctagaatctataatttgctgcatgcatgattccaaatttattgttattaatcattgaagataaatatataaatatataaagaaaaaataaaaacatttccatgaaattagaattttttttttataataaaattgaaatcttgaaaagaaatttgaaaacatattattgcatattcatctttatatatgtaattgttggaagggaattaattatatgagaagaaaaattgcatgtcattaaagtcaaagttttattattggatttattaatggagggtgtaaagtgtacatttgatactttattgggtaattgttagaactcctatactttaagggtgcaaactgtatttaactatttatattttaataattcatatattaattaaattttacaaaaaaattaattacttttatttgcagttaactcaggaaagagtttggtattgaagaaatat

SEQ ID NO: 101241 - DNA, 606 bp, Mimulus guttatus
  Intron number 1 from transcript mgv1a008867m (locus mgv1a0 08867m.g) derived from phytozome v7.0 (chr-ID scaffold_58; pos 989363 to 989968)
aaaccgggctttctctctcctttccattaattaaggttccaatttttttttttttttttttttttttccaaaaataaataaatggtgatgaaatgaatatcaagggtttgtattttgtttattgtattgttttgtttctaaaagggatttctgtttataagattcttggatcttttcttattgttgcttacactcatatatatatatatatatatatatatatatatatatatatatatatatatatatatatatatatatatatgtatatatatgtgtgtgtgtgtgtgtgtgtgtgtgattttgggcaatttttacttgttctaatagctggtgatttaaagcattgcttcagtagattttgacttcgatttacataaatataaacgagttcgaaaatcccgaaatcagattcttcagatgatttaattgatttagacacagattagatacatcaaaatcagtgtctaaattttttctcttgcataagcagttcagcatagcaagtcacagatgattaatttgttgttacgataaatgatcgttccgttttcttgatttactcttttcgtctatatataattaaaacagttattgaacgagata

SEQ ID NO: 101242 - DNA, 768 bp, Mimulus guttatus
  Intron number 1 from transcript mgv1a001518m (locus mgv1a0 01518m.g) derived from phytozome v7.0 (chr-ID scaffold_104 ; pos 568741 to 569508 reverse strand)
aactgagcctaggtatgcctttttatctttactataacttggtcacttagatgatgtattcactacagtttgctattcttgagatatgacgctagagatatttttgttggagtgttctttgattttccagccttatggttgaaacttgaaaggctttttctattagggtgaagtttttttctaatgcgtcgacagtagttcgtctccattgtcttcttttaacaattttttaccaatttaagtaagaattaaaaaaaaaattactggtcatcattgattcagaactaagattggtatatttttttaattgttttagaataccaggcacatattaaacttgacatatgtaatttgaactttttagctttgtttgatggccttgttcgttgaacatttaagaatagtactttcggaatatacaacttctaattttagagagtagagttgaatggtgcactatttgtgatattttatgtgtgggggtatgcaattagaagttaggtcaccctgaacacgagtttccggtaaaagactcaaagtttgatgcacaagtctgatcattttttcttgtaacattttatgtccacttgggtttcattgttcatttatacaaattatacgcacttttcctttcatctctacttaccatgcgtgtgtgtgtgtgtgtgtgagagagagagagagggtatacatgtgtggatgtgtctaggtctgtatagcttacataaattatttccctgtcatccaggagggtgccacactggaacc

SEQ ID NO: 101243 - DNA, 541 bp, Mimulus guttatus
  Intron number 1 from transcript mgv1a008117m (locus mgv1a0 08117m.g) derived from phytozome v7.0 (chr-ID scaffold_210 ; pos 281095 to 281635 reverse strand)
gctctcccggtaatatatagttaaacctctataaattaattaattcagcctcgggcagctaatagtttagtacgtttttaccgagtcgggagcataagaaattattattacagtgaagttattaatttatcgaggttctagtgtatattctttcaagaatttgttcttggagttggtggttatgatcatgttgtaggtttcttgtttttttcgagtgattgtgctgaaattagtttcttttcagtgattgaaattcatggctctgctatgtttaaaaattgttaattgagtcatctatgtataatagcgttattcagtttacgtagtagtttgatctcagcgaagccttgtatgtggaaccttttggataaattacgtagtagtttgattttaacacacaaccctttttgttcgggtttgttcgatatgatattggatgaccatctcgtttaaaagcctggctagagttaagagttggtctaaatggtaaatgttgtcgtatttcggtactgagacgagttgctacatatttacagatttg

SEQ ID NO: 101244 - DNA, 709 bp, Mimulus guttatus
  Intron number 1 from transcript mgv1a003237m (locus mgv1a0 03237m.g) derived from phytozome v7.0 (chr-ID scaffold_112 ; pos 831392 to 832100)
gctgaatccccattttgcccctgccaggtacgctgcgcttctcttgttaccgtttcttttttgaaattttgttatatttgatcatatgtgtttttttcactgttattagggcagaatgtagattattcaatccaatttgtactatggtgcattttcgtataaaattcctacttattattgtaatttgtgttcttgctaaatttcagaatggttatgtttacaaaatgattttaaatttgtgtgaaagtttccgtagaaattcgcatttcaaaactgattctagttgtaactatttctctttgttcagagttcttttttctatctgtttggttatgttagtggaacatttaactagtagtacatattcgagtgattgttcatgtcatgaagtactttttttacatccgagaaatctctggtttatcttactttgaagaggattattcttttttttttcgtgattcaactgcttcttgttcttgatggtaggctgatcaggtttccgtttggtgctcaccatcaaattcttggagtgtggggagttcatgtgatcactacaatataacctttatagactatagacaattactgagcctattacgacttcataaaatatgaagaataaaatgaatttctcagagttgatgttcagtagatttactgttatttaggtatttgaaaaatgttttttcttatatttgcaggctcg

SEQ ID NO: 101245 - DNA, 658 bp, Mimulus guttatus
  Intron number 2 from transcript mgv1a013467m (locus mgv1a0 13467m.g) derived from phytozome v7.0 (chr-ID scaffold_18; pos 1430200 to 1430857)
tccaccggtggcttcaatcctgatcgagtcgccgtgtaggtttaacttttttgtactcgtttgttttacgattaagttattgaatttggttgatgtgtatacggagggcttataggtgaatggttgaatttgattagagtagtttccgaattgttgaacttgttgattggagcctcatttaggcgatggtcgaaacttgaaccagttagttgttttccgatttccattgtgaattagtgctagctgggaaaaaaattatactaaataattatcttacaattaatagaaatggaaactgctaagaagactaggtttctagcttgactcttggtcgagttttataaattattgtgttgctttttgtttcttatacatctcccttttagatcattgattttaatgatgactttacatagatgaagatactttggcttaatgaattttgcccattgtcactgcatccattttcttgcctttgggtgtttttggcctacttattgcttctattagtgggtatttttgtcttttgtttcttccattggttgaacaatctggtatgtatccttggtttcgagaacataggcagaagctactgttgcatggtactcttgaattttttttttaatccttgctcgttttgctgccgtaggtactgtaa

SEQ ID NO: 101246 - DNA, 548 bp, Mimulus guttatus
  Intron number 3 from transcript mgv1a009531m (locus mgv1a0 09531m.g) derived from phytozome v7.0 (chr-ID scaffold_212 ; pos 394734 to 395281 reverse strand)
aacgcagtggtggttctgaggaagagttatcaactgtatgtttctatataccttaataagcctatactatagctgtgttactgatgcaagattatacctctatattgttctcaactttattttgtgtacggtaaacacagagtgtatatggtgattattaatgcatttggtgttggaggcatttaactcaaattatgaacaatttctgatagcctaacacatagtgttgcatgtgcaccttgtcattttccatttaacatatgcgagcagattattgggcatattaaggatctgatgtttcttccattctgttgtttgactaaatgaacttaatacactcttgtactatttgacaaaacgagcagtatatactgttgctgtgtcggaacatagtgtgcaagacatttgcttgctacctataatgatttttaattcatttatgcagttttgcttaattaatgctttgtttgttgcccttttctattatgtttctctaatttcttattatttcaggtatttgagaaatcactgctgtgcactttttcaag

SEQ ID NO: 101247 - DNA, 1036 bp, Mimulus guttatus
  Intron number 2 from transcript mgv1a011303m (locus mgv1a0 11303m.g) derived from phytozome v7.0 (chr-ID scaffold_207 ; pos 261812 to 262847 reverse strand)
tcaaggccccgtcattaaaataaagcaagaatacggtaattaaaattatttttttcgattgttacgatatgaatgcatgatgttctattttttgttatagtagatgtatttaacaaccactctattaactatgaatcttcttacatgttcatccttgcgggtgtcaaatttagtggaatcgtctagattgtgtggaatattctccagtctgtacatgttttacccctttcgagatcgatattttgaaataagatggtcataagatgcgtttcttggcttataaatgtcagagcatcataaactgcatttttgcacaaaacaagtacatactagagaacatttcacggaatgtagaagattatgttgaatttaacaccataagaatggacgtgtaataagaagattcttagttgataggcgattataaatacccaaacatgaatcgtttttttttttttcttttctctctgtaatttgactttatctatggtcgtaatttaccctatatacatgtacacatttttaattactttttattctctttcgtttgactttacatgtgtacttgttcaatctttttgagttatttacattgttcatccgttctatcatctatgttatatatgatgaagtgtacttatattgggtaaatgttacactcataaacacgaatgtatatttttgtgtagcataaacgaaaaacttaagagtgtattatattatttgatgttatagaactcttataatattaggattctagtatgattcagttacctaaattagttataatttagttacttaattacactttattaccttgaaatatttctttacatatattcaacccataagttaatgggagtttctattacatattatttctctccttctccaactttattcttccaggttctatttgtcatgcaacaattttatttttttaattaataaattggataaataatttcctaaccatgaaaaaacatatatatgtattgcagattgcgaagaattagaagaagaaaaatcgtcgatt

SEQ ID NO: 101248 - DNA, 854 bp, Mimulus guttatus
  Intron number 2 from transcript mgv1a009551m (locus mgv1a0 09551m.g) derived from phytozome v7.0 (chr-ID scaffold_1; pos 1430473 to 1431326 reverse strand)
aagtttcattgggtgctattacaagcttctttcaggttcgttctatgttttaatcggatttctaacccttctttttcgtgagatgtcgtctgagttcaacacgttagcatttgcatacaaaaattattgttctataggaatcaattagtttcgaattagaggtttcagtccttaggttaatgtaatactgaagttggttagccagtgaatgtagtaaaaagtatggtaaaagaacactttgtaaatgtgtaatcaatgatgaaagaagtaataaacgaagaaatgaaccatctgtaaagttgattgcccatttatgacaaatctatcgacacaataaatgtagatggtacagaagttggcactatggatcaaatggatcaaatcaaattaaaatcaagatattgtaaaatcaattatcccgttattcttaattattaatcatcgttagaaaagaccaagagaagtattatgtcagcctgtactataaaatagcttcagccctgacagaaacatcatgcaaataaacaatggcaaaaacacagaaattgttgttactctgttttcttccaaccttaatcactgtgctaaacaaagtcgaacttgtgaactccaatggtttgactataacattgatccatccaaactcgcccgaatcgccttttttccggaaaaatatctcttccgaagagagaatcaaaactttggtatcccaatccaatctgcgcagtaactatctgactaaaacatcgtcttattcaatcatgcaggctaaggcgcaactatatcattacacagtcaaagtcgggatcgggacattcaaatccaaaccaccgtacaaagagtactatttggaa

SEQ ID NO: 101249 - DNA, 488 bp, Mimulus guttatus
  Intron number 1 from transcript mgv1a009551m (locus mgv1a0 09551m.g) derived from phytozome v7.0 (chr-ID scaffold_1; pos 1431394 to 1431881 reverse strand)
tacatctctacagccctcatcgtgtaagttttactcatgttcttcttgtgttaagtttttcttaggtattctcacttcaaaataatgcactgtttggggaaaggaatacagctgcttaagaatttttacaggaaaaggttgtggctaattcgtaattgtgttaagattcaatttctcaagtaaagcatcaattttgtaccagaaccatggtagaatttgcatatagagtaagaagaacttttgcccttaaactgtttgatgttttgtttgttcccctgaacaattttttttcacgtgtttttcgctcctgctcgttaatgttgtgcacggtgcctaaatattgcggttctaaattgtgaaaagaacttatttacttttagccgtagttatgacattttctttttgattacggttatctgcagtttctcttcaaaatgttataaagaagttcacgatagttaacatattatgttatttgtgattgcagc

SEQ ID NO: 101250 - DNA, 345 bp, Mimulus guttatus
  Intron number 2 from transcript mgv1a013405m (locus mgv1a0 13405m.g) derived from phytozome v7.0 (chr-ID scaffold_125 ; pos 235075 to 235419 reverse strand)
ctcaccatttttttagtcggtaagttttttttttttaattttgttttccttgcaacatataaaccgataatatataatatatgattttattttgaatattcttaattgtcatataaaaagttaaacaacgtgatgatcttgtcgcttttcaatgggccgtgatcgaactagattcaaaataaattgttgtggagacgtaaaatcttgcgtgagaatacaattagtacgattattgagtacaatctttttcttttctttttttttgcttcaatttcgttctcacttggcatatattcttttgtttctgcagtgccgtttctggtctattcgacttgagctgcattt

SEQ ID NO: 101251 - DNA, 409 bp, Mimulus guttatus
  Intron number 1 from transcript mgv1a013405m (locus mgv1a0 13405m.g) derived from phytozome v7.0 (chr-ID scaffold_125 ; pos 235466 to 235874 reverse strand)
atcaattggataaatcaggttagtatttttttacaataatttgtgcaataatttgtgtccattaagaattgaattatacggttggtggtgttgactttgttaaacttcctaattaataaaaaataataatacttgaagattatataatgtcgaaagaatcaggcaatcgttacgataaattagtcaaatgattagacagcaagaccgtattatactatacggcaaacttggatttagatatgggcaaatggggagttttcttttatttgactgtgttcgtttcattacatgaaaaatccctaataataaatcgctgtcgagattttgaatagagtttctgaaaaggtaattctttatttgcttgcgttttgcagcgcttgagaggaggtcaaagaggccagaggcaaca

SEQ ID NO: 101252 - DNA, 643 bp, Mimulus guttatus
  Intron number 1 from transcript mgv1a004239m (locus mgv1a0 04239m.g) derived from phytozome v7.0 (chr-ID scaffold_166 ; pos 461078 to 461720 reverse strand)
tagtcacggtcacaaaacggccgccacttcaacaggtatttttcaattttcttcttcctttttttttatttttatttttattttttattttaaaagaaaatgtagttgcttatgcttccttggattcaatctgctgtagtttcttcatttttttctatttgttttgtcaagatttcatttgggtttttcccccttttttcgttgcttatcaaaatttgttgccattcagtaatattatcaaacacataataggcacaaaactatcgcacattgataactaacgatttctatgtggacgaagtcttgccattttcttacaccaattttgaatattctgtctctatacgtgtaatctaatgatttgtatgtgaaaatacttttgtgcattattgtttttaatttactaaaataaaacccttttcatttaattgatcaatttctccttctttttatgcaattgtgcaattcaattttttttttttttttttttttttttgtgcattattgttttaaatttactagaataaaacccttttcatttaattgatcaatttctccttctttttatgtaattgtgcaattcacaattttttttattttatttttggattggattgattcttgaagggcacgaggtgcacat

SEQ ID NO: 101253 - DNA, 445 bp, Mimulus guttatus
  Intron number 1 from transcript mgv1a009084m (locus mgv1a0 09084m.g) derived from phytozome v7.0 (chr-ID scaffold_167 ; pos 180496 to 180940)
aagtcacaacgcttcccccgccaccgcctgctttggtaatctctctctcctggtggttgatttatgactagggttgttggttttgattattttccgtacttctatttttaatttttaattttctggtttgggtgttcgattgattggattttacagactattattgctgcattttggtattgcccgattttttttgttcgtaaaatctcgtcttctcttattgaaatgattcgaggaatatgtattgattgtttgaagatacttcatcagttggtttttgataaagtttccctatggttggggcttttttatttctaggtgttggattgattcgatcaatgcctttgagaatgtttatgaatgtgtcgacgaactgttgaatttaagattggtttcgatttttgtgtcagatattggcgcctcggttggggtatttgcctctgtt

SEQ ID NO: 101254 - DNA, 709 bp, Mimulus guttatus
  Intron number 1 from transcript mgv1a003971m (locus mgv1a0 03971m.g) derived from phytozome v7.0 (chr-ID scaffold_32; pos 509455 to 510163)
gccagcgcgtgcataacactggctcacctattactgtgagtttcgaagattttcgtttttgttctatctgtggactgagattcgcttaaatattcattgttttttattttgtttttcctgttgtggatatgaaaagtgtttgagatgtttgactagatctggtctatgatgtggttcggaggtgcttatagcttgatttatggtgtactttggtttaggtgcctttggattatttatttctgttcattttatacaatttgttcgtaggtagaacaaccttttgaatatttggctttggtatattgagatttttgttttttgttcatgttatgagctttgccaagagtaatttcgtatattatggtttgattaatgtcactgaagcaaggatgcttcgttttggaatattaagttctcctattagtatgttaaagctattggtaatatggcttttgcatttcctgagtgattggttttcgttgggtaatagtacctcctttgcacatctataaacatttgcaatttagggtttgaattagaattcttttgttgggtttcaattggccaatgtgtgcttgtttgaagtgtatggctgcttaccttgattatgccttgattatgcttattttgtttgtcaaatgtcaattgcttaatatttctcatgtcaatcataggtacctgtcggcagagccactctaggtcgcatcat

SEQ ID NO: 101255 - DNA, 358 bp, Mimulus guttatus
  Intron number 1 from transcript mgv1a003554m (locus mgv1a0 03554m.g) derived from phytozome v7.0 (chr-ID scaffold_228 ; pos 338444 to 338801 reverse strand)
gcctcactcaagccaacaagatcgacgcccaaaaggtattgtttatttatcaagattgattgaatttttttttttattatatcaagcttcgtgtatgtatggtgtttgttgtattgcctcattgaaaaaccatccattactgtagtatcacagattcattcttctgtgatttaacttaatattgcaagaataaatttccgtgttacaatctgtgcaagaatctgaactttaatttgtttgattgtctcgtcttattcgaccgtacattagttcgtatgtgattgtatgtgagcttaataattctttcgaaaaataatgtgtagatctcatttactgcgaaagagatcgatttggttca

SEQ ID NO: 101256 - DNA, 652 bp, Mimulus guttatus
  Intron number 3 from transcript mgv1a019301m (locus mgv1a0 19301m.g) derived from phytozome v7.0 (chr-ID scaffold_195 ; pos 295814 to 296465 reverse strand)
aagtgagaaaccggttcaatttattgataaattgggtgaatcacggtcaccccttgagataagattaaattacgaaaaacccctcatgactgggttattacaatcaccctctaattatgaatattgttacacgtccacccttgcggtgtcaaatttagtaagaatcttctaaattatgtggaatattctccagtttgttttaccccattagagttccacattttgaaacaaaatgattataagatgtgtgtctcttggcttgtaaatatcagattgtggtacatcataaactggttttttttttttttttttttttttttgcacaaaacgaataccaactagacaacattccacgaaagctagaagattatgttgaacttgacaccataaagatggacgtgtaagaagattcatagttgatgagtggttgtaattacccaaacaataaggatttttaccctaaaggggtggccataatttacacttttgatatatgttatgatttgttatttagggaacttaaaaaaaaaaagaaaaaaaatactttttggaagttatgaagttatgcttcttgtatttgtatatccagttgttcttatttaaatttggttgaacagaaaatcgaactagatatatacagtcctagtaattc

SEQ ID NO: 101257 - DNA, 507 bp, Mimulus guttatus
  Intron number 2 from transcript mgv1a005492m (locus mgv1a0 05492m.g) derived from phytozome v7.0 (chr-ID scaffold_131 ; pos 612637 to 613143)
gacggttagattcagatctccttctttctatttttttcattgatatgttttgtttttcgtttcaatctatggtttgcatggatctggtgtttaatcgatcgtgattttgtttgccgctgtttgtgtatgtgtgcgcgatggataatcaaatcgtatttctgtagaaattataatttgaattgtttttatatgttgatttaatctaataagaaaaaataaataaaaaaatattatctgtggtaaaggagaaattaaaatactttaagatctcaactttttagcttttgttgcagtagtgcctgttactctgtttgtagatattttgagtaagagtaattgatctaatctttctatctatatattcatgtgtgtgtgtgtgtgttttggggtcaatttgtttgatttatttcttaaatgtctgatttatttattgttttgatcttgtgtttatatacaattgattattcgttttattgaaatctctgtgttttttcttttcttcaggag

SEQ ID NO: 101258 - DNA, 775 bp, Mimulus guttatus
  Intron number 1 from transcript mgv1a016902m (locus mgv1a0 16902m.g) derived from phytozome v7.0 (chr-ID scaffold_51; pos 427355 to 428129)
actgagctcgccaagccactcactgcctactgcaggtttatttcattaattcactatttttttcttttattttgagtggatttttatattgttttttatagttgttgtaattttttgttttcttatatcatttgagttctcaaactataatttattattattatatttggatgtgtttatgggttctctgacagagatgaattctaaggatatctgtcactcacacctgagattcagcttccacaataagggattgaaaataataatattttatttttaaatttatttccaattttcacgggttccgatgcgaaatttttttactatggaacaacctttttcattccgatttccaaaatgtcaatttcctatattttctgaattttttggattgaaatttgaattacataaaaaaatatttagaatttccgatccgaattaatttcagaaaatttcaaaaaaaatctccgatttcaatttccgatatgattatagtttcatgttaaagaagaacacaaccacagatattaagtagctatcttgagtgtgtatttagataatggtttgttctctactcaagtcattgttataaacttacaagaggtattaaaggtattcgttttcgattgtgtcactttattcttgcttcgttataaacatttatcgatttttttgttcaataattggtagaatagttcggaattttataacaaaaaaagttacgttttttttttgcggtgcaggtgttggaggtccgggacatttcccctgtgtg

SEQ ID NO: 101259 - DNA, 928 bp, Mimulus guttatus
  Intron number 1 from transcript mgv1a013063m (locus mgv1a0 13063m.g) derived from phytozome v7.0 (chr-ID scaffold_4; pos 841797 to 842724)
tgtaagatctagatccttccttagcgtgctctctctctctctctctctctctctctctctctctctctctctcatcatttattgctcgcaatctgaattatttctccgaaacatatgaatcattttgatgattagtcgattgttttttgtgtaaattaccttgatgaatactggatggagaaagttttgagtttcatgttgaaacacgagagattaaaccctaggtacctttgctgtcagtttcatgatacattatcaataagattcaacattccaatcagccctccagcttgagaaattgttgtttcaagtgttgttatagtttaaagcttcctgtagaaatttcaacattttgttacagaattcagaactaactatatcagatgtagtgttaacactattggcaggtcgatattctttgtcctaatcaaaatttgtggaatgcagttactgaaatagttactgaaattgtttctaatgtttaattgactaatgaaaatctggtagataatgaagaaacggggattcggtattaatctctaagttgcatactaattatatgattggaaaacatgcatgcaagaactccagatgatatgtatgaacacgtggtatgtaattatagttctgttctagttagacgacgggacttcgaaggatatctttgtgccttagaaaaattcatccaggatagcatattattctaggattttaaagactgaaattctagtgatacaatcactgcaagtgagttaaaagcttatccctgccactgatgattttaaatttctctttcttacagaaaacatacattaaaagattattccgattctactttcatatcctctacattattttcaaaattttctcaaacgtgcaatttcttggtccagggtttcgaaaggagtgagagatatacccggaaact

SEQ ID NO: 101260 - DNA, 651 bp, Mimulus guttatus
  Intron number 1 from transcript mgv1a011983m (locus mgv1a0 11983m.g) derived from phytozome v7.0 (chr-ID scaffold_96; pos 791203 to 791853 reverse strand)
caggtaatttcatttcattacagcaataaacttttatatagtttcttcacgttaatacatcttaattccgaccagattttatgaatctaaaaattatagaaataatcatggatttgtaaattgaagtagcctcctcctcaaatgggattttttttttaattaataaatttatttttgtataatagctcattatattatattaataatatgtggggtggggttgagaaaatgaaaactcaaatgggaataagataatgcacttcttatttgttttagtgctagttgctaaattaaaaataaataaaataataataaataataataaataataaaagatagtgctagttgtgccaacacgaggcatgttgcaatattttaaagactcaaactttatgaacctgttttcatttggatttttatatacaatttttaattactatatttattggagccctcatcatttttattaaattgaaacaagttgtgccctccaatccaagaaagccaccactacacatattttattttaatattatatatacatatatgtgtgtgtgttatatactatattactgcttaattaaacaatagtaattaggtgattaaaatcttgattttcttgattttgtagctccattaagaagttcacaa

SEQ ID NO: 101261 - DNA, 510 bp, Mimulus guttatus
  Intron number 2 from transcript mgv1a010577m (locus mgv1a0 10577m.g) derived from phytozome v7.0 (chr-ID scaffold_7; pos 2443230 to 2443739)
actggtgagcacattgctttttattcgtagtttcttgatcgtagttgcttcaaatcatgtattagtatctcgagcagaaagtttattgcaatagaattatgattgaacacctgaaattatgagaaaaattagcttcttgatcgtagttgcgccaaatcttgtattagtatctcgagccgaaagtttattacaataaaattccgaacgaacacctgcaattatgagaaaaatgacaagaaaatcgttggtggtccattgagtgtttttggctcattatttccgtggagccgaggcgcttggaaaagatctcggtttctttgttttgattctttcgacttttaattttgtggccaaaaacgttcgatggacttgatttgattctcgatgagattccgatgattgactatcgaacaaataatagaattttctccttttcttttaattttatttgagtattgagtgaatactagatttattgaacctattcaacgatgattttgttcggcagct

SEQ ID NO: 101262 - DNA, 425 bp, Mimulus guttatus
  Intron number 4 from transcript mgv1a005133m (locus mgv1a0 05133m.g) derived from phytozome v7.0 (chr-ID scaffold_11; pos 1845850 to 1846274 reverse strand)
ggttattcaagttctggagaagtgctaaattgcaagtacgctctaccgcttttgataggtatctcttgccgtgtgcaggataagtttaatgaattctcaaaatattctgtagaaaatttatgcttctcttttgttgttaaattgaatacccttctactaatttcccttcaccaaaacacatgatgcgctattgaggagtccttgtttaatatgcgtttattttgatgttcaaaagaatgctttccgttttctttttattctgtcttaagcaatatgcatgatgaattggacatgcttgttgagtggtgtcgtagaaaacttctctaaaatgtgcttttacttctatatatgagttatctatatagaaaccaaaaattttttgagtcctataaccagttttatttctcttctatattgcagcactt

SEQ ID NO: 101263 - DNA, 928 bp, Mimulus guttatus
  Intron number 1 from transcript mgv1a013385m (locus mgv1a0 13385m.g) derived from phytozome v7.0 (chr-ID scaffold_207 ; pos 193019 to 193946 reverse strand)
tccggatccttggtgtcacttcgcctggggtgcaggttagcattatttatttattttattctatttttatttattgatttactatttttaaactcgaataattttcttctttattttcgtggggacaaattaaaaaaggtcactgttttctgtgcatttttgtttgtttccgtatttttgtcgagctgtggggtctgctaccatgcgcatgcatcgtctttgctaatatgagctggcttgaactcattaataactaaagtctctttgatactcagatacccttaattgctaaattggtcacctaattgtttatgtttcatttttacgtgaatttttgttgattttaaattctgcgccgatatttaatatatatcggattccactaattttttgacatgtggcaattttaattaagtcttaactattaataaattacgcggattataattagggttagaggggttacgggttattctggttttttttttctttttttttcttcgaattattagaatcctaattatatttttatttaaactatgcacgtgtcaatcatcctatggcatccgattttcctattaaaacaagtcatccggtctaaatttgcaccttcagaagtatttaatttgggggcgacaaccccgaattatgcttaggattggagaattttatcatgtattacggaaccatttcaataatgcggaaaataaatatatatgtaatcgtaatcttgtttatcgcatctttactttaataaaccgatcgaaagggcctttagcttatttgactgttgcattgtagatcttgttttcttgagataattacttggttttaatttattacaattattgttgcggctcacgcataatgtatatgaatgcatgtatgaataggtatcggtggattgtacgatcgccattagcccgag

SEQ ID NO: 101264 - DNA, 1034 bp, Mimulus guttatus
  Intron number 1 from transcript mgv1a010093m (locus mgv1a0 10093m.g) derived from phytozome v7.0 (chr-ID scaffold_22; pos 837520 to 838553 reverse strand)
gcggcggcggccgtatttcaactcctcctccggcggtaatttttctctcctccgtctgcgtatttgaattacgaagtaaatttcacggcgcagagcttcgtctctgcgtaataaatacacagagattgtttgactgacggttcgaagttaaacggcggtgaaatgatgagatcctaatgcaatattaattttacttgtatttttgtttgctgctgctctgtttgtttcatttcgactgtttcttcgtcacgttcgtgctgctgtacttgattttttttttccatttttttcaatttttgtttattgaatcgcgatgctggattttgtgctatttgcagatgatttttgctaatgtcggcgattttcgtgaagtttgctcttgaattttttttcaatttttgtttatgtgtgaagttcaaagtgaatgatctggtttttttttttttttttattcaacctgttgtcaaaacgatgggtttaggggagatctgggtgataattagggtttagttctcgatttttagtggagcgattttcgacagtactttgtgggccatttacttgcttgatttagtgaagttgccgttaataacatgttgattatcgtttattatccatcggaatatgagatatatattagagttggtgtatatggtgtatatagactatagaatgatctgatagaatttgtcgatgtgaaattctggtaactagacttggttttgtgtgttcagttattatcgagtggacgactttatccatgtacggttttcccctacttcttgaatttgaataaacatttttgcgtttctgatacatttttgctacagagtctgttatttaaggctgtgaattattacgatagttgactgtgtaggaccacttcgtaaaacttgaaccagattttccgatttctgtctttgctttggcttgcttaccgttcacattacgaccagtcttatacagattaattctgtcaaaaatctcaattaacttttaactatgttcttgtattcttgcttcagtgtttcata

SEQ ID NO: 101265 - DNA, 788 bp, Mimulus guttatus
  Intron number 1 from transcript mgv1a006025m (locus mgv1a0 06025m.g) derived from phytozome v7.0 (chr-ID scaffold_140 ; pos 75870 to 76657)
ctcaagcttcatcactctcttaattactcttggtggttcgtattctctctctctctctctctctctctctctctctctctgtttgtgtgtgtgtgtgtgtttcccctaattttttgattgggtttttttgttaattatttttttgcaattgcttgtcaagaaatgaagatttatgcagtagaagatacgtgacttaatttttcgaatttatctgttttttttattctggtttgatcatatttcaattttgttaattttagtgttcttgatttttgtttatttttttctttttgaaacaatttacattgtacatgattagaatgtagtaattccttggtttgtctttttttttttttttactatcatcttacaaaaaccatcactaagacaatatttggctgtccattattagaggattgctgcaagataagatatataaataaataaataaataaataaataaataaaagagaattgcccttgtaaaaaagattgtatctttatatataacagatgtgatatagtgcaaatcccaattttcaccatgtttgatgatttaagtaaaaagattgtatctttatagataatagatggtgatatagtgcaaatcgcatataagtctcttgctgtagcaatgtgttttctctgttccgaattgggagaaagatggaattttttttttcggtgaaagggaaagaattacagttcgggaattccgatttgtttaatacgttgttatgtttctgcacgactttgtaggttgatattttcgccactctggttatttc

SEQ ID NO: 101266 - DNA, 458 bp, Mimulus guttatus
  Intron number 2 from transcript mgv1a000616m (locus mgv1a0 00616m.g) derived from phytozome v7.0 (chr-ID scaffold_26; pos 1072998 to 1073455 reverse strand)
accctggtaagttgcttattaacatttcttatcactgtttgttacgagtatcgtttttggttcaagattgtttggggatgttttggactgattttcttgaacaagttgatggtttgatatttgggcttataaaacttaattggatgttcttttgtttaatttattaaagatgtaattaaggttcttattgactatcctagggattgaaattcttgatttttttgcataaatattgggtttccaattcgcaagatttgtcccacgtattttctcctctacattttatggagtttatgctctattgtagaggttatgcatttttttgacaactaagaatttgattgtgccagctagctaaaatgtgatgtggcatgtctgtaatttgctggtaaaattggtctggcgaaaaaataaagaaccctaattatgcacatcctttcgcatttttgctgtaacag

SEQ ID NO: 101267 - DNA, 587 bp, Mimulus guttatus
  Intron number 1 from transcript mgv1a021515m (locus mgv1a0 21515m.g) derived from phytozome v7.0 (chr-ID scaffold_382 ; pos 12509 to 13095)
acttgcggcggtggtgcaacctggcttattgtccttttggttccggaaaacattttacttacacccttttcacctttataccatttgtatatacagaatattatcaaaaaaaatcttaatttttttacgtattttttaatctcaggggccaccgcgccacacccccacccagcccagcccaacccaccaagtgtttcggctactaataccctttcttccttagcaagataactactagcttcaatataaaaccattcaagataactgtgctcgtcgaaaaaccctagtcccttttttgtttactgtgttggatatattttaaactcagccatccatggattggtcgaaagtcgcaactgattggtcgaaagtggcaattgattggttaaaaatgatcccagttgaaggggcgtcttgctgccttatttcggcaatcttttgtgctgaagtagtattcttggaagggtttgattactttcttgtttatgttttcgttttcgttttcgtttttgtttgtttgattcctcgtttcattcaacttgtttgattcaacttttcttttctttttttatttcttcgttccaggc

SEQ ID NO: 101268 - DNA, 648 bp, Mimulus guttatus
  Intron number 2 from transcript mgv1a007031m (locus mgv1a0 07031m.g) derived from phytozome v7.0 (chr-ID scaffold_212 ; pos 405950 to 406597 reverse strand)
agcagcttccttacttggtcggcaacattgttgaggtatttattttgtgactttacttaactgtttgcttgatatgcccggtctctgtactctttacaagaagggtttttttgttgtttttattgatatctttggttggttgtttagacttttggggtaagacaggaaatgcaaaatgaattgggttttttttatacttttgggctagggtttcgagttttcgtgttcggtataaatgcacccgttggcatttgattattaacagtgcttggcttgtgcaattgaatgcttcagttttgtaatgttgtcagattttcagaagatttatatgcctccatttacgcctttcgtgcgtgcccgtagttattctatctttacagtttttatgtcattctgaataatatgcccatctaaggaaggtgtaccgacaataagaatgtttggtaactactatactattatccagtactaatatgatatctgctttggtgaacttcaatcggctctcagagtctgtatcatgagatctactaaggacattttatgcatattttgattatgattttctagatagcttcagtatcttcaggtatcggttggttttttgtggactcacgggatcagcacattttttctcagattttggaa

SEQ ID NO: 101269 - DNA, 818 bp, Mimulus guttatus
  Intron number 1 from transcript mgv1a021078m (locus mgv1a0 21078m.g) derived from phytozome v7.0 (chr-ID scaffold_3; pos 685677 to 686494)
ctgttttcttcaaggtatgtatgtgtgtctatgtaaattttatggtaaaacttatttacctctcaagtatagaaaacatcaaacacctcctaccgttagattttttcctaattccgttgttaaaccccttcaccgattattgcaaagaaatgttgatttctttttaaagaaaataccccataaatttttatatataggttgcttagttttgacaaatgttcaccggatttttcacttttttcagtccttttttttcactctattcagacattcttttttactattttcagctatttttcttataaaaaaaactgaaaagtcgaataaataagattgaagctttgcagattatgaatgtaaaccccacaaaaaagaaaactaaaagcactgaaatctaaaagaaatcgtaaaattggaataatatcatatgaaagaattgcatattataatgagaaaatcccccgaaaaagaaaactgaaagtccacgaaatcaaatactaagatcgacaaaaaaccttaatttgaacgaacgctaaaaatcgtcaacaatccaaaaatacgcctaaaataattagggaatacatcaaacataaagcagcgtaaaagagtcattgcacactcaaatttaacaccgtaaaaagtttggccattgacctttaaaactagggggtgtttgatgttttgtatacatagggggtaaatgatacatttcactatagtacagtggtgcaaaatgaatattaccttaaattttatagtgacaagttgcaattgtgtataattaataatttgaatgaattaaatgcagtggatatttc

SEQ ID NO: 101270 - DNA, 810 bp, Mimulus guttatus
  Intron number 1 from transcript mgv1a015937m (locus mgv1a0 15937m.g) derived from phytozome v7.0 (chr-ID scaffold_7; pos 102756 to 103565 reverse strand)
gccttcatccgcctactacatccacggtatatcataatttatttgcatttcaagttatttgttcataatcaatttttttgagatctttgtttgttatggggttgtctgtatatatatatgagtgaagaaggggcagatgatgtactaattcagaacggagtactcaattattattattgagtgaaatgacgctcaactaaataggaagatctgatgctctcggacacatttattttcttttgaaacaaaatatttatgaattttattttataataattgatatgaatgttaattaagcctgtgatgatgctttattcaagaaatgcatttatgcattcatgttgaaaactccattttgactaggacggtctgaggcttcatcatttttttttaaatttcttttctactttagagagatgagcttagcatgtggtttccatgtatgatgatacaaataatttacagttatccctgtctgagatatatctgctgaaaacatgtaatctgacatggaatgctttataagctcattactttgatttctttttgtataatcatttgaaaacaaacatttcttgcttaatactcagttttagcaagatgctttttgttcgtgtttacataatgtatgtaatgtttgtggatgatgagacaaacaaatcacagttatccctgtctgatacaaattctgttgaaaagtttgtgatctgaccaaacaatctcaatgattagatttaattatatatatctatgattgttatttacttgtgtaattgttaatatttttggaatgcaggtgcttgttcccaa

SEQ ID NO: 101271 - DNA, 848 bp, Mimulus guttatus
  Intron number 1 from transcript mgv1a023158m (locus mgv1a0 23158m.g) derived from phytozome v7.0 (chr-ID scaffold_243 ; pos 170754 to 171601 reverse strand)
tcggggttgcactaattcagacaagatcggctaaggtatcatttgcccatctaaccttatccatttgagatctttctttttccgtacggaatgtatgtgcatcaacatgttaaatctcacacagctacgtaatagtataactattttaagcctaatgagtcgacagagagttacttaccccggaaactgtgatgcatttgaacagttgtgccacgtaaatattgaaaattcatattgcattatcctgcaaacatatatatatatatatatatatatatatatatatatatatatatatatatatatatatatatatatatatatatattaaataaaaggtgaggatcaagaattgcgacggacaaatttgcatgggacagatttttttatgttaccctgctgaacttcttaatgctctgttttgctttcttcgtaacgcgattttgaccctttttctagtttgattttggcgaaattcgaaacacggaagctgtagttctttgagttagctttgtaatataattttaatcagctaaaccggatgacgggttacatgtggaattttagataactcaaaaacatcgaaattgtgggcaatgttcattgattcatgcatatcttttatcacccgacgtccaatcttggtgattaaagttggattagaaatctaactcaaagaactacaaattccgagttttgagttttttccgagattaagactcgaaagtggtcaaaatcacgtttaaagtcgaaacagtacgcgtaaatttgaaacgacatttaacacgtcccttttatgaagtaacgaacttaaatttacgttttctactttggtgcagacacagagg

SEQ ID NO: 101272 - DNA, 310 bp, Mimulus guttatus
  Intron number 1 from transcript mgv1a012217m (locus mgv1a0 12217m.g) derived from phytozome v7.0 (chr-ID scaffold_267 ; pos 70823 to 71132)
gatatagagtaatcccatctccttcttcttctcatctcctttttcagtattaattgtgtgtatgttttttaactaattgattgcctcattctcttccttaagaaaactgatgaaaaaataattagaatggaaaggggatacagaattagagatttatgtttactatgaacttaaaaatatccctttacactacagagagttgagtgagtaatcaaaactaacagtgtttgttgcccctacgcaacaccctaattattgctatgaagttacgagtatttatttataaatgcgcaggttggtcagagtttcg

SEQ ID NO: 101273 - DNA, 883 bp, Mimulus guttatus
  Intron number 2 from transcript mgv1a024206m (locus mgv1a0 24206m.g) derived from phytozome v7.0 (chr-ID scaffold_20; pos 185443 to 186325 reverse strand)
ttttacatcagaaaactcagccctattgaggtcagaataaaaaacaatttgaatttaattgttgatttttatttattgaatctatgaaaatctgatacctattagaaatcattaattaatctatatatgtttggagctttgaattaattagtgttcttaatttggtgattatgtaaacatgcccatttttttatttatatttaaaaataaaataaaaattcagtctttattattattaggggataagatatcttaaccacaaatttatgttgtcgttttgtaataacactttgatttgaactagagagggattacactgttctactttatcactaccaataaaccagatatttatatgagctttttggttaaatttaaagtccatttcttccctttaaactttttgatcgaacacccttcttgttgtgccttcttgttgcttttcttcttgcaatgcaaaaaggttgaatttattttatttttgggtaaattacggtcacatcctgaggtacatattaaattacgaaaaagttcatattgtttggctaattacaaccacctcttaactatgtattttcttacgggaaaagtacagtttgcaccccttaactatggggtctgtcacaaacaccaccctagactacaaaacgtaacaaaataacccctataatttgtggtcaacgtgtaaacaacttataccgtcagttttcttatgcatttacttctttacccttcaaatatatttaaaatgttggacccaatttcctattaatatgcacaattttctacgcatcacccccaccaacaaatctcctggtttttttcttcctcatttcccagacttctctcatccctctaatagggattaagttctcgatttttc

SEQ ID NO: 101274 - DNA, 785 bp, Mimulus guttatus
  Intron number 1 from transcript mgv1a010239m (locus mgv1a0 10239m.g) derived from phytozome v7.0 (chr-ID scaffold_721 ; pos 5041 to 5825 reverse strand)
gtgaagatcattatatctgcagatttcaggttggattatgatcttgtaccttactttattttgttaagttaaacctctataaattaataccgacagtcgggactaacaaaattctattaatttagcgaaatattaaatcatcgaactaataatttagtaggtttgtactgaattgagtcgtcgggggaccggaagaaactataatttaagcaaggttgttaatttatcgagtattaatttattgaggttatactggatgtgtagaattttgatttgtgttcttggaatttgccttgattgggtaagtttttagctgtggatttgacatttgtttgctccttagaaattggtttttgacaaggtacaattttatggtgtgattggttcttgaattctagtgattaaaatagaaagatttttcctttttgattgattttacctgtgattcgctttcgtctacggtaagttttcctgcaagatcgaaaagtggggtaagtattctttatgaaaagatttaaatttatcaaaattcatacgtaaagaatcttgatttttctcgtttgtatgttcttggatcgagggtttctccgaacaatcatgagaataagatgtttttcgaataatcgtttttaaggacaccataactcgtctggctatttcggttcatagttctctgcttctattaatatacaatgttatcgaacaaatcggacaaccaattaacgaacattttccttattaatgttgtaggagcctggtgatatagaagccgagttcgaaaaaat

SEQ ID NO: 101275 - DNA, 421 bp, Mimulus guttatus
  Intron number 2 from transcript mgv1a024619m (locus mgv1a0 24619m.g) derived from phytozome v7.0 (chr-ID scaffold_7; pos 2806848 to 2807268)
gattcccagttgggttaatcgcctcgccagaatcggtacatagttctactcccattaattgaattatagtacatatgtcccaaatgaagaagtaaaatgtactaatatttaaaaaaaaaatcgagagtcgagtgaagtccgcctaaacaccggtgagttaactgtaaatccatcgtaagtatgaacttaaaattcttagctttgatattaccaattcaatccgagcccaaaaaatgcaactcgaatgaagggagtttcgccatttttttcatccttcgagacaaaacaaattcattaagacaaactcgatgaatttgttatcgtgattttttattcttttttttttttaattgttgatattgatatataatatgtttgttgtttaggtttgttgtgccactgcattattccagcgaattta

SEQ ID NO: 101276 - DNA, 701 bp, Mimulus guttatus
  Intron number 3 from transcript mgv1a002945m (locus mgv1a0 02945m.g) derived from phytozome v7.0 (chr-ID scaffold_26; pos 1052478 to 1053178)
aagttgcgatctgcttctttaatactgtaagtttaaggccttctgcgtatgatactttgatcgtcagtaattgaagaaactatgatattgtggtctcttttgactttgatttgttttgttttccttgagaaaattattcatggaagtatttttgaaaaatgcgtgggaagggaaaaacaaataaagtaattcaagaataatactattgaaatattaatgtacactttttcttccgaaactccttgtagttgaagatactttacctcaactatcatgtacataatgttgagaattgaatcttttgcaaactaacacaatttaaaatgttcagaagcgtgacagacttaccaacttatgacaagagattcatgtaaacataaattggtttttgtgctccatctaaaaccgaacttggtggacaaaataacctagatttatggaggtcaattttataccgcaggattaaaaaatttatttgccgagttgaaaatcatgagttacgtagttctggtgggccggtggctaagaaatgcaatatccggaagtaattctaggaaacatgcttcaaattgtcattgaaaacgtgtattatattaacaaagataagaattgcgagtttttatcgctcgagtacttttatcttatttttatcttttatttacccgatttgtagagcgagaagaagaatttgcaggattcga

SEQ ID NO: 101277 - DNA, 940 bp, Mimulus guttatus
  Intron number 4 from transcript mgv1a013949m (locus mgv1a0 13949m.g) derived from phytozome v7.0 (chr-ID scaffold_198 ; pos 77894 to 78833)
actgaagaggtaaacatatttattttcgttcgtttccatttaggcaaggttgccggagttagcttagttttatgcattggtatttgaatcttgaaaaaatgaggatgactaagaaacaaaattgttcttctaactaatcagaaatccaaatccccgagtctattcaaaactgttggcttaagaagtcgcgtttaggaaaaccgggagtatccaaaatcctgaacttgtcctaataaatgttattgtttagaaattagcaatgtagtagatgttgtttagaaattattatggaacttacattgtaaaatatttctagacagtcattttcagttgtagaatcaaacgattacggtcgaatgaaagagtacaaatggatagtaaagcagtataaatagaaagttggattcatttgtaacaagattaattgtatcaagatgacatttcaaaaggtcaaaaatatgtaaatacgataataacaaacaacaagttgatttgaacctgattgactccgaagatgagataatcggatcccattcaaaaaatgacacgtggatatagcaaggaaaaaagtggaggttaattagacgtgaaggttaattagacctattcgataggttgtttaaatatacaaaactcctttaaccactctagttaagcttttggattgccttggccaataatatttttttttttctttctttttccattaaataatcatatgagcatcacaacctgcaaaactcagcattaaaaaaaaaagaaagaaataatttgattgcctatatgctcttcttttgtttgttttttctatccttgcctaaatctattaatgctgaaattaaagcatggttcataatgaatgaggttctgaactggtacaataatcaataatgttcttattgcagaacaaacttatcacagtaacaccggagactaaagt

SEQ ID NO: 101278 - DNA, 752 bp, Mimulus guttatus
  Intron number 2 from transcript mgv1a014279m (locus mgv1a0 14279m.g) derived from phytozome v7.0 (chr-ID scaffold_106 ; pos 802420 to 803171 reverse strand)
ccattcactcgtcgcctgcccgaattcaagttctggtgagattgaaattgattttaaatgcaaattttgaattatgtttaatgttttgaaaaaaaaaatcgcattaaatttttttttccggttatttgtatggttttgacttttgtcagtttcgagttgcatcatgatgaactatcgagttcatgtgtataaaattatagtatcgagcgatgtggggttgagttgtggttcgctgtgttgtcaaatatctttgtttgatttgttctcttcgtaataatttttagttgacttactaaagcgagaatcttgtgatatttacaaaatgctattaagtttagttgatacgagtttttttagaccttgtaaacggcaaccgtgatatactaactccccgattattcagcatggtaaggccccttttttggtcttaataatggctttattttgttaactgaccgaaataacgagcagttctcttatgataaaaaacgaaaacgtcaacttcttttttaactcaatcgcaactaatgtagctaaataatcatttttgttaagaagagcaagaattgtatttttggatttcaagaatttgtttaagtggctgatcttttcctttaccctgtttgcggtcgacaatcgacatacttcgatacttcctttttgcgtttttcgttttgtttgaagagactattaaatttgtacttaattgcctttttttttttttttggcaattttttaaataaatttcaggt

SEQ ID NO: 101279 - DNA, 362 bp, Mimulus guttatus
  Intron number 1 from transcript mgv1a014451m (locus mgv1a0 14451m.g) derived from phytozome v7.0 (chr-ID scaffold_104 ; pos 580523 to 580884 reverse strand)
tcaaaggtaattaaattacttttgatttttttttataattaaaaaaaaaaaaaaggaaattgcatgtaaattggatatttcacttgattgattaatatttgtccgaatacgatcgtcattaattacattattttcggaaaaatatgttacgtttattgatcatttatcgtaacatggtattgggccaactgtattttcttcaatggcccaaacgataataacaaattgggcttaaattatcattttaatttccatatattttttttaatgtgatggattttgcaatgatttaatttagtgatgtagtataacgttaattatttgtaggaatatactcggtgagtgtggatttgcaacaacaa

SEQ ID NO: 101280 - DNA, 765 bp, Mimulus guttatus
  Intron number 1 from transcript mgv1a015168m (locus mgv1a0 15168m.g) derived from phytozome v7.0 (chr-ID scaffold_29; pos 307768 to 308532 reverse strand)
ccaagttccgacaaaccatcatcaacattgcccaggttaaattcttcttcaccccctaattcttcgtttttttatggctcgaacagttgtaattacacgattgtgtagaacaaaaacacccatttgatggagggttagtttaattatgagtgagtaatgcgtctccagtaatgcacgataggtgtttgatgttttgtctgacagagtaattgattacatttgattattcaagtctgttatatattggggaaaaagaaaagggcagtgattgtttgagcagaagagactagttttttcgtatgatcagttcttggaatacatgaaacgtatttaataataaaattattaagaatgcgatatttcaatctactacacgtaagatttcattttcgattgtagaagtcatcgtccgactgatagtggtgtttggttgtgcttgtagtgcccgagtcgaaaacggcactgtgaatagtcaaccatgtgccgttttttttctaattttgaacacgttcgatgtcaatgtacggtacttctatttaacgtgtgacgcgtgtatttatattgaaaaaaattctatcgagtgattaaactacaaatgtttgatcataaacttttaataaaatgctttgatgaacgttaacatctaatgatttttttttttccgatattctgatttttctatttattttgcttgtgacttgatcgattggttgctctaattgtgtaacaggcaaatcatcgtcttacgacaaatttgcaaagacg

SEQ ID NO: 101281 - DNA, 876 bp, Mimulus guttatus
  Intron number 1 from transcript mgv1a004678m (locus mgv1a0 04678m.g) derived from phytozome v7.0 (chr-ID scaffold_76; pos 1112757 to 1113632)
aatttttgagcacgcaacaatcaagtaaaaaaaaggtatggtttgtgtcaactaaacttgagaaatctaaataggctctcgtttattgtccttcacattatttcccatttcgaaaattacatcttgattcgttatctatatcctctttgttctcgtttgagttttgtgaaaatcttaactgtgccctgaaatagtgcttgtcggctaaaaaaaattgggaaaaaatgcatgctagtattgtttatataacacacctatttgggaagattttccaccatatctaattgctggactaggtcaatgaatatatggggagaggattatgcacacgatatggaaaaaaatgatctatacatatggatttggtttgtggttcttggttgtttttgctattcgagaaaatctgattgttttcatgattactgtctttcaattgatttttttgccttaagtttgtctacttacatacactttctactatttaattcatgtctgaaacatttttttttttttgcatcataattagttcattttttttaattttgatttctttggttgccctgcttgggtttaaaaaaaattatcagtcacgtcatgatcttaattgggcgtctcaatgtcatctttaccgttttcaacagcttaatctttgtgttttcataatttgttgataatttttttatttttcgtgtttgatgtttttcatacatctgggggtaaacgatacctttcccatagtacaggggtgcaaaatgaattttatcttaaataacacattagaattgtactggattttcgttatttaacattgaaagccctaatttcatcgttgaatccacagtgaatttcgagatactagtgctgaagtgaaggaga

SEQ ID NO: 101282 - DNA, 469 bp, Mimulus guttatus
  Intron number 2 from transcript mgv1a018394m (locus mgv1a0 18394m.g) derived from phytozome v7.0 (chr-ID scaffold_140 ; pos 412036 to 412504)
gatttatatcggcaattgaggtaatccaattattatacgtttagtaattactaaccaattaataattaactagttattattgagtattaattattcactaagtaacaaaatacttaaaccccccaaaaaaaaatactaacaaacgcgcatgttgggcgtgggatccgcgctcgtttttagcgtggtgcaggttatttcacgcctgttttgggcgttgataggcaaaaaatagattgcttcaaaactaaaacttttgaaaattgaaactgtattcctaaatttataattcaatgtactacagtttgcagtagtcaaatatgatttttaagactaacaatcacacgagaaaggaaccttgaactataaaatgaagaaaagagatttgatgtagatttcttttaacacgaaattatttgtgctaacgataaagattaatgagtttcgggttatgtggatatgcagttgagaa

SEQ ID NO: 101283 - DNA, 539 bp, Mimulus guttatus
  Intron number 2 from transcript mgv1a006452m (locus mgv1a0 06452m.g) derived from phytozome v7.0 (chr-ID scaffold_228 ; pos 372898 to 373436 reverse strand)
caatagaatcttcccacacagctctacttcttcaggtactgatttttttatttaatatttaattttaatatttaatttttaatttttaattatgaattgtgggattagtttgtgtaggtgtgttaaagttcaaatttttaatattctctgcatctcatccttgaatgctattatcattgtacaaaacctctgtttcagttccatcataaacttaaaacaaagtcataggttaaaattaacggattgtgcagccttaatttcaattaaagattcgtctaatatatcgaataattgatcactaacaatcggctaaaagacaaagaatgccttttgaagaaaatgttacctacatgtgaagcatacaatgtttaattgaagtagcttctagtattaaaaaacggaaatttccgatcacaagttgatacctcgcatctctctactatagtctttgaataaaaacaacgaatacaaaatattcacgtttacgaatgatgagtaaaacaggtacgaatattctgaagtgggaaagtctacctcgg

SEQ ID NO: 101284 - DNA, 578 bp, Mimulus guttatus
  Intron number 1 from transcript mgv1a007858m (locus mgv1a0 07858m.g) derived from phytozome v7.0 (chr-ID scaffold_160 ; pos 523788 to 524365)
ttatcttggagaaggtcctccacaaagttggaactgtaagatatctatcattattcttcttcctttttttttcttttttttttaaaaaaatgttttcctcatgccgttgaccaaatactggaattgattttcatgaactcgtgtgttttttcttctgtcgagatctttttttttccccttccgttttcctgtttatttcgggtttatttgacttgtgtgtttctatctgttattggattttttttctttaattgatgggtttatgttcttttttcgggtcaagaatcaagaattgaagatccttaattgtcaatgtttggtatggatgtgggttctgttttagcatagtattttgactttgttttcagaatttgtacagcctagctactcatttctaagtaaacaattcaactgtgtaaggttgtgttttctgtttattaccctcaaacttaagtaagttgttttggttttgttagtgttcaatatatattgaatggttggattggaataatgaaacaagttgtgaattttttctttatatagtggttaacagagaggcataagaaagctctttacga

SEQ ID NO: 101285 - DNA, 1038 bp, Mimulus guttatus
  Intron number 2 from transcript mgv1a009080m (locus mgv1a0 09018m.g) derived from phytozome v7.0 (chr-ID scaffold_101 ; pos 92576 to 93613)
aaagttatcaatatctggcgcttcttcaagtagaggtatttcaaaatgaatctctgatttgtacgtgcattttaatttctttaatttatgtttgaatgcatgctggtttgctttgattatctcatagataactgttgctctcctgggtttacggaatcagtataaaatgtattctaattttgcaaatagtgtaaattgtcgaatgtttatgtcaccattcgcatttctcaatgatcaactgtcgaggaatttgggagtgtatcaatttgtttttaagtttttttaattttctttttcgaccggaaattctctgccccaatcgaaacaaggaaaagataagttagcaggtgacaggattaaatagggatgaagcacactatatagctgatcgcttttttttataatgatatttattaggcaaatatatctgactaatattatggcaacattgtcatgtcttctactgataaaaatttcagacagtaattggtttatttcatgcgttgaatcactcatgagaaattccttggaaaggatgatatttctttcttatggactagccttagcatagtccagaattttaactggtaaagaaataaacggaagtatttataaattatattttcaaaagaagacaacctaacgtccgaaaattgagaaaaaaaattatgtgggatcttgaattctcaacaagaatttctctatataagtccaaatttggatggcaaagatgctattttagtcctgtttctagtgctttatgtcttaagtttcggaaagtaaaatcgtaggaactgaaacccattatatcttataagtttgcgcacttcgaaattatttatggtcttttaacctgaagtaatttgtattgtcggtttcagtggtttgaatacactcataaaaacctcgtttacgactttttttccatggattatctttgagagctttaatatttaagctgtatcattaatcactagtcttgcctctgtttgaaatgttttagtcgaggaaccggggccccagaagattcttgtacaa

SEQ ID NO: 101286 - DNA, 1015 bp, Mimulus guttatus
  Intron number 3 from transcript mgv1a006979m (locus mgv1a0 06979m.g) derived from phytozome v7.0 (chr-ID scaffold_59; pos 102589 to 103603)
aggttgacttcagaggtaagtgagaatcgaccaatccggtagatttttccacgttcataggagtgcgtttatgtttttgctttacgaataatgatcttttttgggcatttctaataatatcaagtcttattcctattattttttcatttttcatttccgggattttagccccgaaccaaggatcggttaagaaattcataatgcaattattttgatattgacagttgccgaaataattctctaaatttgaattgttcttgatgaatcaaagtatgttcttacggctctttggtgtggagaagggttggcagagtgggggacgagggttaaatagacgtttttaaacttctgcaaataaacagtcaaataatcctttttttttcttttttttttttctggttctgtgatttgactcgtaaaatttgatagagtaactttttgtttgacaagctggataaagtcaatgggtagttaaattcgactcaactgcatgtctaggagagacttgaaacatattcagctcaaggtgtcttacgaacggagttaaaaacattttaaaaaataaagctataattgaaagttgtatgcaaattttcgggtaagtgaagtaatatacgacgagacaattaaaaataaagatataactgaaagttgtaaatgaagattatatttcgtagagatttgaaggtggagcaagccttctagcgtgccctccatttcaaattttctggatcgattccaattgaattgttcaaagttgttggacttccacccgaagccatggataaaaaacgatttcttcatagccttttccacataggcttagctacaattgtcacctagctacttcacagtctttcaatataggtttaatttacaccgatgctgatttttccttttgatattttttgtgattggtaatttcctcttcaagaaatgatattaaactcacttgtcaattattctatcgtgtgattcagttccggagcttggaggttgtcgaacttcaaaaatt

SEQ ID NO: 101287 - DNA, 1041 bp, Mimulus guttatus
  Intron number 2 from transcript mgv1a006842m (locus mgv1a0 06842m.g) derived from phytozome v7.0 (chr-ID scaffold_76; pos 745798 to 746838)
cggctctccgctgccttcaccgtccccacatttctgtgagtctctctctctctctctctctctctctctctcgacacgtggcagctcttcctttccccccttttctgttaaattttcattcaatacatttcgttgcgatccaccatctgtaaagttgaggtctttccgcgattaaattcgaatattttctctgattttgatattagatagtgctctttgcttcagcaactaataataatatatatatatatatatatatatatatatatatatatatatatatatatataagcacacacattgtattgtatccgaggatgtcagcaagtcaatcttaaagagggtcaattgtttgtgtatcaagctaatggagattgagacatgttgatattgatagagtatgtaatgagtgtaatttatactcagtggagtttgtattgtttgtcatttaactgtttagacacactccttttcctcccatttagaactgaaaatgaaaccaacattatcgatactcgatttcagatcgatccttaaaagctcgttcgagcttggtttgttagcataactaaccaagacacatattgtcattcgataagttatggaactcgagctcgattagacaaaaaaaaaaagtatgtattagaaaaaaaaaatcaatctactcgagctcgacacattttgggctcgatgaaaactcgttccagctcgattgcttatttaaaccaaactcgaacgcaacttttaaatctgagtaaatattcaaacaagaatgaaaactgaagttagtcgcaatttgtaatagtttagagtaccatttttaataaagatcgactttgtatttgatggaagctttcacaaaaatgtatatatatctacgtattagctttcatggttgaaaatgtcgtatgatattttttcggatatattgtacgaaaagtgtagattttttgttttttgtttttatttatttgaaataactcatcgttatctgaacatgctgaagttgaaacttgctcgaggctttttgggaacaatatt

SEQ ID NO: 101288 - DNA, 720 bp, Mimulus guttatus
  Intron number 2 from transcript mgv1a012457m (locus mgv1a0 12457m.g) derived from phytozome v7.0 (chr-ID scaffold_72; pos 311116 to 311835 reverse strand)
gaacttctccgtcttttcttgtggagactttacatgtcagtttttttttttttaatttccattaattttttctttggagtaatttccattatatgtcacactatgctgataaagtttgtattctcattactaatttccgtaaaaaaaatggtcatcaattttgtactttatttcaccctgtacaactacaacttgttgatttgatagattatatacacttttgctttttgaggtttgcatttgtttgagggatcgaaaaatacattcacatgtcaatggtgttggagccatttgttgtgctttccgagtatatcatagtttcctactttgggaggggaattaaggtaatcttgacaacgactataaaaaaggtcagtcttaacaacgggaaccatacattatccataatcgctgactgaacttgtagaatacctctcatgataccacctctaatttatattgagtttgagatttatttaagatcgtgagtcgtggcactggcatgattacaagttagatggtggacaatgtaatatcaggaaatatagcaaataacttggaatatgcttttgtgcagctgtttgagttcttttcttagaatatgcaccaagttatgtgttattttctgcaccttgtatgggctattcgcattacctagtcactattttggctacataataatattttacagttttcgtatgttgaattattaataggagg

SEQ ID NO: 101289 - DNA, 373 bp, Mimulus guttatus
  Intron number 1 from transcript mgv1a015809m (locus mgv1a0 15809m.g) derived from phytozome v7.0 (chr-ID scaffold_198 ; pos 99479 to 99851)
gcaaaacctcaactttatccgatacacttttgggggtatgttaactccgtttttattgcgttcgagagagatcatttccattatgtctttatgtcattcggatatatataatcttgttagttgccttcggtttgtcgaacagttctgtttcagcgaatggtttagatatttatcaaagctcgatcgagaaaaaaaaaaaaaaaagaaagaaatcttccagatttgacccaacttttatcgaaactaactatcttctctcatatttatgtcaactttgtcgatataatttgaggctataatttctaaaatttgatttctattgttattatatattgcaggtttcgattgggtactttctgtctgacctggcaat

SEQ ID NO: 101290 - DNA, 961 bp, Mimulus guttatus
  Intron number 2 from transcript mgv1a010572m (locus mgv1a0 10572m.g) derived from phytozome v7.0 (chr-ID scaffold_92; pos 770938 to 771898 reverse strand)
acacagttcctcagattgctttctacaagggcattgtgagcttctttattttcctttccccatattatatatgtataacttctttaggattttcgtaaggattgtccaataagatgtcgaactggaagcttgcttgatgtttaaggagttaacagagttaaagatacgtaaaagaatatataaaataatagaaacaaaagaacgaaagaagtttgtgcacattattcttacttcaagattgcattgttgagaggccttttgatgtgttggctgaagaattaagtcactgtgctggcatcgacgaagctgtttttgtctttagttcatctccttgtatatttttttattttttctataggagtagttcaaatatcgtatgtggtaacagcatttcgggctaccatagtagaacatggacaaatccttttttctttgagggaatagctatacctttagtcttttcctttgttgtacatttggtgtcaaatcagactattcataaatttcatttcccttgacatatttgctgaatcaacgaaacaatttcttccagctcctggacatttggctgattcgtattatgggatcaaaaaaataagcatttggtgattaaaagctaaaatccagattattttgctccgttttttattactactaaagtatcgtctcaatatgggaatttcttttagcataaatacacacacatcacacacacacacacacacacacacacacacacacacacacacacacacacacacacatatatatatatatatatatatatatatatatatatatatatatatatattcatgcatgtgatttactcttgtctatatattttgtctattccgatgttagtttttttacaatgtttagtgagattgtaatgtttttcttctttacttgatgtttatttgttttggaaatttatattaggttgaagctattatacaag

SEQ ID NO: 101291 - DNA, 664 bp, Mimulus guttatus
  Intron number 1 from transcript mgv1a014711m (locus mgv1a0 14711m.g) derived from phytozome v7.0 (chr-ID scaffold_90; pos 42039 to 42702)
tgtttgcttctgtactactggaactgatcctgtatgtgtgtgtaatcaatgtatataattaaacacgttttttttttttgaaattaaatcaaatttggattgtttttatataatctgggattattacaatagaagaatgggggcaaatatatatcgatctgcaggcttaatttgccttataaagggttaaaaagaacatatatccctatacatgtattgaaggaaatttagttgaaaattgggaagatgaattgaagtgtgcaccacgcgcacatccaatgcgtgtgaaacaaacaaacacacacacacacaggagacaaagacagaagtattgcatgagtgccatgcgtctgtcgtctgcatctgtaagaaaatatagcaccggccagtacatacatacatgaaaatagagatatgctttttgtatgtatatataggtatgtatatacctggatgaagagagtgattcggtagaggagaagatggcgtaatttgatactggccgcggctaatcggataaggttgcgccgaatagaacgccgccgccctattccaaacaccaccggcgccgccgctgggggtgccggatgagggtgccgccggctgagaggctgcggcggcgtcctgaccagcggcggcagtggagttcctccgcctccagccg

SEQ ID NO: 101292 - DNA, 846 bp, Mimulus guttatus
  Intron number 3 from transcript mgv1a009669m (locus mgv1a0 09669m.g) derived from phytozome v7.0 (chr-ID scaffold_242 ; pos 343039 to 343884)
atccgttatcttcgcttaattaccaaaaataagaggtttgttcttttttaaattcaattgcctaataatattcttgtaattaaataataaatattataattaaatccgattaagtactatttgcatactttaaatacatataccgtagatacatgataatgattcataatttattgtattaagttcttatttatttttattgcatacttttgtaaagaattgaaataattagttacatacaaccacttttctcacactcatatgactattacctactcttgcatgtagaattgaagtaaaaaaaaaagtcatattattaagagagtttgtttaactaaatttattttaaaccactgataagtttgtaggtcgaataagatattttatgatattttaaaagtcgataagcttttacgttttattttttaaattattacttttttagtgtggaaaatgaaattattaacgttttatctaacggttgactactatgttttctattttctattgtatttgattttattattttacattcttaattttaatactatttttttactgaaataattagtaagaagggtatttcggtcactttgaagaaaacatatctaaaatacatatactcgaacactgtaaaggagaagttaattttaggattatgacatcacaagtgattatcgaagtactaaatgattaattatatagttttttttttttccttgtatggaagagggtttgactttattatgaaataattggtgtcggtctatttaaattaaaaatatattgattattaattggaatttgacagtgattacgacgggacacgtgcgtacgctctatcga

SEQ ID NO: 101293 - DNA, 670 bp, Mimulus guttatus
  Intron number 1 from transcript mgv1a001884m (locus mgv1a0 01887m.g) derived from phytozome v7.0 (chr-ID scaffold_113 ; pos 507654 to 508323 reverse strand)
cgcgtgcgcattaagaggtagccatatacacatgtttttttttgcgatcggtatcgaattaatcgtattttatgtaaatatggacctcgattttgaggttattttagttgtttaagcttcaattggattttgattcgaattcgaggggtttctggtaggtttctgcttgttttgatgcgattctacttattttagggttttgtcggtccattcttacgttttttgggttttttttttaatttccttttcttttattttttgtattttgggggttgtacggatggagggaggacggtggtttggtgggttggggcgtttggtgttttatgagtacatatattacttgttggtgataaattgtgagcatgattatttgtgactgaactcttctatagaattgttctgtaaagaagttgtcaactggtgcaatttaaagttgaccatgtccagatttttgggagatttagtatgggaaagtgttctaggatctggtgccaacttcccgttgcaatttgattgtgtaattttctatttgttacattaggtttcttgatttatcgggcattatggttgatcctattgcgtctagtttcttgatgattcctgtagtattcctcttttaagtattgagttttaatgacctttacctatccatttgtttgtcagtggc

SEQ ID NO: 101294 - DNA, 500 bp, Mimulus guttatus
  Intron number 1 from transcript mgv1a006813m (locus mgv1a0 06813m.g) derived from phytozome v7.0 (chr-ID scaffold_12; pos 1910218 to 1910717)
cagccgcagaaacggttctctctcagctccgctaggtaactttccctgcatttttctttttgtttttttttattttgaattaaatttttattaggaaaatagaaaagctgggatttttcttgaagtgataaataaactgaggcttgatgtgattcttcgtattttttgctaaaagcctaaaagggacctttcatactagttctttcttgaaaatgtctcatctctgcaaaaacaaaaaaataaaaaataaaaattgcagctttttgaaaaaaaaaagaaaaaaaaaattacattctagaaattaaaacacacgtagtcttgtcttatcagaaatttgaatcaattttagccgcaattttccattaatgaaaaactggacattttatggatatatcttgatttagttgcttttgctttgtctaaataattttctaatcagtgatgggaattatttgttaattccaggttttacgcagcagaggttttggttgctctggaat

SEQ ID NO: 101295 - DNA, 669 bp, Mimulus guttatus
  Intron number 1 from transcript mgv1a026257m (locus mgv1a0 26257m.g) derived from phytozome v7.0 (chr-ID scaffold_114 ; pos 390124 to 390792 reverse strand)
caagcaaagctggaaactctttgaaaggataataggtgcgtaatttatgaatcgtctatgattttcattgttttaatcatttttcttaagatccgagaattcgaagtgatatgatgaaatgataaatcccgaaattttgggataagcgcgcaattccagttgtattggagatataaatattaaacgattcactgcaacagctcaaacttctagactgtgtttaagtttttagatgacgatgtgttgtcttttagcaaattctcccgtcttccttttctagtacaattagtagaaaatgactttttactatgaatttttttgttaccgtaaacagcagtaacttttattattggacaatcttggaatcatagtgaatgctaggatttactgtagtaaaaaaaatatatttgctgcaaagtgtttgttacgcccgtacatgctgcgggccaaattcgtagcaaaaacctttttattacgaatttggtaccttttactacgattgatggttcatgatcgtagtaaaaagtcatttttctactagtgtactctgatttgtattcatcatatcggtatataagaaatcttccatcgtgttgaaacatttgctcgtttaatttgcattgtcattctccagatattagcttcaaccaacacgccaagaagacgttg

SEQ ID NO: 101296 - DNA, 680 bp, Mimulus guttatus
  Intron number 3 from transcript mgv1a001730m (locus mgv1a0 01730m.g) derived from phytozome v7.0 (chr-ID scaffold_4; pos 2090846 to 2091525 reverse strand)
ctttctatttcaaacattccacttgcatcacaaaggtgaggagctttttacttccacattggatttctaattttttatatattaagttttagtagatatgtctattgcaagtatataggctattgtcatatcggccttttctccctctttgtttgttctctctacaatagcattgacgttgagatggttgaaggctctaacgattttttggatgaaaaatgttgtggtggtagcatattcgggtttaagcggatatccaagaaagcattatttcctgctaatgtctgatttcatcttattgatgatttgggggtcatcttgcactgtgatttgcaattctgaggcatataggttacaatgatggagtatggaagttgggactccgctgcagtccattttaatctgttgatctataaggaagtaaaattagggaaacaaactctggatccagaaaagaaaaaccgaaggagtttggatcctttacatgtacacatgaaaaatgtttccctggatactcagacctctagtttttttttgatttttctttttgattagaaagggattgataatgaaactgtccatttatattgtcatgtttaatgattgaaagacattttagcttaatatgcgcagctgctcgaaatgggactgattctttatttgtgacaggttttggactc

SEQ ID NO: 101297 - DNA, 712 bp, Mimulus guttatus
  Intron number 1 from transcript mgv1a001730m (locus mgv1a0 01730m.g) derived from phytozome v7.0 (chr-ID scaffold_4; pos 2092195 to 2092906 reverse strand)
ctgcactactgctgccattattaattaccgcgacggtacgaatcttcttcgtttttttgaagtgatttttctagttgattatgtgtttgtagttattttattctcctggaatttatttactgtacaattgcgatgaaaattgtccggcggttgcactttgtgattttgtgaggtttaggagatatttatcttttccggtgctcaattacttcggtccttgttctactatctctctgttatgtggatgttttataacttatttctgatctacaggattctcaatattactgaagagattacacaatataattacgtcgtgcttgtttagaacattaaattttcatcagttggaccttaattgttgttttcagtgtggtgatttattctataagataattggctgtggacatgctctattgttgtaattagtataacgggctgaagtttattactatgaaggggtgattgattttccttgattttaaattttcctcgaagaaataattcctggcatctaagggaatgtaattgattctattactgatttgtttttggtaattttgtttccatgcttctgtgttcgtgatattatatttactgaattttaaagtcacgttttatggtattgaacatgtacttcgtttgttgcgtatgagctttaaaacttcatcgttcttgcaggaagtctagttatttcgtgtagaggcacgat

SEQ ID NO: 101298 - DNA, 777 bp, Mimulus guttatus
  Intron number 2 from transcript mgv1a001234m (locus mgv1a0 01235m.g) derived from phytozome v7.0 (chr-ID scaffold_66; pos 572654 to 573430 reverse strand)
attaggtataatcataccggtttcttcttaaataggtaaaaaacttaaattcgttgtgattcctctgtttgctgataattgcagcggtgctattgtaatttgtgttatttatcatgttttattgattattgattcatccaaatgagtttgttgcagactatgtcaatgcattcacatgaatatgtatatgtatttttgtttttggggctttttttcccttaattatttgggggtttggggtgaaataaaagtaattaagtgctcatattttaaattaaataaataaatatacaaagtattgtgtaaatttaatacttcatttgctattttgatattgaacaaaccctaagggcggtggtgtttttaatttgatatatcatggccagaaagctgactgtggatgctgcattgataaatttggttcaatgatcatgttctgctactgttcccagttttcgtatttgataaaatgctcgaaattcgtacttggagcaattatttttgttggtcactttcggtggtattgcaggttttagaaacatatcaaactggaagtgaagaatcatctgttccaacacttttgttttcttaaataatccacaatgatctgttatgaaacatattttctattatattttggattctctcgatgtgtatttgaatttgctgcttgtaaaaagcatatgttaaatgtgcagtactattcccaatttgaaccggcttttgtggatttttcatgtaggcctgtggataaattatttcttgcaaatcagtatt

SEQ ID NO: 101299 - DNA, 739 bp, Mimulus guttatus
  Intron number 1 from transcript mgv1a009220m (locus mgv1a0 09220m.g) derived from phytozome v7.0 (chr-ID scaffold_13; pos 1021113 to 1021851 reverse strand)
ctccgattctactgcccgaagggccgtggcatcaggttagtaacacagtgcagaattacatatgttgatttaatttgattttttttttgagtgagtatacatttgtttcgttaagcatttgtgtaggtgtgggtatccggtatacgagtatgcgtatcaacttgtatgatgtgttctgtatgtgcacgggcatccttgttaaagtgtctatttctttggttgctgtgttagtaatttatcaatttgtagtattttttgttctgtgagctcgagaaaaatgcaaaaaggaagactaaggttcgtctgctccatgcaagtatggatagggttttatcatgttgaatttgcttttaatactttttcttgaattataattggattgattcatcagataatggagtttctttaattcaccttaattttgaagacacggtgtacttgatttttttaggagtgtctccatctgggaccaaatacacttagattcgatgaagagcatatttgttttgcctgatttgatataataatgttagatggattccacaagtctcgaaattaggggaaatagatcaatcttcatgcttaggatgtgaagattgaaatcttactcttgtaagcataataagaaatggtactttctgtttctgtggcactaaattcagccttggtttgttcgagacttatttggacttcaaattttgtagattccaggtggagttacagctgcaaagggtttcaa

SEQ ID NO: 101300 - DNA, 919 bp, Mimulus guttatus
  Intron number 1 from transcript mgv1a020900m (locus mgv1a0 20900m.g) derived from phytozome v7.0 (chr-ID scaffold_57; pos 1225267 to 1226185)
ctgctgtcagaatagccattcggtgctctttttcgtatggattttcgatcttttatgctttccttttttacaaaaacgaattgcaatttaatatatataaatgattgctgctgtcagaatatccaaacaaatttaatcccgaatggcatgagaatttgacagttgctgttttagatcctagtcaacaagtttctgtggtgagccgcctctttcgttagcgataaaattaaaacaaattattaggttgtgctattgatccttctggttctagactagatacaagtttaaaaaaaaaaatcagtttgatatatcaagaacaaatttgagctttctaaaatcagattttttgtttttcaattgttttgagtttgaatactaactaatgcagttttactgatctcaagatttgaatcttctgcctttttcttaatgaaaattcggttcggtgtttggtaatttttttttttgaattccgagattcggtacggtatacggtattggtgtccggtataccgtaccgtaccaaataccgaaatatttaatatatatttatttttttcttttattttaaatactttaaggttataaaaatattctaaaatacttatagattgaaaatgtttttcattatttacaaattagcctctattcataatcactttatgtttttagggcaggctattgaaatttgaatgtcaaattcaagaattatttagtttaaattgttattgtaccttttctaaaataagaaaatatatttcggttttaccggtaccgaaccgtaccgaaccgaataattcggtaaaaaaccatacgtaaccgaaatatattttcttattagaaaccgcaatacctatatgttgattctatgtgtacgtatggttgtagacagtgtacgacaaaaacgtgttcattgcgg

SEQ ID NO: 101301 - DNA, 694 bp, Mimulus guttatus
  Intron number 5 from transcript mgv1a003832m (locus mgv1a0 03832m.g) derived from phytozome v7.0 (chr-ID scaffold_223 ; pos 121475 to 122168 reverse strand)
gaactttaacattatttcttagagctttaaaggtcagtagcaaaccttaatcttttttttaaataacatatttgctatatgtttgtgtgaggtggtgagcctcttatatccatacgatatgtcttcacttaatctttatgtttgcggcaagtgttttccagattgctatggtccaacatgtttgtgcggctccttttttaagatgcacttttcggaaattagttgatgaagtaagttccaaggcaagatcaagttatctatttataattttagaaaattccctcttctttatgtgtttgtttgtgatatattgtaaactttgtttttgagttcaaaatttgcatataccccatttttcttgatatttttacatttgcctcacgttacatacctatagtgattggaaatgaattagtcctgcatttgatgattatatttctttgttatttagattaatattttcaaactagattagaaggtaatcaagaatcagcattagaatgtatcctgaagtatggtgttctcttgaactttttaactataacatttcctgttgcatccatttctcttgtccactattaaaagctctatattctattcgtagttttctatattggtgaaaactattctccagccacatttgctatttcccattgcaggattttgacgacaacagtattttactcacagaaac

SEQ ID NO: 101302 - DNA, 1001 bp, Mimulus guttatus
  Intron number 1 from transcript mgv1a016115m (locus mgv1a0 16115m.g) derived from phytozome v7.0 (chr-ID scaffold_26; pos 80267 to 81267)
agttaccggaggttagtatgaattcttatctgcattttgcaataatctcttctgtttttgaatttaatgtttgttttatttaggatggtgatcgatttgaaattttaggtttgattctattttaggtttgatattagtgtactttcaattgttctaacatgataggatttcaattctgtgatcaatgattgttcggtcttctgataaaagtatgaaattcgtttttgccttttttttttgtgtgtgtgtgtgtgtgtgtgtgtgtgtgtgtgtgtgtgtgtgtgtgtgtgtgtgtattaattgaaattggtgggaagaatgattgttaggtcttctgataaaagaatgaaattcgtttttgccgtgtgtgtgtgtgaattgaaattggtgggaagaatccatttgaaactttgattgtttagtttattacccttgttagaacaaatcacttctaaggatagagtgtttttcttagttcatttgctttattttgagtgcaaatccataggcgttcgattccaagaacagtgcgattgttggtctgcagattgaaatcaatggattggatcttcttttttttttttcttttgccgaagtgatagagatagaatttcaatcattgattttatgctcaataagatctaacagcttagatcaagagaataagtggtgtttctatgacaatcgtttaacagatttagtctcgacttacagtggggacaaagtcacgagtgcccccgtttttaaatcatcccgatggatgtacatgcaataaaacttaaatggggtgatttgtgctgactcaataaaatctagggggggggggggggggggggttctttttgcaattatgaaaattgaggatacaaaagtttaacatccttatgtttttcttacttagtgtacactggattatgtgttgtatcttgtggagttcgtgatcgtgatgaagttattttcacgcagggataaccgatcctcaagggctgcactcttcgata

SEQ ID NO: 101303 - DNA, 647 bp, Mimulus guttatus
  Intron number 1 from transcript mgv1a026470m (locus mgv1a0 26470m.g) derived from phytozome v7.0 (chr-ID scaffold_71; pos 878996 to 879642)
ggaaactgctacctgtcttcaaaaacaattgattggtacttcagcttaaatataaataattccattacagtttgcaatttcaaaattagattgaaaagtttcttagaattttaattcttattactcttatgaatgtaggtcaactttgggtgctacttcaggccttgtatgtgattattggtaagaattctgcaatttgtttgtgttttctatttaattaagtgatcatttacgcagcttattttggatatattacaatctcatactcatacacctataaaaatattttaaaaaaataaaaattaaaataggatacctctatgagaggatgtagtggtttatggcctaaataatgtgatgggtaagcacatcacattaagtgaaaggtctagtatacttaagttagcccagtaagataacaaatgaaatggtacacggtgactttgactctccaatagagtttccacctgttatatttgattggaggcccacatatattgggtgtgcataatggaagacggtaagacacgtaaattgacctaaacttaacataaatcctcattttcttcttatgtaaggtgagtgtgtgagctttgagtttgggatatgattttggtgagtgtgtaagctttgagtgagtgtttatt

SEQ ID NO: 101304 - DNA, 692 bp, Mimulus guttatus
  Intron number 2 from transcript mgv1a014401m (locus mgv1a0 14401m.g) derived from phytozome v7.0 (chr-ID scaffold_381 ; pos 126379 to 127070 reverse strand)
gtttccacaacttgaaggtactaatttattctctgtatacattttttttatatagaaagaatggttttttttttttcctatccgtgatgctcgtagagtggtagattatattaagggtaaattacggccaggtcaaattacgaaaacctccctcatgcttgggtaattacaacgacccctcaactatgaatcttcttacacgtccacgtttgcagtgtcaaatttggtggattcttttagattatgtgaactattcttcagtttgtactcttttttacctcattcgagctttacattttgaatgaagatgattgtaagatgtgtctcttggctagtaaatatcatatggtgcatccgaaactgcatttttaaacaaaacaaaacatttttaaacaaaacaaaacaagtacaaactagagaatattccacggaatgtagaaaattctgttgaatttgacaccataagggtggacgtgtaagaagattcatagttggggggtcgttgtaattacccaaataagagggtttttttcttaatctgaccttacctcagggggtagctgtactttacccttatattaattatgttttgatattaattgtggtagcatataaacctatctgagattatacgagtaaatcttgatttggcttcaggagataaaggcagtggagctcgttaagccaactgg

SEQ ID NO: 101305 - DNA, 849 bp, Mimulus guttatus
  Intron number 1 from transcript mgv1a012967m (locus mgv1a0 12967m.g) derived from phytozome v7.0 (chr-ID scaffold_361 ; pos 92889 to 93737)
gctttggctcttcccttcatcgcgaagaactaaaggtaatttcttcttctgattttttttttttatttgggtatctctgttccccaattagggtttctgcgatttttttattctgcgattaatttgatttctattgtaatttgtagtgtaggtaattaattaggtatttactttgttatttactgtactatttggggatgatagaatatatttggggataattctatatggcataattcttaatactcacttcttagttctttcttagtttgggtaaattaattacggccatcccagaggtaaggtcaaattgtgaaaaaacccttccttttttgtataattacaagtttacaaccacctccctcaactatgaaccttcttacacgttcaccatcatggtgtcgaattcaacaacatcttctagattatgtgaaatgttctctagtttgtacttgttttgtacaaaaattgcagttttttatgcaccgcgatctgatatttacaagttaagagacacatcatatgatcatcttcttacaaaatgtggagctcgaacggggtaaaacgggtacaaactggagaatattccacataatttagaaaatttcagtaaatttgacatcgcaagaatggacgtgtaagaagattcatagttgaggagggtggttgtaattacccaaacatgagaggtgttttcgtaatttgaccttacctcagggggtggccgtcatttaccctacttagttttattgtatatattagtttgtgacaaaaagaagaaaaaaaatgattatttggatgcctactgttcgatttgcttttcgaatcattgtttggtgtgtacagatt

SEQ ID NO: 101306 - DNA, 872 bp, Mimulus guttatus
  Intron number 1 from transcript mgv1a001358m (locus mgv1a0 01358m.g) derived from phytozome v7.0 (chr-ID scaffold_121 ; pos 196561 to 197432)
ttatcgggcgccattctcagagtcgaagaacccaggtcagtattctttatatattcatcctacaagtttgaaaattctcatctttaacctatttgttcaaattttgcatttcccacttgctataacggataagaaagaggggaaaaaagagtgaatcagcgtgttttttagggttcattgatccgccatgagttgttgtattatatttgatctctgtaggttagataattaaagtggttctgctgattcattgattatgttgtatgggcagttgaagaactatatatacatgtagatatgtttattaattgcctaattcatgattttgtcagaaggtttctttattttattttttttccagttaaagttcataaatgcttacagaatctgatgtatcctaacttatatttgtaatgtacattgttgttgttgttgttgttgttgttatgaaatcgtttgtttcgaaagacgataatcgacccgttttggggtactgggattttctctcggtcttatcctacaccagactaaaatttgtgcattttcgatgtcgaaactttgttgcgagcatgtatgtttggaatcgatccgtacatgattacgtctactttctttgattgaaacggtgaaccgaaaagtaagatattgtacgttatgttcagcgactgtacctgaagctttgtttaacatgtatagagtgcttttgacgaggtcttgtagacacgaaatctctatgtgccgtgtatatatatattcgagttgctttaccatgtatatatattatcccactttttgccgtttcttttaacttttatgtctcctctgtggcaactgcagattcccgactaattacatcaccactcttagtgtta

SEQ ID NO: 101307 - DNA, 997 bp, Mimulus guttatus
  Intron number 1 from transcript mgv1a011601m (locus mgv1a0 11601m.g) derived from phytozome v7.0 (chr-ID scaffold_60; pos 1633 to 2629)
ttcccaattcccccaaaacgctcgagctttttccggttggtttgtatctcttttttttctgctctgttcttcgagtaaaaaatcttctgttttttgttcgttttgttactcttctgtgctgacaaatgttgttttctaatttatgtactgcaaattgcgatgcttttcagtacattgtttgtgtttgttggtgaatttagatatatttatatatttgatgctaattttttgtactctgtgttactaaattgcaaaagaaaatttagtgaagcgcaagtaattgtaattcgttttggggttgtgattgattgaagagcaaagtttattgaagatgcaaagtgaaatgtagattttgaacaataaatcaagtagtttgcagattggttttattggcacaaatctgggatggttcctattaagattgggcgtctcgttttttcgcacatggtttgtttagatcggcagtctgtgtcgtcgtttgattattacttgtgccggtggaaaagaaaaaaaaaagaaccaagtaggtgatattgtagtggtggggctttgtgtttttaataaatagtttggtttaaaattcatcacctttaacttgcctcccttgttctcagtcgattcggaaacaattaattccctgctttattctaattctgagtctttagaagctaaattcttggatgaaactcgttctataacaatatgtgcaatcttatgtatgatagctatagtttatcagcttttccatgcaatgatatttctgaacccagccgtacgagtaactaacatccaactgtagcctttatcgttttccaaatgagcatgataatgtatgatcgaattattagtcaagaacttgggggagttgtagcatcctggataacatgaaatttgcatcatatagctgcccttcttcaaaaagactaaatactcgttgtgcttttgcggtacttgtaacgcagggttgactaagaagtcccattttgaatcttcgatt

SEQ ID NO: 101308 - DNA, 319 bp, Mimulus guttatus
  Intron number 1 from transcript mgv1a024501m (locus mgv1a0 24501m.g) derived from phytozome v7.0 (chr-ID scaffold_33; pos 727996 to 728314 reverse strand)
atgtaaggattcttgactatttaatttttatgcttgtcgatctccttcaatttacactcgtggtagtagtagtacgaatggaaacatcagaatcttttctctttattgtactgtgggtcttgattttattattttggcgaaaaattgtgaagtagtgaagtgaattcacattgacgaaataattgaggtggaaacggctcatttgtttaagtcagaagatcgtttctgtacgatatttgtttaagtactgtagacttgcaaaaaattcagttgaactgttttgatacttgtgtttttttttcattcttttccaggcttg

SEQ ID NO: 101309 - DNA, 813 bp, Mimulus guttatus
  Intron number 1 from transcript mgv1a026625m (locus mgv1a0 26625m.g) derived from phytozome v7.0 (chr-ID scaffold_402 6; pos 2476 to 3288 reverse strand)
cccattgaaccccttgacttgcctctaatttgcaggtcaatttcctctttcttttttttttttcttttttttcttcttgagattcatatatatgtatatattagggctaaatacactttgcacctctaaactatagcatacgtaacatttaccccctcaacatcaaaatcattcgaaaatcgttcgagcaagggatgatttagcagttggagcaagtgagtttgtgtcagttgactcaaattcgaatccgcttgccgacggtcgctaggtcgagattgtcacacgtggttagcttaatatggtttgcgtctttcgtatggtttacaagttattatacgagggtgtaggtttacccagtgctgcacctatatggttgtattacgtctaatattataaaaattcatgcatcttactaaggaaattaattagttaactagtacgaaattgctacaattcaatctaatccaactcatttaattgaactagcttcaaatattagatactattatcgacgaaagagacaaattataatggtaatctatccacgatttcaactagtgctaagtgcataagtgaaagcgaatagaaactcgaaatcacgacgaatttcgacattgtttagacccttatctatccaatcttgcaaaaaaaaaataaaaaattaggagcttaatatgttgtttattaggaaatacggattttaattctgtaatttgggttgttcttacgattttttcagtactattagaaactggaccttataaactcattttcaccttcaattttaaagggattcaacaatcgagtacatca

SEQ ID NO: 101310 - DNA, 722 bp, Mimulus guttatus
  Intron number 2 from transcript mgv1a017814m (locus mgv1a0 17814m.g) derived from phytozome v7.0 (chr-ID scaffold_137 ; pos 402662 to 403383)
agaaacgccctactcttcacaagtgccagaggtatgttttcatcttctcttgattttttgtattgttcagtatgttattagattttttccatctgctataacctacctgcttgttagatttgtttcttcagcattcatatgttggcatgattttcctcataatgcattctccatttggttgagggattgcagtgaaaggcctgctaagaggttgagacaggaggaaatgcttggagcaagcttcgaagaaatgatggagaccatgaattacggcggtaggaggagaaagtcgaggaaggtttgaacttgttttcccttttattataagtgcttacatctcttgattctaagatccttagactttgatgttatgcggttatatatccttacaagttttcagatggaacttttcactatcctcgtcgattaccttagttctggtgattttagaatttcagtccatgcatttaaattcttaatggtaaaaataaataatcaaggggctagtagatatacaaagagtccttcatccattggaaacaagcacacatggactggtcattgcattatgattgatgattaaatttctgataagaatgtgatttggcgcagtttttctttttcttcaatttgttaaatttctgataagaatgtgatttggctttaattatctgtgttattttattaacacttgttgttgacatcaaatcaggctaaacgaa

SEQ ID NO: 101311 - DNA, 459 bp, Mimulus guttatus
  Intron number 3 from transcript mgv1a021312m (locus mgv1a0 21312m.g) derived from phytozome v7.0 (chr-ID scaffold_51; pos 948569 to 949027 reverse strand)
ggattataatttgattgctgtcagtggcagccgtaatctcattctctgacatgcagggatgaataggaaatttgatagaggctaagattcagtgggataggaataagtacgatttcctgtagcactcgaaatcaaaatcgaagatgtagtttccgtacttatggtgaggcaaggatgagaaggagtaacagaacaataatctgatagaagaaataaattaatggaagaagcgagtatgggaaggaaattagtttcattttgttgtaattcagttgaagttgagtgtgaaattatttgaatatactgacaataggaaaaaaagataatctgaaacaagcatgctttccacattggctcgtggagcgaatttagcctgctacagtactactatgtagtattgcacttactaaacattgacatagcttattttcacttacaggaaagagtaccacaacaagt

SEQ ID NO: 101312 - DNA, 503 bp, Mimulus guttatus
  Intron number 2 from transcript mgv1a009497m (locus mgv1a0 09497m.g) derived from phytozome v7.0 (chr-ID scaffold_42; pos 1590507 to 1591009 reverse strand)
acattttcttgtacaaattctccgctttttttttttgttctttaagaataaaatacatgctttcgtgcatgttcgttttcatccatgtagattttaaatgttttttgaaaagattctcgattcaaagtagtgaagctaatttaatgtcttgtactcactccactatattctttatgtatgcactagataaagaaatacttagtcaaagtagttgtgaatcggtcgcgcttatatatgttgttacgtatataaattgtggtggaattatttcgcaattaattaggaatcgggattttcaaacttactagagcgagtgtggaattagagtttattttgaaccgttagatacgaatatattccttatccgagctagattcgaatagaacatctactttttgattttattgcttattacttttattatcgtcttgtgcataaattatttccgggttttctgaattcttcaaaacatgtattgtgcagccgttcgatatttgaagcag

SEQ ID NO: 101313 - DNA, 691 bp, Mimulus guttatus
  Intron number 1 from transcript mgv1a008158m (locus mgv1a0 08158m.g) derived from phytozome v7.0 (chr-ID scaffold_150 ; pos 360457 to 361147)
cacttgccataaatagtgtcactggcttcctacaggtgaaaatgaccgacacttatttttttaattgtatacatatatagcccaaaactgcattcattcccccaaccctagttatatacatcaatgcatttcccaagaaaaaaaaaattaatttaatgtgatttgggtgtaaatttcaaaatttcaatcaccttaaaaattcaattgtcggatattcaagatttccacccactaaatcggggagttagatgctacacctgattatttacatcaggtggatttaaaccgtaaatttgattaaataacttcacattaaacatagatacacatgggtgtgcgcgtgattatatgtagatcaacggttcaatccacccaatgtaaataaccagatgtaacatctaatttcttgtgtaaaaaatctatataaacataaattttactaaaaaaaaagtgtccctcataattaaccatgattaaataattctttttttttaactatgaaaatatatcttgggctattataaaaaaaaaattctacatcaccatcctcttaacctaataaaatttcaagcttgaacctacaacaactcttctctctttttcttaaccccgatttcttctctcttcttctctttttcgttacgcgctctaattttatctaatcaaaatttgcattgcattacaggcactg

SEQ ID NO: 101314 - DNA, 426 bp, Mimulus guttatus
  Intron number 1 from transcript mgv1a004099m (locus mgv1a0 02003m.g) derived from phytozome v7.0 (chr-ID scaffold_26; pos 93301 to 93726 reverse strand)
aagatctgaagattagagactctgcatttcttctggtaattattcttaatttttcattttaattttaattttaattttaatttttgggaatttgtattaattcagttgttttttttttgggttttaatcatggccgttgattgatactgtagtgctgaatccagtctagtaatggaaacccttaatattatgatcagtttattacagatactatgatatttaaacacagtccaaattttctttctttcttttggatagatggtggatcagatccttaatatcttaagtatgggtattgtttcttgcacaccgttatatgctttcttatcttcgtattataatatgcctatgcattgcaaatgagaatcgaatttatctttcatttgctgatctatgtagtttcgtttgattgaatattaggaatcg

SEQ ID NO: 101315 - DNA, 153 bp, Mimulus guttatus
  Intron number 1 from transcript mgv1a009801m (locus mgv1a0 09801m.g) derived from phytozome v7.0 (chr-ID scaffold_126 ; pos 218895 to 219047)
gctcttcttcaagttctgaatcctcttcttttcatttcaattttacaccaacttccaattattttagctgattttagccgaattattttgactgattttgttttttgtgtgtgtgcagattactgggtgataaatctccattttcgcagcaga

SEQ ID NO: 101316 - DNA, 630 bp, Mimulus guttatus
  Intron number 3 from transcript mgv1a009801m (locus mgv1a0 09801m.g) derived from phytozome v7.0 (chr-ID scaffold_126 ; pos 219408 to 220037)
gcattaccacgactatagacactgaagctatccaagtgagtttagatgttacactgatttttcagccttgttttttcttttttcgtctccgttctgctaaatatgtgacattagagttatgtatccgcgatttccattttaagagttctaggttgtgattttttacccttcatttaattttccgagggaataatatagctaagtaatacgtaattattcaatgaatgtctaactctcccaatgcacatatggtatactattgccactctaatttctcattttgtggattttgatgaccgaaaaaacgcaattatttaacgtgtagttttgatctttccttttttcttatcgagtgttactgtacttactaattatctgttcattgagtctgtttagggggtgaaatgctttatacaaggttaagaacatgtactgctacttatgaattttttgtttcccatcaaaagcaagcataaaaaactttttttttttgttttacttaaacatgcgaatcaaggaacaaagataattttttaatttatggagttttttttcctttctaaaaatgacatgcatataggtgctgatggaaaatgtgatgtaacttttcgttatagggtcgaggaagtt

SEQ ID NO: 101317 - DNA, 769 bp, Mimulus guttatus
  Intron number 2 from transcript mgv1a003614m (locus mgv1a0 03614m.g) derived from phytozome v7.0 (chr-ID scaffold_163 ; pos 199383 to 200151 reverse strand)
caggggagagccattcacgttcactcttggccaaggtatgtagacctcgttctcatcgtttttttcgccgtcattgtttttgtgtttggattgcattttttgcgcggatgagctatttaattagtaatcattcgctcgtggagttttcattttatcattctattgttgatcaattaggtttttactttttttttttaattaatctatatatgattgaatttgggattgagcatttgagttgcaacactaagatttagtattacagtcgtagaaaatagaggtgaattatcgtggctgggggcgtttgatgataaatataatttagagggcagtggagatattgaagcatggcttatcttaatgttttgaaaggtcaattaacatactgttgggtttcaactcatgatcaaaattaattatgaaactacgaggcgccaaaagtaatttagtgatctagcgtatggtgatttttctatttcaggttttccagttttctaatatgtttgcttgctatgtttttttgctttcatgaatttaaccaacgccatagttcgcatgcaacatagattttcaaagcccaacatcgtaatcatacacaaacagtatttattatgatatttcttcttaattgccgaaatctctaatagttacatctacatttgtcgattttcagctcctatcagtttaattgattccatagttgataaatgggttagaatttgacagttaatgaaaccctttgtattgtgacaggacaagttatcaaagg

SEQ ID NO: 101318 - DNA, 525 bp, Mimulus guttatus
  Intron number 1 from transcript mgv1a008417m (locus mgv1a0 08417m.g) derived from phytozome v7.0 (chr-ID scaffold_142 ; pos 259979 to 260503)
ttacgccttccgtccaagcacagtacttatctaaggttctccattttcttcccccaatttttatttattttattttttcaatttagggattctgaatcggtcgaagtttatatagaagtatcgaataaaatattcaagatttgtgttcttattggcaatttagttgcttaaaaagcctattagtaatactgctccagtttgtgattatgaaatgatctgaatcatatatacgaacgaggtttatccggcggttgttttattacgaactcgtcgattgttgttaaatttgtgagcctagtagtaatcttagtaatattttgtggtgctgtcacaatgtacaaggccgaaagacttgttctggtttctgcttttttagtggatcagtatctgacgaaatagaatcgaaaacggtctagtgtagaatttacgagcgagctattactactagaggatattgaatctaatgttagtgctccttttcttgtcgaagtaaaagaaaaatttgattgtctttgtatgccacag

SEQ ID NO: 101319 - DNA, 938 bp, Mimulus guttatus
  Intron number 1 from transcript mgv1a004490m (locus mgv1a0 04490m.g) derived from phytozome v7.0 (chr-ID scaffold_44; pos 755593 to 756530)
acgcagaagataaccaagtctagtcctgaggtattcacacatcaattttgtcgatttcttcaccagattatccatatcgagaaaaagaaaaatcttagcgatttttaatgattttgtttactagtttagggtaactaattgtgattactacttgtaatgtttcatttgccttcaccaattgactaattattaaactcaattgacattgcaatacttgactgaatgaaatatttgattgatacttttgagtttgggatttctagttcttgcgtttcgcggtgaagcttaattctgattttcttttttcctattcatcactgccagctgaagttgtagtaaatctatgatccctcttgtccgttaagaatagagtcaattagattcgtaatgtttcgtaggagcttcttgattattaatttgttttttcgttgtttctaccaatcatgatattttaagatgcctacatctgtataagattaccgaacgaaacaataatggaggtattgaatagaacatcgatagcatcactgcacaattacataccttcgaccttttcctttaagttgtcaagttaaatgaacttttaacgcgtacactagcatagaaactgtactcggaaatgcatggtatcaatcattgattgcttgtaaaggcctgcagtataaattaagtgtgcatttggatggaaggtttgagggagggattttaaatccataataataagtccattgatgttgtttgaatggagtcatttgtcgaggaatttcaaatccacagctcccattttaattgttttctgagcaattgtggggtcatttcaaatccctcaatccaaacgcagcctaagagtttttcattgcctagtacatgtcagttactaatatttgcttctttgtttcggaatatggcagatttctacgggcggaggaggtggtaat

SEQ ID NO: 101320 - DNA, 973 bp, Mimulus guttatus
  Intron number 2 from transcript mgv1a015221m (locus mgv1a0 15221m.g) derived from phytozome v7.0 (chr-ID scaffold_60; pos 1161743 to 1162715 reverse strand)
gaccccgaggcagtaagtaatactttccccccccccccccttttttatggccgattcaatttttttttattttttttggtggctttatatgatcttgctttaggtatgattgggataaagattaattgcgaatcgacattttaattgaagttgccttattttgcctgttcaattctgctgttaacgcgttattctgatactcgatttttggatttctgagtttaatttgatgtgccaatttaggcgatccaaagtcgttcggattgattaattcgacattggattttaaatttctttataaaaaaatttattttattttggctttagatgatcttgctttaggtatgattgagataaagagtaattgcgaatcggcattttaatggaagttgcattatacagcctattcaattctggccgggaggtttattctgatattcgatttttggatttctgagtttagagtctccttgttttttatcagttcctaatttgatgtgtaattaggcgatcaaaactcgttcggattgattcattcgaccttgtatttgaaatcaatttacaacattttttttagctttagatgatcttgctttaggtatgattgagatagagattaattgagaattgacattttaattgaaattgcattatttggcctattcaatcctgctgttaacgtgttattctgatattcgatttttggatttctgagtttaatctgcttgtttttatcagttcctggaaatttgatgtgtaattaggcgatccaaactcattcagattgattcattcgacattgtatttgaaatcaattttaccttttttttttttttttgatttattgtgttggattccaaaattcatctcgtttcgaggcatttgaaatcccaatccaatatttgagaagaaaaaaattgcgatattttccaatttcgatggtgtgtaaatatatatatatctgtagcaaatt

SEQ ID NO: 101321 - DNA, 1065 bp, Mimulus guttatus
  Intron number 1 from transcript mgv1a000561m (locus mgv1a0 00561m.g) derived from phytozome v7.0 (chr-ID scaffold_68; pos 192767 to 193831 reverse strand)
ccaccatttgtaccgactgtgccaccaattgcaaggtcggatttttagctgtacacacacatttacacacactgaaggttttatcttcttgatttctgaccggccacctttcagatttaaatctagttagttagttctgtgcatgcaattactatgcggattgttctatgcaatttttagttgagttttagctttcgatacaaatttcacacacacacacccgcatgtgtgtgtgtgtgtgtgtgtgtgtgtttgccaattaaagttccattctttttcctccatagagatggcaccatctgtaaatgtttctagcttgtgatggataaataaataaatcattatttttatgtttgccatgtggagatgtaatataataatataaacagggatgtctgttttttttcctatattttgatatttaatttattgtaagttatgaaaattacaatcaacccccaactatgaatcttcttacacgtcgacccttgcggtgtcaaatttaaaggaatcttctagattgtgttgaatgttttccagtttgtacccgttttaccccattcgagctacacattttgcaacaagttgatcgtaaaatatgtctcttgactagtaaatatcataatgtagtgcatcggaaactgcatttttgtacaaaacgagtacaaactagagaacattccacggaatctagaagattatgatgaatttgacaccataaggatgtatgtgtaagaagattcatagttgagggggtgtggttgtaattacccaaacatgagggagtttttgtaatttgaccttatatcaggggtggccgtaattttttcctttaatttattaaagttataatctttgtacatatgtttattggcaaaaggtcagatggtatagtttctttactgcaatatcgaaatgccaaagaagctgttacttttgttatttaccaatgatgtcataatgtaaaaattatttaatttaatcttttttatctgataaatataattttcaaaaatcccacaaaatgcagctggatcacggcatcttttcagcttgcgaaggtgg

SEQ ID NO: 101322 - DNA, 624 bp, Mimulus guttatus
  Intron number 1 from transcript mgv1a017040m (locus mgv1a0 17040m.g) derived from phytozome v7.0 (chr-ID scaffold_8; pos 1502920 to 1503543)
tctcaggtgatgataattttgtttttttatttctccgtttgaaaattagtagaatgaatgattttggttttttttttttttttttttttttttgttgttggaattgtttcacggaatttccttatgttcgttagatttgatttgtgattgttgctggtttggcttgaaacaagaaaaagaaataagtggggtttcaatttatctgagatgaaagggtggagaaatgaatcaattagggttagaaatcgtgttaatttgctggtttatgcatacagaacttctgttgtttgggaatttaattcatttattgccttgacacttttattttgggatgattttttttttcttttatttctttgatgattggattgtagctatctttgcagcagaaaaatgttatgaaggaccgaaacaattcgtttgtagcttaataattcattgcggttttttattctggtgattttcggtcattttcctgaacatgatgaagggaagaattatttagctaaaattgacataacaagaacttcaaggatttattcgttagttgattatacgttcgatttttgatgatcttataactatttttttatcaaactgcagaccgttgagctgaaggttggc

SEQ ID NO: 101323 - DNA, 859 bp, Mimulus guttatus
  Intron number 2 from transcript mgv1a007172m (locus mgv1a0 07172m.g) derived from phytozome v7.0 (chr-ID scaffold_7; pos 3078160 to 3079018)
atttcggcgcttgctttcactatctagtaagaattctcgtgattttatgataattgattatgtgaagttttttaggatatgatagaactgatttatgtatggatgcatgatgtacaatcttgggtagattattattcttaggccttgtttggttggtaagataataattcatgattagggggtggaaattggaacagaatttcggaattccaccgattccgatcagaatatttccgattatggaacaatactttttcattacgaattccaaaattccgatttctgatttttccaatgtttgtttttgaatagaagtggaatacatgttagattccgatttccgatccggttttaattttcgaaaatattctctgtaaattccgatccgattttttctgaaaatcacacttaaaatatcagtgccgccgattccgagttgaaaatttcctaatttggagcaagttttgcattccaatttccgaattttccattttttttaacggaattagaattactttttcacttccgaaaagaatttgaatttttctgaaagcgctaacttcggtccgatctttcagatttacaccctagtcattattaattaaatgattaggtcttacaataacttttagggcaaacctgcaattctggaaagatgagcttttatattggttttattgttgggattttgtattggacctcccctagtacaattatacaatcgggttctcataaaaatgcacaatattatctcgggaactgaacgaggccttaatatcgtcttgtatgaagttaaattcgaatgtacaatatatgtattgcaggaagagaaagcaatcgagagaggaatccttcgatt

SEQ ID NO: 101324 - DNA, 629 bp, Mimulus guttatus
  Intron number 1 from transcript mgv1a015710m (locus mgv1a0 15076m.g) derived from phytozome v7.0 (chr-ID scaffold_75; pos 535656 to 536284)
agaggagagagaaagaggatattttgcatttgaaggtactattcgtggacccaattttcgtttgatttttcattttgattggtgaatctacggatagcgtaatgaacctcttgaatgcatagatctcgagttcgattactcgtaatgattttttctttttgattttatgaataaagcatgttcgctgtcgccgatcttctgatagttcttctcggaacagtttttgcgtattagaacagcgatttagtgtttgttagctgtagtttgtttggatcttttaatggaagtgaagtttcagaagatcaagtaatttagattactgagggtttatctctaatcaataatcctgctggagttttttttttgagtaaaattatcgttaaaaaaaaggctgaaaactttgaaaatttgaagtagtatgtgttagcaaggagggtaatagcactgataagagtggaattttattttttcatggatttaattttcaatttcgtggtggttagttagtcggggttttttttttgggtgtgttttgcttcttagtgatggattattgaagggaacaattatcttaatatgctgtttttctgttaggtttcttttgatcaaaccggcagcaaatcgatcat

SEQ ID NO: 101325 - DNA, 600 bp, Mimulus guttatus
  Intron number 1 from transcript mgv1a014778m (locus mgv1a0 14778m.g) derived from phytozome v7.0 (chr-ID scaffold_255 ; pos 209420 to 210019)
cattctctctctaacaggtagctgtttttttttctttcttttattacatatctgccccgcatcaatttctgcaataatgcataaagcttgaatcttttaccttttctctgtgtgtgtgtgtgtgtgtgtgtgtgtgttcagttcttgaaatgggttttcaatgttttccatgtattttctttctgctgtgtgtttgatgcagcaaaaatattgaattttgttttctgatgatcacttgggctttttaagtttattttgtgctaattcatgaattgggtttttcttaaagcccttctttctgaagtaatttgtactgtttcccccctaattgaggtgggtggatatgtatatttactactgttttacaagggttgaaggtgtagtgtaaagttaatatcattgttcttatcattaattaaacaagcttacgcttttaatcttcgctactcgattcatatcttggaagatttcggaaaagcccttaccacaaagaaactgttgttatttattgctgatcaagaatttcgatatttatcgtatacgtaatagtgttcttaaatgcacgacaggtactaatactatcgcgaaaagaaaaagaaa

SEQ ID NO: 101326 - DNA, 735 bp, Mimulus guttatus
  Intron number 2 from transcript mgv1a026498m (locus mgv1a0 26498m.g) derived from phytozome v7.0 (chr-ID scaffold_12; pos 2678072 to 2678806 reverse strand)
gctcgttcgggcacttgatcttgatcttcgatttggtaaatcttcgtattatctatatatatcttttattttctctttaattaaaaaagttacaatattgattacagtagaacatcgataaattaatactgaataaattaatagtctcgcttaaataatagtttcttttggttccgactcggtaaaatagttataatattgattacagtaaaacatcgataaattaatactcaataaattaatagtctcgcttaaataataatactccatcccttcctaaataatcgtcacttttcacttttcacaaagattaagaaactcaataaatatattttgattttaataaaatcatataaaaattactaaaacaaccttcaatatttaatgatttataagaaaaaaataatgaatagagtttcattaataaggttatacatgaaaaatgcatttaatgcaatattggaaatctaaagtgacagataatatggaacaaaaatatttttaaaaagagacagttattgtggaacagagggagtagttttttctagtcccgactcggtaaaaccctactaaagtatatatattagttcgataatttaatatttcgctaaattaatagaattatgttagtcatgattatactaatttatagaggtttaactgtatttttaatattttatgtatatgtatgtatatatagattgtggcattgttgttggattcaagtatatctgc

SEQ ID NO: 101327 - DNA, 400 bp, Mimulus guttatus
  Intron number 4 from transcript mgv1a019090m (locus mgv1a0 19090m.g) derived from phytozome v7.0 (chr-ID scaffold_226 ; pos 82737 to 83136 reverse strand)
cacctcaggcaaaggagtataggtatgcttcttctatattgcgcacaattcaatcttcatttccttttataaataattgatttttcttttattatgattttaaaaacataactaaacaatttaattaataaaaatgattaaaatatgaagttcttgattagtaatatttacaaatttctcacattaagcactactgagtaatgaagttaattaaataattatgcagtactaaatgtgaatgcaaaaatctcacaattaatcaagcaaaaatttccaaacgtttgcaagcaatttgattttttacgaactcgtatttaagattgggaaaaaaatgaattgaggttcaaaaatttcgatttgatcagatttgggttccaccagcctccgttcaatagtatcg

SEQ ID NO: 101328 - DNA, 841 bp, Mimulus guttatus
  Intron number 2 from transcript mgv1a008143m (locus mgv1a0 08143m.g) derived from phytozome v7.0 (chr-ID scaffold_98; pos 693520 to 694360 reverse strand)
aactttggtttcagcacacttcatccaagcttaaggtacactctcatcaagaaccctgattattaatcatgttattttacatttgatagcagcataatcaactaatatgtttgcttcaagtcgaaattgggaacggaattttcgaatttggctgaaaatttccgattttggaaaaatatttttcattccgaattgaattctaaaagttcggatttttcgattttttttggaatttccaatctaattttaatttcggaaagtattgtcgaaaattccgaacttttttttcttccaagaaatacatttataatatcaatattagattatgtattttgtattataggcgactaaaaacaattggagttttagaattctgctgattccgatccgaataattccgattttggaacaagttttttcatcccaatttccaagatacccattcttgatcttttttcgaacggaattggaatcagttttccactttcgaaaaaaatggattttttccgaaaattgataatttcgacctaatccgtccgattttgcatccctatgtttccaaaaggaatgattaatgcaaccgtcttatctggtagtgacaaatttggaaaaaatagaaaatcatcgcaacttatgatgcatgttaccaaacataaatatcgataacaaaatcaattgtaatacatgaacacatatccaatgcaaccgtaccaatatcacatcgctcctatcaaacgagccctcagcagaaccgggatttccttatgcgaatccaatttaattttctcgtttgtttgaaattgcagaggagttacacaaacaagccacacccacaaaaggg

SEQ ID NO: 101329 - DNA, 630 bp, Mimulus guttatus
  Intron number 4 from transcript mgv1a007900m (locus mgv1a0 04300m.g) derived from phytozome v7.0 (chr-ID scaffold_4; pos 2024539 to 2025168)
atattgagaaaggtaatgatttatatgcttttatagtattagaattagaatttactagaaagcatcaacaactaaccatttgtctttgtttaaatgtgtaatgagaaaatttgtattgtttgatgaactaaaaccttcctggattctctgttttttttttcttctttgtccattattactaaatgctactacttaataatgattatttgattagtggtagtacatgctgtatgtgaccctatttttaatgagttagaattgtcatgtgatttcatcccatttatacttctcattgggcgggtttagcatatgacaacatggtgtgagttatgtgggttcacttgtcacattccgtaatccctccgttgctcctatttcctttaaggacatcccacaacccatttcctgtaaaatggaaaaaaaaaaaatcacaaaagcacggcttcaattaatgtaaggattcgacaccacttctttgcaaggaagtcctggtgaagatcctcagaactttcacatttttaaacctccatactgggtcaaatgggacacatcataatagcaagatggggagtagcttttacacaaaaaatctgttctccttttctaatcgtttttcatcttctctagggg

SEQ ID NO: 101330 - DNA, 573 bp, Mimulus guttatus
  Intron number 3 from transcript mgv1a023190m (locus mgv1a0 23190m.g) derived from phytozome v7.0 (chr-ID scaffold_422 1; pos 2143 to 2715)
caacagttcaagcgattttgaaggggataaaacaggtatagcctctttccccctgacgttcagcagttgcaaacttagatcaaagattctcaatgacttggttttcatcatgtttgcaactttgtgtctgttaaatgaaatgcccatatcgcttgtttcactatttctctggattgatttcgtactaccttcagttcattttcttttttaccctattatgcaatcaaaatatgtagcgtgtcacggttaacttcccatgtcgtgaccatcatggacataaaaacgcctaaaagaacattttgaactgtatggttttgtctcagtgggactacttcaggagaaagtcgtctgtcttatattaatgtaaatcagtggtgttacagatattggagagtgagattttgtatactgttttttccgtgttcttctttgattatgtggatttcttaccgtgtggtcatgtctatttcctgccctgaaagccttttttgtctgtattttcattttcacattagtttaatacatgagtttatttcagagtccgaagaaggtaaacttggttgctgcattggt

SEQ ID NO: 101331 - DNA, 476 bp, Mimulus guttatus
  Intron number 1 from transcript mgv1a011759m (locus mgv1a0 10886m.g) derived from phytozome v7.0 (chr-ID scaffold_278 ; pos 58506 to 58981 reverse strand)
atcaaggtattcgtttatttttttcattttttttcttcataaatatataaatccgagggaagtgtgtgtgtatagctgttttctgtacaattggttcattagatatgctttaattttgattcctggatgaatgttgggttgttggtgtggtttcagatcttagatcgatcgagttttctctgaatctgaaaacgaatattctctgtttcattggtctctgtttgctagacttgttctcggagcttagagattgtactgttgttttgtgctgagtaattgttcatttggagtgttggattctgttagacctaatttttcaattgcagtgatattgtatctttatttttattaatttattattattattattttttattttttataatttgtatgagctgaaggatattggttttgatgcttggggtttatttatgaattcaggtaagaatacagctgggccagggatcggcaggaga

SEQ ID NO: 101332 - DNA, 642 bp, Mimulus guttatus
  Intron number 2 from transcript mgv1a013282m (locus mgv1a0 13276m.g) derived from phytozome v7.0 (chr-ID scaffold_22; pos 1249033 to 1249674 reverse strand)
gacattgtacctcctttttcttattccctattttttgttttcaattctcaactatagctgtatagatatagatgattgtattgttcgctacgtatatataatatgttttgagtatatgtatactagtattattttctaaattgaaattttgaagaaagtcgataactaggcagacagtagttatgaaatcaaagtatattcgaattttgattagattttctattgcagttccatggatagtgttgttgtacggattcaaaccttatcattttgatttgtatgagtagtgaaagtttagaaatgttgctcaattacgtatatttagttaaaaattattaatcacttaggaacactggacaattttgtaatgcatatagaagtttgtaaagtttgtaaccatcattcctaggtgtatcttttagcttacacgtctgagatttacatataagaagatgcatattgcacaacatcaatattaatgcctgttccgcgcaccttgaattttgcatctagtatcgatttcctgttggtttttatggcgattaagcactacaaataacttatttattgtttctgatattcgtttatattcactgtttcaatgcaggacgggtaggttgttattcagttcaagaattcaat

SEQ ID NO: 101333 - DNA, 414 bp, Mimulus guttatus
  Intron number 1 from transcript mgv1a008712m (locus mgv1a0 08712m.g) derived from phytozome v7.0 (chr-ID scaffold_4; pos 664384 to 664797)
cgcgtgaagatccaccttcttcccggactttacaggttcctaaatcttctcaattctctcttttatttttatttttattttttgtttttcatgcatgcagtttatactgatacttttttcaagtgtgtcagtgagttagttacatgtgtgtattggtatttggtattcggctctctctctctctctctctctctcctctctctctctctctctctctctctctctctctctctctctctctctctctcctctctctaacttcccctctttgatcttcgctattttttattccagcatgatatatgaatgaatgatttaatttttctctctctcgtaattttttttaattaattaatgaattggtgaaaaattattgcagagaaaaggtgcatatccctgcaaacaagccataca

SEQ ID NO: 101334 - DNA, 448 bp, Mimulus guttatus
  Intron number 5 from transcript mgv1a009089m (locus mgv1a0 09089m.g) derived from phytozome v7.0 (chr-ID scaffold_170 ; pos 191030 to 191477 reverse strand)
cttggcatttactccccctgagtatctaaggactggtatgaacataatctcactaccaaaagaagaattttctactccaattgcatgcattatggaggatattccaccaaaattcaacgattttgatttttattatctggcgcacattaatgatgactctcaatttaagactgatgcatttaggttaatatccaatgcatatgcatattcttactaatcatttctctctctctctctctcggttttttttttctttttttctgtcgagtctacatattagtgtacactatacgggtttgtgtattttctgtattgagatattctattgaagtccgttaaactcgttatgtcactatagtattgtattcgagattgttaaactattgacacctcaatcctcgtaattcgtataggtagagttacaccggaaagtgtaatatacagcttc

SEQ ID NO: 101335 - DNA, 534 bp, Mimulus guttatus
  Intron number 3 from transcript mgv1a009089m (locus mgv1a0 09089m.g) derived from phytozome v7.0 (chr-ID scaffold_170 ; pos 191751 to 192284 reverse strand)
agacacttgctaaacatctatttcactgtaagtacatctcatgcaaggtgaaattttttttttcgggtaattattccaattcaaagttgaattttcgtaaatttcatgtttctgtcactccgcatgtagagtgggttcccgtttgttaaaaaacaaaggtgttatatttacgtagtaaagtttctttaacctaaagtatagcctcgatttcgccttttaatgaatctctgcttaattagaaacttaggcgccaaaaactgttgacatgctttagataccgtaaacagtttagactttaatttagtttgcctagggtggaagaacaattcacgtggaattactttttactcgtcgcgggctactttagttttattttgagagccttatctttctcaaatttcctcaagtaaagaaaattttagtcgacacgtatattgaacatatatgtcgactatcacattgggattcatctcccttaatatttttttatcgaattttacaatgtttaaactaccttcaggggaagcacatcct

SEQ ID NO: 101336 - DNA, 1047 bp, Mimulus guttatus
  Intron number 1 from transcript mgv1a010119m (locus mgv1a0 10119m.g) derived from phytozome v7.0 (chr-ID scaffold_77; pos 1042752 to 1043798 reverse strand)
ttagtgctcatcgccgaaaagtgtcttctggttaggttcgtttttgattttttttttcagcttagatttattttgctttgatttcatgatctgcttcggcaattcctttgattttgagcctgcatttcgaattggtttcgttatttgtgatctttagctaatgatgttcatcgcctgtcgtccagattttctgatctctgtttaacagctggtgattttctgggtagttgtttgatgagttttgctgaatgtacatagagaaattgaattgcttgttctttgaatttcttatgtgggcgtttaattgcagtatttgtttctcatttatttcttagtttagtttttgggtgaagattttgtacttcaattctctgcctctctctatatatttacatatataaatgtatataaaatgaaagggtttcagggagctagagaaattagaagagaaaaaaacaaaacatgctttagaagagttgcattagcaatttggtagttttgtcgtcgtttcgatatgcttccagtttctttattcgggtaagaactgcttgtgttcgcactccaattggttctctattctcgctaggtgatatgcctcgtattttataccaatctgtttcaacaaaccataccatccttaatgtaaacaaggtagtagttattagatgagtgaacagttgccacactattaagattcttattttccaatcaggaattcttgtttatttcattgagttcttctgcactcatttgctttcgttactcaccttaagcaactctcgtttttcatttccaccccatcgctatatgtgaacccaacatttcattttcttttctcaactaccagttatattcgttgaagtagaaactttacaactaaaatggctgagaagaagcatattattgtgcaggaaaggctaatagggacgtattttagattaaatattattcgtatttcattagaaacgtattgaacttactactatccaatctcatgtatatgatgatgtgtttggtttcgtttgtgcaggaaaggtcacttagcga

SEQ ID NO: 101337 - DNA, 895 bp, Mimulus guttatus
  Intron number 1 from transcript mgv1a004707m (locus mgv1a0 04707m.g) derived from phytozome v7.0 (chr-ID scaffold_235 ; pos 202708 to 203602 reverse strand)
atttcttattcgcgacggagcagtaattccaccctgtatgttttacctatttaatttttttttcaatttcagtagctctttttttcaactgagactgatttttcgaaaccaaacaccggatttttacagtgttaattattctgtcattggtgtttgattgaattaattcggccgttgaaggcagttgtcgttgaattctatgcagatttgttgtttaaaggagcgaactttgctttaagttaaaataattagttttacttaacttgctaatttttaattttagcttcttaaaatttagcaagttcttaccttatagattttgctgttgtagtgcaattttggtgtaaaaaatgtaaaaatttatgggtaaattacaaccacccctgaggtatggtcaatttacgaaaaaatccttttatttggataattacatctacccctcagctatgatttttcttacacctccacccttatggtgtcaaattcaacataatcatctagatttcgtggaatgtgctctagtttgtactcattttgtgtaaaaatacagtttctgatgcaccacaatttgatatgtataaggcaaaaaatagatattatgatcatcttgcttcaaaatgttgagttcaaatgggataaaacgggtacaaaagtgataatattccatataatcttgaagattccattaaatttgatactacaagaaatttgatactacaagggtggatgtgtaagaagatttatagttgagggtggttgtaattacccaaagatgaggggttttttttcgtaatttgaccatatctcaggggtggttgtaatttacccaaaatttataggtttacatggtgctgttgcagaaagtctcgaaaccgcgcatacaatctttctgagg

SEQ ID NO: 101338 - DNA, 761 bp, Mimulus guttatus
  Intron number 1 from transcript mgv1a001592m (locus mgv1a0 01592m.g) derived from phytozome v7.0 (chr-ID scaffold_1; pos 1432843 to 1433603)
gaggacgaggggaccgaaggtgagcttcaaatttgatttagtttcatgaacagcagctcattcatgttaatttactgatttagttatagttcaacttacagtaggttttaaggtttgttagaaagcagattttctaagtatttggatcaactcgatactgtgtttctgttctaggtttcaactcattacatatgatagtgttgtgtccgtgattcatacattttgtattctagctgtatatgttaatttacacatgcattttatatagctctatgtgtttatttatacatgcatgtatctatatcttagcagttctggtgtatataacagctttggttataccttatacatgcacacaatttgaagaagcacaccaatttgttcacataaatatttattcattgacatttaatttcaaatgtggtattttagtgaacaaacttctagaagagtgtctctaaatatcaaggcccagattcaaaacatgattgttttcacatattacaacttaactaacactactatattgagataaatagatagtatgcctcttcaactgtacatatcattgggggatgggaataatatgtgcatgttatgctaatagtcacatcatctgctaaacgtggaaatgtacctattcttcaattccgaagaaatggcgttaattactttattaagcagcacatggtccctgattgcgaacttctgattttcaattggtcaattactgatagtaatttattggttcaggtttggtt

SEQ ID NO: 101339 - DNA, 533 bp, Mimulus guttatus
  Intron number 1 from transcript mgv1a003927m (locus mgv1a0 03927m.g) derived from phytozome v7.0 (chr-ID scaffold_27; pos 910283 to 910815)
attcctctgtttctctctctgctagctacacaaaggtaacaaatttctcttctttcttttctgtcaattttctagagagagagagagagagagagaatctgcgtatgtgattttcttgattcctttctagcttaacagaaagatttctaggatcaaaccttaattttgttctgggcttcattttgttgtcttgatttttcgagtttgaagattcaaagatcaattttttatttaaagattggttttttatttaaagatgcaagattcaattttgaagtcaaagatcaaatttttttttttggtgtgtttctgtcaacttttatacctttcttttttaaaatggaacgagttaagcaagattgctttctggagttaaagattggtcttttatttattttctttattaatttaagatcacaaatcaagatacatacaccaattcgtcaatccttacataaatcattgtctgagaatgaatttctttttttttgcttacagaaaaagtagagaagaaagcagtgggctttggtgta

SEQ ID NO: 101340 - DNA, 996 bp, Mimulus guttatus
  Intron number 2 from transcript mgv1a003927m (locus mgv1a0 03927m.g) derived from phytozome v7.0 (chr-ID scaffold_27; pos 910848 to 911843)
ttagccaaaagacaagagcaaattgaggtattattttgtattttaatcatttggggtttttatttgattttattccttctttcttggcccatctcacaacatttaaatacactccattcaaatattcatatatatatacatacatatatacatacacaactggagatagagacctctttatcttctcttcaaagcaaagtctttttccccctatcaaaacgcccaataaaaaaacattattaggaaagatgcaactcacaagatgaatgaagagtaaagttacctccttttttgtttttatgcatgatacaattatacccctatgaatacacatatttacttacatgctttcttgattcaaaaattctgtgttttgggcatattagtcattacaagtaaatcttgacatcagcttttattggacggtagattaggctgttggaaagttccttctttcactttcatctactgtcattctaacatcttctcatcattgtacttctccctcatattcattacagtattttaaaaaaaaaaaaaaattgaataaattatgatgatgtactataataaagttttttttattattttattattttaatattttttattttttttatgattaggtgctttgttattacctgtcggccctctcattttatgaccatgcaagattctagaaagtcactaatctcgacccactttctccatttatttattgcatttttttcccttttttaattaataaatttatagtataatctttgatcattgcaaccactccacatagctttagtttttctattacaaaagtatttctattaccaaaatctttctcttttaacgttttgctgatgttagttcctgtccaaatagttccatcttacttgtcaaagattagatttttttgggggattcttgattatcaaggttttgatttttctttatttgtgttccttttcagttctgagtgataaaataatttgaattcgaatc

SEQ ID NO: 101341 - DNA, 639 bp, Mimulus guttatus
  Intron number 1 from transcript mgv1a027148m (locus mgv1a0 27148m.g) derived from phytozome v7.0 (chr-ID scaffold_1; pos 200462 to 201100 reverse strand)
attgaaatccatcagttgtaaataaccaagtgtagcgcatctaattagccgtttatattttagacggaaacattataatgtctactaaatcggctaaaaaatattatttttgtaattgtaattacaaatactattaaaacacattggaattaaaaataaaatataaatctagaagtagtaatgtgaagaaaaaaaatccatttctctgcagttcaacctttgacttggatgcatgtaggagaaaaaaaaggagaaacacccaaaagaaaaaaaaagaaaaaaaaaagaaaaaaaaaagcaaaaagaaagccttaattcaatcaagaaacataaaataaaagaaacattccccacccccatagctcttcatcccccacccccgccggagacgcacccgccaccgatatctcccacacacactacacacactagacacaataaacaaacccaccatataataattagccatgcacaacaacaaaaacaccaccgccaccaccattaatcccacaatcaattacaccagcaataataacaataccaatatcaatatcaatatcagtaccaataacagcacatccgccgccgcacaccaccaacgcagccacggctccaccatccaagcctgcgcggcctgca

SEQ ID NO: 101342 - DNA, 737 bp, Mimulus guttatus
  Intron number 1 from transcript mgv1a015780m (locus mgv1a0 15780m.g) derived from phytozome v7.0 (chr-ID scaffold_83; pos 1016437 to 1017173)
ttctacaaggtcagacttttttctgattatggatttttagggtttttttttttgtacaatttggggttaatctccaatttgctttttttagtagctttgattcagtattcggaatattcttcatatcattttttgcaattgatgatctaattctgccaatttgtttatcttcatctgccaataggagctttgctgaaactggaatgcgatgattttgattatgttatagttaactaggttttgtgggtgtaatatatgcaagtgtttgctatttatttccttttttattttctagagaaagaatttgaagcatacattctgattcgtatattagttgcttggttggatattcattttgaacaagtttacgagtgatcgcgaagtacaatatcctctgttgagtctatgatatgtgataacatttcctttttaattcaattaggcatccctcggagtacggaagttccatatcttggccgtatttctatgaaacgataaataccacctatttgtgcatcggtgcattcacagagtcggataattttcgtcgccttatatgcttcatggttgatcttttgaccacatgtgatgacgaaaaaacctaggaaacattttgtcggaaattagatattgaaacaaatgcatatgctcatatgctcatatactacctccttatgtttcatttcgtgtttctgtggataggtgctgaggtggcagttctttgcataacaaagtcg

SEQ ID NO: 101343 - DNA, 569 bp, Mimulus guttatus
  Intron number 2 from transcript mgv1a022679m (locus mgv1a0 22679m.g) derived from phytozome v7.0 (chr-ID scaffold_60; pos 20088 to 20656)
gcttgctgtcaacagtactctccctctctctctttctctctctgtatatacatacataaacatttattttttcatatatagataaataaataaatatgttcttgtggcatatgatcctctctgaacatctgtttggtctcccatgacagcatgttatcattttccgattctgtgctctttgcatcaggatttattaaatgtggacttaatagtctaaacactcgattcactgattttgtgaagaaaattagcaagcagacgaagtaaagttatatagttccccttgtctatttgtttgagcctactggctactgcttatgaatttcacatcaaaagaaggtttttattttatataggacatgatgctacaaggatctcttcattatatcttttcgtatattcctcaatgacatggataaaagaattagggattcatataatgtattttttttcttccctttatttcctcgtctcatactattagctttattctgtagaccaatgttgaaacaactgtttgattttaatttccagctgtagatttcttcaaccaggtgaatcttctctat

SEQ ID NO: 101344 - DNA, 887 bp, Mimulus guttatus
  Intron number 1 from transcript mgv1a018922m (locus mgv1a0 18922m.g) derived from phytozome v7.0 (chr-ID scaffold_45; pos 967999 to 968885)
ttgggaatttcttgcaagtctctttccttgtgaaggtaaatctttatcttttaattaatataacgaataatctgtttaaaatcatctacatatgttgttagtgaatagatttaattttgtccccgtgtgtgtttgtgtggatgggtgttttaaataagggtaaattacaactactcctgatgtatgatcaatttacgaaaccctctcttctttgggtaattacaaccagcaactataattttttttactcgtccacccttgcggtttcaaatttagtagaatcttcaatattatatggaatattatcacttttgtacccgttttatcccatttgaactctttgaagcaagatgattataatatgtgttttttagcttgtatatatcagattgtgctgtatttttacacaaaatgagtacaaactagaacacattccacaaaatctagatgattatggtgaatttgacaccataagggtggaggtgtaagcaaaaatcatagttaaaagatagatgtaattattcaaacaaaaaggttttttttcataaattgataatacctcagagggtggttgtaatttaccctttaaataattaatgttttaaatagacacaaggtgagtattagtataactaactaattaatactttgaaagcttgtgaagaaagtatttatttgtttctagtgtaagcagtagtccaaattcttggttaatgtgtgatctcaatgctttacacaaattattggatatttttttttggtcatttgattcaatatattattatgtattctatattatgcgtagatgaaaaacaatttaaatagagtatttacttatcttttctcttacagaaaaagcaagtaggttgctgcttacaagccgcaat

SEQ ID NO: 101345 - DNA, 880 bp, Mimulus guttatus
  Intron number 1 from transcript mgv1a008705m (locus mgv1a0 08705m.g) derived from phytozome v7.0 (chr-ID scaffold_54; pos 259359 to 260238 reverse strand)
gggagcttgtctgcattattacgtcagttcatttttttcaagatttctttgctacattgttcttgatttgtttgaagtgtgcaattattattttattacaacatttttttatctagttttgttttaggactgttttgtttaattagtgtttgagattcgttcgatgtgtttatcgtcatatgtagattgagcatgatcgaatttgttaactttgcttattaggtagagttttcatctgggattctttcacttttttatttgtctgttgtatttgttgtttggttgcctttttctatcttattgttttgatctcaataaaccgagtgacgttttagatttcgacgtatttttcccacattgtttgtttcttcgatttagtatcttccgaaaaaaaaaacaattaggaaataaatatctttaggtaggatttgtccaagatttcacattttcttcgtcggttgtattcgttcgatctcaatgaactaagtggcatttggatttcgatatatttcgtccatattatcagttcctctaaatttttaccaatttctgaaaataaaaataattaggaaataaattttcttgatttgatgtatatttgctatctttattcttgtttttatctctattaatagagtgacaattagattttcgacatattgtttgttgctccgatttagcttcgaaaaaaaaagaatcaaaattgcttaggtagtatttggtgcgattaatgcataatctatccgagattttacattttctttatctattatattagtttggttgctttttctagattttcttgattatgaaacaaattttcttgatttgattaatttccacaggcaacaaaggtgccggaagaaccccattgaactgg

SEQ ID NO: 101346 - DNA, 1002 bp, Mimulus guttatus
  Intron number 1 from transcript mgv1a016568m (locus mgv1a0 16568m.g) derived from phytozome v7.0 (chr-ID scaffold_27; pos 1410418 to 1411419 reverse strand)
ctgcagtagaaccttacttcaatcaattcccccaggtaattttttcctttttttttattgcagattaatttgctgttgtttagctgttcgaattactagttttatcttctgcatcgattttgattgactgtgtttgttattttcgttattatctgtaattctttcgcatgctgcgcgcgaacagattgtgttgagatctgtcttgatctaggttatcggagatttaatgaaattaatggaaatgtaattgtgatttgtgagtatcttgaattgcatgtttatccgcatttgattttccgtgattgtgtgaaatgtaatgcggatttgcttttgaatttgttttgatttcatgttcatctgtatttaattatacttgttaaatttttttctggggtaattataaagctgagttaattaaaaaaaattaaatctcgagtgcggttgattagaaaattaaccgatgaaagaatcgaaattatgttgaagtattcgaaatactaatgctatgggaattaagagagtgtgtgctaatttgtgaagaatgtcgaaatgatgtggtgttttggtaagagttattaggatttttttattttatgacaatttgtaaaactatcacttatttgtgcagttgtctaggatagttgccatacattttgaagaatatcgaacttgaatataggtccagaatgtttaacttgacttgttcaatcggcctttctttgatttctgctctaacaaatttaaaagagtgtaactatcgatttttagttgatatgctttgtttcctaaacgaacgttaatctcctgacaccgtttacaccatagtgggaggaatttataccttaaagaaagtattttatggagtgcctaggctatatactttgcatactcactattcttcaattaacaagtggatgatattccgagtagtttttcttttctttttttataagaccattggcttctgcaggtttttttttctgagactcgtaaggggggaat

SEQ ID NO: 101347 - DNA, 589 bp, Mimulus guttatus
  Intron number 1 from transcript mgv1a015062m (locus mgv1a0 15062m.g) derived from phytozome v7.0 (chr-ID scaffold_87; pos 647750 to 648338 reverse strand)
gagtttggctcatacgaaaatacccaaggtatttcattctctttttaattttttattttttattttttttcacacaaaaatggattatttttatgaaatttgtggaagttttgacatatggaatgctgtaatttcaatttctctacagttttagtcttcgtctctgttattcgtgttttgagcatggggtttattagaaggaaataaaaatcgaattatagcgtatctatttttgaaagtattgtcatatgtttttcgattgtaatgtggctgttgccttgtgtttaattgtttcactaaagtcaactatttgagaaagcaactcgtaaaatttcggaatttgcatcagatgcctatatacgaagcagcagttaaaggagatgtaattcttcgtgtctcgtttatattgtttggtagataaggtgatgcagctattttctttaaaaaagaaaattatgaaaaaatcgaaaacagagaacatggctcgagtgcttcaaaaaaccaaaattatttcgtattattaaccggcctcgattttcttctcccaaaaacagataagggcagcagcagctcaaagaaagacactcct

SEQ ID NO: 101348 - DNA, 1000 bp, Mimulus guttatus
  Intron number 3 from transcript mgv1a015385m (locus mgv1a0 15385m.g) derived from phytozome v7.0 (chr-ID scaffold_8; pos 51978 to 52977 reverse strand)
actttcacctctcgctgcttagctgctatttatcggtaatttcatttttcatttttttatttttttctttgccatttgattgataatagtaccggtaattaatggcatctcggtctcgagtatgtccatatatatgtatggtctttacgtgtatgcaatttaatctgttagccagcatgctgtgtcaatttccatcaattccttggtattattacattaatcgagttaatggaatgtattaatttgtttctggcaactataaccaaccatgttatggagggctcgtttgatatgttgacgaggattttagccttgatattgttcacaaaaaaattatctaaatgctttattgaatcattattggtggagaattatcgattcagtagttgggattctgtacgaggtttaggtgctatttgctggacatgtaatagtataatggaatttagcagtttgcatgtttttattttctcgtatttcttataaactaatcgtttggaccactcttttagtatggtggttaatatactgacgccaccatccaacgccctccgtataaactagttttgactttgaagttaatttatcgatacgtttcttccagagatgattgatgttcagaaaataaaaatttatatatgcatgtacatatatgtgtatacacaacactagatagcagttttgattgtagatgctaatttgcaaaagacagcttgcttttgaataaacttgtgttgacaattgaaaataccattaggaataaaataaacgacgtgtatataaatagctaagaacatatatatataaatcatttgtttactggaggaaggctgaagctgtatttgaggagacgtacgaagaattttcatagatggttaagttgtaataaagcttgattagttatcgaaagggtcggggccgttttatcagcatttaacgttttttttgggatttttcatttgcaggtgattccagtctccagattcagagtagctatata

SEQ ID NO: 101349 - DNA, 404 bp, Mimulus guttatus
  Intron number 2 from transcript mgv1a008842m (locus mgv1a0 08842m.g) derived from phytozome v7.0 (chr-ID scaffold_142 ; pos 233097 to 233500)
cagccctctggtcggagaggtgtattttgctgatgctccctctcttcaattgttgtcttatagttgacctaagtgttatttgatttgggttcaatctcgaacgctatcgttacgaatttgattaaatgtttacgattaatatataatcgacattctatatatttctattgacaatgataaacgaatgtagaaaaaaattagagctttgttctagactaatatactgaattagatgcttaaaaacctaagaacatctcgtcggggtttcgagctacagttagattaaattgcatttgtttttataactctgctagagtatgagtgaagtaacttatgttgggattttttttttttgtggcgaaaaattaggtagtgttattcttgtgagcctacaaagtattgtt

SEQ ID NO: 101350 - DNA, 842 bp, Mimulus guttatus
  Intron number 1 from transcript mgv1a011634m (locus mgv1a0 11634m.g) derived from phytozome v7.0 (chr-ID scaffold_4; pos 3547648 to 3548489 reverse strand)
ttccacttgtcttggtttctcgaagcttcaaacttgtgagtctcaacacattcatccatcatcaaattgctgcctgttattttactttttgattctgtttttatgctttacccattgaatcttagtggcgatgagtagttgttttttaagtattttagttttttgatcaattcaactgaattatatcttttgtgccgtcgtctgattagattacatactgcaattttcacttagttatttatggctgtaagtaatcctgctattccgctcgtccatattgtagataaacttgttaacttgtgcggaattttcctcttttccattttttgttgtttttttgtttttattttttacctgttacatttagtttttgattcaaccggggtataatctctgaactctgtgaaattaagcttcatcgatcaattttatgtgtttatttcgtgtttgcgattttgcttttttttttttttcttttttttttttttttgtcgattgaagtattaccgtttagcacatcttttacgagagcatctgtttcgttcgtgttgattggcatatatttgtattggggttgatctctgaatctttgtgttttgcttctttcgatggtctcaatgtctagctttcaatattgtgagtatcatgaactttatgcatattactcgatcagtaacttttgaactttcttaatatagtttcggaaagtattcggctcataagttgcggtactacgtgtgttctgtacttcaccattttttcttccacctcgagactaaaaaaacttatttgtacatattgatttaggtaccaaactcttcaaataagacgtgcacgcatct

SEQ ID NO: 101351 - DNA, 319 bp, Mimulus guttatus
  Intron number 2 from transcript mgv1a024417m (locus mgv1a0 24417m.g) derived from phytozome v7.0 (chr-ID scaffold_228 ; pos 5080 to 5398)
attatttgcagcctctacattagtataggcagcaggtctatttccttctctctctctctctctctctcaaaacacagacaaaaaaacataagcacagaaaacttcttgtccttttgcttttgtttgaaaactgatcatcatgcacatggaatttctgatcaaggactaatcaaattttatcttttttctttttcttttttttttataattattttttcaattttgaggaattattcattcatcaatttataacataaagactgatatataaaatcaatttacaggtggtcgataatcgcggcgcagcttccgggaagaa

SEQ ID NO: 101352 - DNA, 731 bp, Mimulus guttatus
  Intron number 3 from transcript mgv1a016960m (locus mgv1a0 16960m.g) derived from phytozome v7.0 (chr-ID scaffold_40; pos 21695 to 22425 reverse strand)
ttgtaggcgctgcaatcaccgagcaactccacaaggtaaaacctaaccacttgtttctccaacctttttttcagattcaaaatgaattttgcttgggactattaatttgctctattgattttcttatgaattattgaaatctttttggcactattaatgattttttttataactgcaagtattagattggtatgcctctagtcctaggtcttttaggtggtgaaatattcgggtaaaatagaacaaaacccgagttatgggcatcgaattgtaaaattgaattccttcggttcgtgtttgctgattttgaattcgattgaaatctatgatactgattttgacgaagaaccacacgtgttgtcgatgtgtctgtctgtctctatgctctttgcattataacttcagttgcattatatctcatatacatatatatgtattctgaaatagttataattcggaattgtgttttgaaattgaattctgctgcctgcattttagaagctcttactctacaagtctttcaatctacaaggttaagtccgtaatcggaatatgaatgcacgctacttaagataatttcctgaatggtttcatctactgtttaattgtatgagaacaagcgtttgcctattttacacttgtcagaatactggtactgaaaactaaatagatttgcggttcaatgttttttcttaggagaaatattgggaaacacaccctggggaatctgt

SEQ ID NO: 101353 - DNA, 487 bp, Mimulus guttatus
  Intron number 1 from transcript mgv1a015907m (locus mgv1a0 15907m.g) derived from phytozome v7.0 (chr-ID scaffold_7; pos 2862570 to 2863056)
tgcttctccacctctctccactctgtaaatcaaaggttcttcttcttcctctttctgttgtaatttgattatatgctttttccgcatcaatttttttttttggttaaatcgtttctgtagtaactgaatttatatcggaatgcagtgtttgtatgaacataatcgatgaatttttcattttgatcttgggatttgttatgttgaatatgtggttttagaatttatttatttatttttaatctgatttttaatagcatttcataagttttgttcatctactgtggaattatttaccagcattttcctgatatcggttcatgattttactctgttaaaagaatattcttttggtatttattatttgaatgctgcactattaattctgaaaatttgctgctttaattatgtttccagacgaactgatttgctttatgtcatttgttttatggcagatttcaatcgaagaacctcgttaatccgaacgcaa

SEQ ID NO: 101354 - DNA, 841 bp, Mimulus guttatus
  Intron number 2 from transcript mgv1a007420m (locus mgv1a0 07420m.g) derived from phytozome v7.0 (chr-ID scaffold_59; pos 114310 to 115150 reverse strand)
atccgataaaagtcctgtcacagttgctgattacggtctgttaatgcaatttaaatcgggttatgtaggctgttatttttgtattctcttaatagtaagtattgtattttgtggttttgctgattgtgtcgctcctttgtccttttaaaagtaaatcaattgcacagatgtaaatgaaaacttttaaccaaactatggagaaaaaaacaaatgaaggtctctcgtcgtcacctattttgtccggcctacgaatgtgaaaattcttgcacccctcccttccatagatgactacgtatttcttgaattgaccctcaactacatttagaaatcctagtaaagacgaactaaagggccattaaataatttggtagcgaaaatcacttccactgtctagctctctctttgtacatttgggttgtagtttcttaagagagtgagccagaaaacttctaaaactggggtcgttttcatcggattcctaaaccacaatagctaatttgcagtataagttacaataggaattgaagtgagaaagtgagggtgttaactttgaatataaatcaattgtgtctaataactcattcgattctatttcatggtgcatatcataaatctgagaaatatatggtattcttatttgtaaaatacacagcttatacttgttctgaatgttaataaaattctaacattcatacaatctatcattatatgcagatgcaatttataatttaaaggcttttaactcttcatgaagctgttaatgtatcgtaagtataatttaactcgttcatccgttctttctgcaggttcacaggctcttgttagccttgttttggggaaa

SEQ ID NO: 101355 - DNA, 607 bp, Mimulus guttatus
  Intron number 1 from transcript mgv1a007420m (locus mgv1a0 07420m.g) derived from phytozome v7.0 (chr-ID scaffold_59; pos 115164 to 115770 reverse strand)
aaaaagctgcttctctcgcttctcgattgtgccaggtcactttctctctcctccactcttctctctgctgtattatgtaaatcagctgttcttccctttttttctgtgtagtattttgactttttcccccttatttaaatggatcgctggtgaatttcaccgaaacgcccaaatggggataacatgttcgttgatcagttgaattaataacatgatgtaaaatgatagcgtgccctagattcaaattacaatcgataaactacccatggactagattctacgtaagaaaattgggggcattgcatatttgttgcatatatatatttgaagagcagcaaatagggtaaaattggcatttgatttgaatttttttgaaaatcaagggaggaaaattgggtgattacatcctacaacgctgcttttgaaaataattagtcagtcagacctctatataaatggattgaaatcgaattcagttcagactcgtgttagaattttgaagaagcttgcagttgaatgagcctgctaataattgtatgtaatatcataatgtgtttttttttctgcctctcacaacagaaggtgcaaaaggctttgttgcaatctg

SEQ ID NO: 101356 - DNA, 550 bp, Mimulus guttatus
  Intron number 1 from transcript mgv1a004011m (locus mgv1a0 04011m.g) derived from phytozome v7.0 (chr-ID scaffold_311 ; pos 59132 to 59681 reverse strand)
attcaccggcgtctacatcttcgcgggtcagttatcaattttgattttttgttttgagtataagtctaatttcaaataagtcgaattcaattttgagctgttggcttttgggttgaagctgtagattatccttaagaaactgttctgaagctcaatttaaacttatcaagcttaatcctgcctatagagaaatataattgcggcagttgatcaaagagaactgtttatctgaattcatttaaatgttatcattagattatggtttgtaattctcttttgtggttaaaaaaaccgaaaaaataattgaaactgattcgatgcaatgatgtagatttgttagtatcaccatttagtggtgttattaagaagagtatatttttgttattattacacgaatacacgcatttcgactagctaaattacgatgctacacatacaagctggattgtctctaacgagttcggaagtttaaggtaaatgatgtctctagtgactaaatgttctgaatatttcagctaccgacagttccaccgattggacctgtgtatag

SEQ ID NO: 101357 - DNA, 814 bp, Mimulus guttatus
  Intron number 1 from transcript mgv1a007440m (locus mgv1a0 07440m.g) derived from phytozome v7.0 (chr-ID scaffold_27; pos 1527934 to 1528747)
gtctgagaagaacccatttggaatttgcatcaaaggtacaatcttgatttcatttttgtccgaagaaattcctgagatctgtttgtgttgtagccccttttaattttcctcttaatttttgtaatggtgtaatctcattgatgtgtgtgtgtgtgtgctgaaatgtttttaattataggtcaatgggcaaaaggctataatatccactttgaatgctcttaaacttttcttgaaaaaataatcatgtggctgatttttttttgcttctctgtatataatatatataatgggatctattgcttataggctgtggcggagccatcatagtgtcacgggggtcattgccccccaccgtttctagaaaatctactatgatatgttaggttttcggttttcgggttttcgggttcatatgttatatggcttttcatctatgatatatattgttctcattctcaatacaaattttcactttccttacaaagattcaatctttaccccttgttttggaaatttagctcttccgcttcggtttatatttcgccatgatattctttttcttcagtttcattcgattaacggaagaaactcgattattactataatgtttttgcgaagagttagcacgaatggatattttgctccatactcgacagtttgtaaatattcgcattaaaatgacacttttttacttatttgatcatgcaatgttgtttgttttagttaccatttacgttacattcgatcatgattcgtgcatataagccaagtgtcgttttttaattggataaattccttttgtagcctctatatc

SEQ ID NO: 101358 - DNA, 488 bp, Mimulus guttatus
  Intron number 1 from transcript mgv1a006855m (locus mgv1a0 06855m.g) derived from phytozome v7.0 (chr-ID scaffold_449 ; pos 20409 to 20896 reverse strand)
ctagccttgggaaacgagtgctcgataatgtaaggattttttgttctttgaaaattttatcgaccgctaatcgtttcttgtttcaaataggaaggttttcaattagtgtgtgtgtgtgtgtgtgtgtgtgtgtgtgtgtgtgtgtgtgtgtgtgtgtgtgagactaagggtggaaactggaagaaaaattttgaactccgccaattttgatctgaattttttcgaacaaaatttttgatctccgccagttttgatccgggttttttttctttggaaatttggatcaatttttcattatggatttcaaaaagttcaatttcagaatttttttttatcggaattggaatttatccgagattccgattttcggtccgatctcaaaatagttccgaaaatttccatttttttgtccaaaataattagtttttcacaattattttcataagtgctgatccgatccgtctgattgccacccctatctgtgacag

SEQ ID NO: 101359 - DNA, 590 bp, Mimulus guttatus
  Intron number 1 from transcript mgv1a010316m (locus mgv1a0 10316m.g) derived from phytozome v7.0 (chr-ID scaffold_22; pos 71958 to 72547)
caatcatttggtcagacggagatcaattgggataagtaagttctattaatttgattagtatttgttgcattttttcatctccggttcaatggataaattgggataaatttgaatttgaatttgaatttgggatgaatttgaatttgggttcgtgagattagttttctcaatgatttaatttatgaatggaagtgcgtcttaagttaattacatttttgtgttttgcaattaatttatctttttaagtttgcctatgctgtatgtgaattttaaaaatcaggtagatatagccatagttgtttcaggtgaattttttacattttaggagaataaaaataaataaataaaatccttatataatttctgggcagatggaaattggatcagtagaataattttccgtctacgtttcgattcttctaatttctattcaaatacccttgagttgtgtattgcttaatcgactgtcgaattggaaattttgcgttcattgagttgcctgtataactgtttctccgtcagttggatgcaataagtagttattttcactcgcaggctcaacaaaaccaagttctacgttgttggagctg

SEQ ID NO: 101360 - DNA, 180 bp, Mimulus guttatus
  Intron number 3 from transcript mgv1a014019m (locus mgv1a0 14019m.g) derived from phytozome v7.0 (chr-ID scaffold_29; pos 491001 to 491180)
ttcggaacactctggaggcggccttgtgcttgcaggtcttctgtttgtgttcattttcagcattttttttcttcagttatatatgattagttttatttttaggtgttttgattgtaatatttggttgtctgcaatgtgtttgtagaatttcccctgtcaggaagttgaaaggcacaataa

SEQ ID NO: 101361 - DNA, 790 bp, Mimulus guttatus
  Intron number 4 from transcript mgv1a014019m (locus mgv1a0 14019m.g) derived from phytozome v7.0 (chr-ID scaffold_29; pos 491164 to 491953)
gttgaaaggcacaataaaccggaagttgaactcaagtacgtacttactcgtttgcattactttgttcgttgatttgatgtttcctgttctgtaatgcgagaggaagtttcgtttttagaaatcggggcaccaagacgaggaatagtttgttgaaatattggaatgcaatatgtgaattgtggtcagctaagtaaacgttgtcttggagtaagttaatgaaatacgaacaactgtgctgccccccgtctcattcttttcacatatataattatttgcggatggtgattcaatgaatggccacctatatataatttgtaaaattattttgtgtaacgaaatataatgttgctttgttgctatagaatggattctgaagcgagcatgggatgtcatttgattgagaacgcactgtcttatgttgtacgtgcacgattgacaaatctctaatacacaaattgaataatattaataagatttgcaatcgtaccaatttagatgtttgaatgaaaattacataagttgcttctgtttactgattagagctgtaactagaagttcggtcacaactttctgctacagatgtatgaatattctgttactgccaagaatacattcttgattaatcgcgtgtctttctaatatcttatgacttatgccgcacaatctgggtttttatcagttgatggaataacattcaaatcttagcactatctaacgatacaatcggagttcattattttctttctgtctttcaggaccagtccggagcttcttctgaatcctgtaagaa

SEQ ID NO: 101362 - DNA, 800 bp, Mimulus guttatus
  Intron number 1 from transcript mgv1a016706m (locus mgv1a0 16712m.g) derived from phytozome v7.0 (chr-ID scaffold_8; pos 1403508 to 1404307)
tcctccaccacgttctccttgctctaaccgttcaggtacgccgcacccatctccgccggtttgtttcgatttcctgttcgtcaaactgttcaattttatttttattttaattttactttttaagctttgcctctttgctgattttcgtaatcgatttagggttggatcttgttacctttaaccttgtttgattagcctcggttacttgagattgttagatctggttaaaatcttaagtttaggggaagggcgtagggtttggttaaaagattattattacaagtctccgtcagtttcttagtattgtgattgttttgatcttgttctgtgatggattttacttgtttttactagccctgattcaatcaatacaaaatttcgggatcggatcaggcttttgagtagtcaaactgtcgcattggagatcgaattgtagtcaaactgttggaagaatattagtattcgttatattcctgtcatcgtaaatcgtagttgatttgatcggagagtgtttttcagtttgttgtttcctttcagtattttcagtgcagatctaatgattagtcggccggcttagggaatatagtccgaactagacattgttagtttgatttgtattctcgatattcatttcttgaacgatttaatgattactaaaatggctacaaacaattggttatcgattatcgataaccgaagttacctatggaggagttgttgtaaaatagagcaaagtttcaatatttttcgttttcttactttcttttatcggtgcagcaggtgcttcaacgtctctcaaa

SEQ ID NO: 101363 - DNA, 552 bp, Mimulus guttatus
  Intron number 1 from transcript mgv1a014228m (locus mgv1a0 14228m.g) derived from phytozome v7.0 (chr-ID scaffold_27; pos 850746 to 851297 reverse strand)
agtgaggtattgattttttatcttcttcttcttcttcttcttcttcttcttcttcttcttcttcttctcgattaacgacttatttattcggatttattcaagtacaatcgaagaaatgctgattttttttagtgtagatgtactacgtgatgaagctaattgaccgtttgatgctacattttttcccccaatttttcaattggctttacgttttatcggaatctgactatttttggggatattgattggttgatcgactttgtttttgcttttctttgaaatacaaacgaagaaattaatactgtgtttgagtgtggatttttctttgtgtgtgttttttttttcaaatttatttttcagtttttcgatcagctccccagtttaatccgaatccaagtgttttttgaaatacaaacactgtgttttttttgtgtgttttttttcttcaaattttcaatctggtatacgtttatcgattaatcgactctgtattttcggtgatggatggacgatacaggtttacgcgttactcggtacggttttcttaacctt

SEQ ID NO: 101364 - DNA, 559 bp, Mimulus guttatus
  Intron number 1 from transcript mgv1a000959m (locus mgv1a0 00959m.g) derived from phytozome v7.0 (chr-ID scaffold_11; pos 2019121 to 2019679 reverse strand)
cacttatagcctatattgctaaagtagaagctgaggtatcgtttctcccaactactatgtatttttttctactatgtttttattggtattttttcagccaattacagtgggtttgatatgctaatttttatttttttctcttgcttaccttctagtttaggcattatttcttatttggctgtgatgctggttgatatgtatttgaggggattgtgattagggttttctaagattatcactcattcgtattcttcctcaattttgtcttgaattatttgaggaaggggtgttcgtgttaacgtttcttgctaatttaataaattgatgttcggtttgaaaatactgacggggcgggatttatttcattaattcctttctgaattggggtttgtatttagtggtgatattttccttaattactagtgtttgttaaggagtcctcttttacaggtcgatgagttgaatgctgtactgagttttctatatctgtgttgaatctgtttgctgttgcctataattcttggttttgatgtgatcggtgtctacttctttcagttat

SEQ ID NO: 101365 - DNA, 582 bp, Mimulus guttatus
  Intron number 1 from transcript mgv11b022356m (locus mgv11 b022356m.g) derived from phytozome v7.0 (chr-ID scaffold_4 15; pos 59117 to 59698)
agtattgtaacgctaataggtaattaacaccgcctaatcttcttttcttttccttaattatttgaattatgtttttgtttatatacatagagttgaaaatgttggttatctctaaaaaaaaaaaaaagaaattgttggttggtgggaatttcaaaaccctagttctcacattcctaaaatagaggaattaataaggggacgggtaataaaattactatttcggtacttgaaaattaaaagtagtcctatggtggtggaggactcaaatattccttaaaaaattgctcttgcaatttcatcgtgatttaaagaaaaaaaggataaagacttctcaacatattacaaacataaagatataataatttattaaaagccgaaccgatatgcaccgttttgacttaaaactgcatatacggtaattttttttataaaaaaaacccaaaatatcgatttgtgtatggggaataaaaaattaccgaacaaaaccaatttataaaaaaatacgtctctttgatatatagtataaatatttaccgtcttcccctagctgctcttttatccttcgaacgcctccacgtaacg

SEQ ID NO: 101366 - DNA, 805 bp, Mimulus guttatus
  Intron number 1 from transcript mgv1a001692m (locus mgv1a0 01692m.g) derived from phytozome v7.0 (chr-ID scaffold_130 ; pos 268385 to 269189 reverse strand)
accaccagatcgcgacatctgttaccaaattcgaggttcgattttgggttttctcgaacacaaatttttaagggtttttttttttagtgggtttctttctttctgcaaatttttttttgggggttcttaattgatgctggatttaggggcgtttgacttttggaagtggtgcgggaagagggttttgagtaattttgtttgaacgacgccgtttgacattttcttctctgcattgattcaggattttggtttgtaataaaaaaattcaagctatttgcagatgggtttttaatctgggtcgggtttttgaagcttgatcttgagttgaaattgtgttaattgacaatggtaatagatcaattttgatgaattgtaattatgaggttttgtgcatttctgctaaacgattccacaaatttaggtttctgaactgttgtattgagttcttcttctttagttgcattaacccgatttttactcgatttttactcgatttttttttagttctttctagatttgccaaattttggttttgggcttctctattttctagtaaactaaggaaatctatgaaattcgactgttattttcgtcacagagtgtagatcgattgacccgagaaatttcttggctcattgttttcgattttgtgtagatcgattgacccgagaaattcatttgctaaaggattgcaaatttaggagtacatcgttttttttgtttgtcttacattgttgtctaacgatgatgtttttcttctcttcatgcaggactcgcccgtatttaattttctcaacaatctttc

SEQ ID NO: 101367 - DNA, 967 bp, Mimulus guttatus
  Intron number 1 from transcript mgv1a015159m (locus mgv1a0 15159m.g) derived from phytozome v7.0 (chr-ID scaffold_8; pos 327239 to 328205 reverse strand)
gaggcagtaaaaatccatagtttcttccacaaaatgtatgaatatcttcttccctgaaccgattcagtttccgatcatacgatctccagttttttagccatgtgtaaacttcagtttcggcctcgatttcccgtttttaaagttgctgtaatcttatatttgtttttcagttttattctagttgtttgatttttatgatcagttgtttgcttatgttaacagttcagattgtatcgattggagatgtatgtaactgggcatattttgaaaaacttgattgttggttaaattagggctttttttcttcatttatttttagttttgcacgtttcttcagtaaaaaaaaattggcgcctttaattttctgctgccgagtgtgattttggaatctcaaagggtttagggattcgtgaaatttaagcgttaagtccttttattggtttttatatgcccatttttgtcaggaagtttgacctgtgctgtggtaatttatgctaatgcaatccactctgatgctcgtatgatgttttcgttgttctaatccaatttatggtgatgctgagatggtgttttcgtagctctaatccgatttatgctgatgctgaaaatggtgtttttgtagttctaatccaatttggtgatgttttcgttgttctaatccgatttatgctgatgctgagatatgatgttttcgtagctctgatctgatttatgctgatgctgaaatggtgttttcgtagttctaatccaatttgtgatgatttcgttgctctaatccaatttatgctgatgctgagatatgatgttttcgtagctctaatccgatttatgctgatgctgatatgatgttttcgtagttctaatccaatttatgatgattctgatatgattttgttatcgtagttctaatccaatatatgctgatgctggcaatttatttttggtgctaggacaagagtgagttggg

SEQ ID NO: 101368 - DNA, 1032 bp, Mimulus guttatus
  Intron number 3 from transcript mgv1a012187m (locus mgv1a0 12187m.g) derived from phytozome v7.0 (chr-ID scaffold_85; pos 268889 to 269920)
tggctgcttgttataacagtgaacgtggaaaagaggttagtttttctgactaattgtttatgttcgttccgtagcttttactgtgtgacggatatgttctttttgcaaatgttaagtttcttcgttttattttatatggtatgaagtacataataccgattaataattcaattgtacgaaagcagttaacgccgagcattttgatttctaaaggacttttttcagatcttgaattagttttttgaagtaaactctcatggatattccgaattccatctgcagctctacatatttaggttatactgggaactatttcactatgctcttatccaagtctgctatttgcttcgttttccgatagttctaaactactgcatgcatctaatttgataaggtcaaaatgaattcggaagtagaagaaaattggctttttaaacaaaattgtttactccatttcttcttttgtggttgagaacttcaatttataactacttatgaagtcacttttgaaagtttaaagaaaataattcgatattccaagaagctgccacgacagaaaaagtcggtagaaaaaagctgctaggctgattccggttaagcctatctttttgaggactccatatctaatacaatcctatgtgtgttttggtcgcgaggattgttaattaatgacttgaaagacaatatatattaactaatgacaatgttgcaacttatctttttactatattctaatttatttagtaggggccagttatcggcagacagctattgacaatgaatttgttcattgaagaattttaaaattaagaaagttaaacttgaacgaaagaactctatttcatgtttttttttctggtctgaatatgcattgacatgtcgacatgcgaggaatcctattgttcctacatgcttgctatgcacacatgtattttctttttcttgatttggcaatttgtaaagtaacgtaatgtgattaattaaaacggtaatgcagcttatactaggatacgccgctgacacgcaagcact

SEQ ID NO: 101369 - DNA, 612 bp, Mimulus guttatus
  Intron number 1 from transcript mgv1a009934m (locus mgv1a0 09934m.g) derived from phytozome v7.0 (chr-ID scaffold_8; pos 1640263 to 1640874 reverse strand)
gattctcttccagatcctcgaatccgccgatcgaggtaattaattttcttttttttttttttttctgtgtgtgtttctggataatgttttctacacgatcaaaggtacaaccacgtactgcagcattaggtacaacattatccaacatctgattattgttcatcaagattgaaatttgatgaataattaattgctctataattagtaattttagagtagaaatgttaaaaaacaaaaatcaagttttttctaattttatttttcatcgcctagatcttgaaaagtccgacttgtttctgtttcgtaagtcaaatttgcatcaatcaagaaacgggggccgcaggggtaacttattaaatagtcggtttcatagttacgaatatgattaacacaaatcgagaaacagttcgaggaaaaagttttgttctttatatcgaacatatcgagtgtgagtgtgatactgcattgcgaagaaagcataattttgaacatgttaattagcctatcgattccaatgtttattatgccaagaaaagactgagaagaaaacatatgtacaaacttgtaataaaaacaggattgtgcaaaactgcgaacgaagaacacgcaaga

SEQ ID NO: 101370 - DNA, 835 bp, Mimulus guttatus
  Intron number 1 from transcript mgv1a012566m (locus mgv1a0 11776m.g) derived from phytozome v7.0 (chr-ID scaffold_126 ; pos 558506 to 559340 reverse strand)
gctacttgctttgagatttttggttagttttcttgtttcggttgttcatatatttatatatatacataatttattatttttcgtaatttgacactgttttcttatcatctgagtaattggaatcactacccaatcctttatttaaaagaaattggaatcttcgtcccatatcttaatttccatgaaatgtgatttaattacacaatttaatgaattcaacaagagaaatcactacaataagagaaatatgaaattgcaatttgatttggggtggcagctggattttagtgaagtgggctgtggcaggggaatgtgggttggctgtggttttgaaggggataaccactgatctgtgcataaccacctttttttttaattttttatttaatttttttttatgtttctagtgatataaatgggaaaaatgctgaaagggttgaagttgactgctggcacctcatacttttattcagctctgaaatggaactatgaaaaaatttaggcaaactgttttccgttctagctgtatagtcaaaatcagacccgtctgttgattcataaaatgtgaactcgttttcttgtagtattaagttctgtatctggatctttatttcaatgattgtgaatgaaattaaagagctagctgtgagaatcgttgtttttggtacatgatatatacttattttacctgaatgtaaaacatgctgagctgatggttgagtttttagtatgttaatatatttctcttgttagcaatttagaagccatttttcgcttgttcatttatccaactgttttcttttgttacagcggaggttgtggcaggatcgacagc

SEQ ID NO: 101371 - DNA, 668 bp, Mimulus guttatus
  Intron number 1 from transcript mgv1a005239m (locus mgv1a0 05239m.g) derived from phytozome v7.0 (chr-ID scaffold_121 ; pos 277912 to 278579 reverse strand)
gccacctcatcacccgctccaatctcaccggtctgtctctaacttccatcatttttgttcttactctgtttattggggatttccaattttgcctaacaagtgtttgatcaattgcctgtgctgatagtatagcatgaaactagctttaaattaaagaaaaaaaataattgtaaatcttggacgatatttacatgtttagctaggaaaacattaagaacttttgactcccatcttatgattaggtcaatggattaatcttatgtccacaattttatctgtttagatctgatttttttttctttttcttcacgactgtttgctcatttccctttcattttggattattagctttgtggaaaatggaatatttggatacaaagttgaatattcagtaatatgtggcactggtgtgtaagtattttgagaatttccaatattttatattttttctttaaataaatcaagaatcgaactgcaaagcatattttacataatagtaataactcaatattacattttttgaatttgtaataatattttgcatactcttttaatcattttcgtattggttaactgtataattatatggacttgcaaatgctagaaaacttttacgattgttctgttttcgcgtttgtgtgatttcagatattctttacaagtgtcac

SEQ ID NO: 101372 - DNA, 645 bp, Mimulus guttatus
  Intron number 2 from transcript mgv1a025245m (locus mgv1a0 25245m.g) derived from phytozome v7.0 (chr-ID scaffold_12; pos 1764301 to 1764945 reverse strand)
gagtaagacttcctatttttattaatttatctattattgcaggcattttattttatgattcaatcatttcctttctttgttccagattaggattttatacaagctgtattcttatactccatctcttaccctgtttggttaaaaaaggatgtactagggtgatttgtttattcatttttctagctagtaatgaagtttgaatttcaattgttgcttgagttatacatataccaactaaacatatacaacttgttttgtaaccttgaattgttaaacctgccgaactttaaaactctgcaacgtcacctctttttttctagcatacattatcgtttgactagctaattcatgtaaactgagttctatattttacatcaattttgttggacttgatctgtcattcttttcatcttatgaccgaggttcttatctttacgtttcatgctctttaattacaccatgctaatgtatctcagcaattatattgcactatgcatttttgttgatcatgaaatattgtttcatgccatcattatttgctttgtttgctggaatatgatgtacatttctgactggctttttgttgaagactcacattcctatgtttcaggttagactggaggaagaacaaaccactaattttca

SEQ ID NO: 101373 - DNA, 752 bp, Mimulus guttatus
  Intron number 1 from transcript mgv1a025245m (locus mgv1a0 25245m.g) derived from phytozome v7.0 (chr-ID scaffold_12; pos 1765012 to 1765763 reverse strand)
taacaacttccgtagattcaattaataggttagtccattcttgttttaagacggtgtctgttgtgatttttttttattcttttcaatgctgttgaggcataagattgctgtatttatgcctgaccgagttttaatcggtagagatcgttattcatctgaaccatagcgaccatttgactataataaattagaaaatcctggttttctcggttgcgttttgtggcagtcagtaattaaggcatgggctgttacttgaagtctttaaagctatttgctggatgacaattcagttgtgcctcatttggttaagattctgaattatattacagaggtatctgaattatacacgttatgtcatgatcaaaagaaaacatagttgatgtaatgaagtcaatctggaaacagtgatagatttattgtagctgattcgctgaaacccggacgcttgttaaaattttcacttccctaattcttaggagctactaaagccttccaaatataaacttttttttttttttttaaatttaatcaatatacttgacattgatttggtttgtatgcaagttttatctaaatggtgtagcttttctgatttgtctcattagggttatccctctcatgatattgtgcattttactttcgaacatgtgcgttttgattatggaattgcaacatgaagtagcttgatattttgacttatcatattcattcttgtagcattctttcagcagaatttattcacacatctttgc

SEQ ID NO: 101374 - DNA, 806 bp, Mimulus guttatus
  Intron number 1 from transcript mgv1a017623m (locus mgv1a0 17623m.g) derived from phytozome v7.0 (chr-ID scaffold_168 ; pos 271692 to 272497)
tattgtcgctacttcttgcctcatcgccggaattggtttgtccatctacttgaacgaatatgttttttttttttttatttgtgcgcttgtctcgattacattcatcactgattctcgaatttaatttataaaatttgaattggggggtttcgatatctggaagtggctaaaaaatatttcgaatagaaaatgaaatagtttgattcaattcagaacgtttgttagaagccctaaaatccccattttggtgaatgaaatagggggggtaattgactacttttgctgaccaatcaaatatcagttttgtagaaatcgattaaaattgtcacctacaatgctggcctgcgatgtggtgtagctaattctgattatattgctacaccgcttttgaaggatgggatcgtagcttaatttaggaacaacctgggaagcagttcttcaaactaattattccagtagctgtaacttttttgattggttggtgattgctctgttgtaactttagatttcccttcccgactttccatctaaagaccacattttgatcatattttgtaattcatttcactggtattttcagcttttttagcagaaatttttatcttgagcaagtacagtatgatgtatctatctatataaatgctttgcaagttgatggtgttgtgttctgtgcgaatgtgtgccaaacatgcgttcagatagttgcaatatataagtgcatttgttatgtgatgatctaagacgttccttctaatcatatgacatttacaggattgttccttccagcagtggtaaggccgatacta

SEQ ID NO: 101375 - DNA, 666 bp, Mimulus guttatus
  Intron number 2 from transcript mgv1a017623m (locus mgv1a0 17623m.g) derived from phytozome v7.0 (chr-ID scaffold_168 ; pos 272511 to 273176)
caacaaagcaagtacctccgactgctttaagcgatgtaagtgtttggttttgttaggtaccatgttatcctagtttggtcttggcatcctttcgacttaatcttgctcttgtgatttcatatatacttccttattggatattatgtttaccttgctggtaatgattcgttttctatttgagtcctggtaaatggtttaccctctttatacacagagaagggcttgtcttgttctgctattgagttgaatacttcttgtcctcgtttgtttggtaagattagccatgattgaggcggtctttgaaccctcgagatgtaatctctgtctattaagcaaagaagattaaggtgattggttggtgtggaggttgtggtcctagttttcgggtggttatggagaaggggatgtgatgagtttatagaggtaccaagttgtcttgcacctaaaatgttggttttgtgatgagttaaagacaaaaaatgtttcgaaagtcaatagattaattgctaggatatcaagtatggtgatgctgcctgcacatgggactctagcttattctagtgtcggcagaaatcttctcgtaaatctctttataccattgaattaatgcactctcttcttgtatttgcaggtggttgctggtgtgaccgggaagaaacacagttg

SEQ ID NO: 101376 - DNA, 728 bp, Mimulus guttatus
  Intron number 1 from transcript mgv1a014246m (locus mgv1a0 14246m.g) derived from phytozome v7.0 (chr-ID scaffold_124 ; pos 158783 to 159510)
aggaagagcgtcagtatgaataatctctctgaatacgagcctgttgtcaactgtagcaatccgaacgacgtcaacaacactactgaagcgccgaaggttgcggcggaggatggcggcaccgccgcctacgcctccgccgacgatgcctacccccgggctgccccatgggggcccgacataaacagggggcacctacccgcctccccctttttgtatatatatatatatatatatatatatatatatatatatatatatatatatatatatatatatatatatatatatatatatatatacttttcaatttactgctgttatttttgaatttgagatttctgtaaatgatttttgaccgttttgatcatgattttttttttcaattttttcgttaattgatgaaatttgttttttttttttttttttttttttgttttttttttttttttttatgatttacaaatctattgccagtttttggttgaataaaacctaacattaacaatttttgggggtgaaaatccaatttcttaaggattcatctgatataaactatgttgactttcatatacaaaaaatctcaaaaatcctgattaaaaatctgaatttgttggttttgggttaaaataaagaagaaggcattaatcaattcattttcatgatttctaggtttttatgaaatcaatttgatccaatttctttgattttgatttgtttgcaggagttcc

SEQ ID NO: 101377 - DNA, 1027 bp, Mimulus guttatus
  Intron number 1 from transcript mgv1a002724m (locus mgv1a0 02724m.g) derived from phytozome v7.0 (chr-ID scaffold_3; pos 2972693 to 2973719)
atattctgtttgacaggtatgcgttgattgcttttggaagtttttctctgttgcattttctctttactttttgtcgttgcatatgcgctctgtatgtgtgaatattagcctgcagatgtgcatcttaattttttatatgtttaattaaggtaatatctggtggaaaaagttgagaatgattgaatacatgagaaatttgcattgtttatatctgtcctattaattggtgtaataatttgtacgtttttgtttgaatggttgcatgcttcatactccttgctctagagagagaaaaacgtataatagagggctaactaattggagttgggtacgatgtttgatcatgctgtcactttgaattccaaactgcaattgctgtccaaaacatacatcaagtagttatatgacgtagagaatttacccgaaaatgttgccggaaatgcaaaatagaaaaacaatgacaactgatcacaaaaaaagaaacaaaagaaactcattcttggagaacatggacggttagtatcaaagactccgttttttcagatacttggagatcggtttaggtattagttttagggtatggaccgatatgtgttaatagctgtaacgagctgataaacgggaagcgttagaaattacatagaaggcactgaatattgttagcatgcaagctttgaaataacacaatgatttactcgtgttttggggtgtggaaaatgacgagtgaaggtggaatatacaaaatattgttcgttgatttttagcaatcttcaaaatatgcaagtacattgtcacgtaaacgagtacggatttttttttttttgttctggttgcatatgaagaatgaccgtatccactcttctaagacaaatttagaactagtctgtactatgtgagtctctatgtaaacatgtacatattcctaacttcattcattatctcagttcgctttttttctcctaattttgttatcattttcttgatttctgaaaaatgcagcttgcagaggcgggttaaccctcaagag

SEQ ID NO: 101378 - DNA, 821 bp, Mimulus guttatus
  Intron number 1 from transcript mgv1a018938m (locus mgv1a0 18938m.g) derived from phytozome v7.0 (chr-ID scaffold_16; pos 2078212 to 2079032 reverse strand)
gatattactgatattaaggtaatttttcccttttcttcatattcagtaccctaggccatgtggtttttggggcttatgcacaaattcactagtttctaacccttgcaattgcaccgaagggtttacctcatagtaatcaaattaattgtaaaaattgtcagttgattgtaattaggaaatcgccgatatgtataataaaaagtgggctggtgtatttgttcaattatggaaactgagattatggttttatgatgtgggaatttaattttgggtcagaaaatatggttattaggatattttaatccatgttgcaattttggtgaaatgagaggatatcagtgcagttttttggatttagttcatctccaaagtgcctgtttcaaatgattaatcaaatcatttttagtcaattagcctgtaatttcccgcactttactcttttggcatggttatgtcaattacgaaaatgaagaacgggaatggattctgaagaaattgccaccttgttcatcaaccactaaattagtgcgcctctgttctgtgattgcatttaccaacaatgcgaatgtgatggatagttgcactactatatgtagattcgcatgcactcagttaagcatttgttttattggctattctgtgctaacctggtagttccgctatcacttgttttatcaatttcatgacttatttgctagtcgttaacaattactcttagcatcatgaacttatttcttatcctattttctggaactcttttctctatctatttcctttttctaatgatttgtaattgattcagtttccaagtgggatctttg

SEQ ID NO: 101379 - DNA, 598 bp, Mimulus guttatus
  Intron number 2 from transcript mgv1a021934m (locus mgv1a0 21934m.g) derived from phytozome v7.0 (chr-ID scaffold_44; pos 1529903 to 1530500)
cgcagaaacttctgcaggcagattgctttgttgaggtattgtttatgaattatgattagcttttaaatattgtactaatatcgttcgtttttataatcttgtccgaatagttaaaatcatttagcacagttatttctattcgcagtcgaatttcaccgttagattaaatcaagaatttggtttgttttacgatcaagaaagcgacttttctaacatctgcgaatcgggtttttttgctttagttaaattatgtagaatttagaacagcctcgatgtcttttcgctaattaaatgtgtgtttagtgcactatttattggttttggagctacttatggggtaagagatggacaaaaacactttgttgcaagatgggacatagaaaatttgtccggttttattacgaacagacaccacaccaaaacccaacatgttctatggcctgtctccttatcgacatgtcaaacaaatcactcaaacgttaacgtttttgtcgtgcaatttacagattctttcgatgtaaaaaaaataaaaaatcttcccactattggctgttttcatgtttcttgaaaatgattgttaattatgcaggttgatcag

SEQ ID NO: 101380 - DNA, 499 bp, Mimulus guttatus
  Intron number 1 from transcript mgv11b009143m (locus mgv11 b009143m.g) derived from phytozome v7.0 (chr-ID scaffold_8 ; pos 1100953 to 1101451)
agaagtcgaaagttgacgatttgtcatcaaacgaagtgagtttaaagcaattgttatccgattattgtgtttgcctaatgatatgtttgtttcaacttttaagcatatatttatatatagcttgaatgatgtgattgtttgattgacattcgacgaacttgtttgatttacattcgatgtgatctttgcgtttattggattacatgtgcataaataagtcgagttaaaacatttgcatcatgtggactacgatatcttgtaggaatgacgggatatcgttgtaattaaaccgtttgagaatttgttttcttcgtatatcgtgttttttagtttaaccctattatgatggtaccttattcagctttacgctgctaaattctcgagactggtgttatcttttcacgtttctgatcttgtgcaatatgcccgtgcttataatgttattacattgtggatctttatccttggcttattatattctccgtgcgtgtatcatcag

SEQ ID NO: 101381 - DNA, 937 bp, Mimulus guttatus
  Intron number 1 from transcript mgv1a010758m (locus mgv1a0 10758m.g) derived from phytozome v7.0 (chr-ID scaffold_92; pos 782414 to 783350)
gtcgacgccgcttgacgcagcatcggttttgatcttttggtatgttatgaattatgtgtgagggagtttatagtatatatctgcctttccgattcgtttcatgatataattgttttgctgaagttatttattgaatttgatattgcttaaggtaattgcagaatgtgtttattgtatttgtgttgtctgtgttcaacttgattggccaatcatcatgaatttggtaatatatgtttgtacggagcatgtgaactatgaaaagtcgaaacttttctaccgctaatttgtcgacagggtaaatttgtttctgctgatgtatgagtcgacgtaataatgtactaaaatttagtttctttttatgcttattcagtcggcgtattgttattattagcggtttgatcctttccgtcactttttttttttttttctttcaaattgacgcacttaaacaagcattcattgtttcgtgacgtctaaatttccagtttcttgttgtagtcagaacaccatcagatcgaaataggataatggattgttctctacaacatggtacacagtaagatcttcatgggatcgaatttattttttgggatttcagtctaggtttttatttaagtaattaagtaatcgagtttgatattttgttctttatcgagatttgctacttgtgttcccatttggaatttgattgaagttataaagtgcgtaaagcaagagttttttaaaatttgattgtcaaatgctcggctcaagtttcgcagtgttgtacatactcgatcattagtcgctgttggttctagacttctacatatagttcttacaattgattgctattttgaagcacaaagtatttcattttgactgtcctttatgcattgaactggctatttatcaagctgatcgtatttttcgtttttcttaactgccttacaggttg

SEQ ID NO: 101382 - DNA, 937 bp, Mimulus guttatus
  Intron number 2 from transcript mgv1a010313m (locus mgv1a0 10313m.g) derived from phytozome v7.0 (chr-ID scaffold_37; pos 863144 to 864080 reverse strand)
gttctattctcaggtttgcagctttctgtaacaactgattctttgccctaaattttgtttgtgcctaaagtagttagatttttcaacattttttttactttgctagctcaattgttttccagaaacctctgcgttaagtaatcgtcaatgaaaccacattaatcccctagatagtttattatttatcaattggccttggcattaacttatcaacaaggatggtacatgggcttcaagtttgtggaggggtagagaaactcggataacgaacacagcatactatatcaattataagaaacgggttattttgagaaacgactacgcacggccttttcttttatttttttcggtaaggtgggagctgctcaagctgcctattgtttaggtcgatcccgcttttgaaggttgctatgtttgctattctacaattttgagaagggattacggtgttgcattggtaaacgtatgtaaacggttatatttcagcaacatagtaaagtaggtagatcctctgaaaggtaacgaagaaaaatagaatactcaccgtaagtgagctagaaatgtttttggtcttttatgttgagggaaagtgaaatgttgcagatagctttaaattcagattttagtcaacattttaaatatttacatttgttaatgctctgaactagttatgtgaagaatattcctattgtgtttgatttttaaccaattcaaggccaaataagatttcataagttggtaatatactcaattcacgcacgttgtcgaatgagaggataatggatggatcactatcaaagcatctgaacgttattttttttactactctgtgccaccgagacaatctttcttgtatttgccagttcactttctttgtttccatcttgtaatgataatatcctatttgctgacacatttgatttgaaacttcataggt

SEQ ID NO: 101383 - DNA, 446 bp, Mimulus guttatus
  Intron number 1 from transcript mgv1a004551m (locus mgv1a0 04551m.g) derived from phytozome v7.0 (chr-ID scaffold_13; pos 1697284 to 1697729 reverse strand)
cgcattgctctcttcgttgaaccttctccgtttgcgtaagtctgaaagtaattcttttttgaccgtttattacttttgccgcacgagtttgtcgaatcttgctgtaactctgagtttccaaagttttgacagacttgaatttttataattatgtattttattgtctttttttgaaggtgggtaattttttttcttcctcctttttggatggagtaatttgatgcaatgtacatggttagcgtgatttgattcggctaattaatatcgaattagttcatagatggttaagttagttatttgtgaacattttccgtattcatgatcccgaaagattgatttatttactattttaattcaagcacctcgtgtcgttgcgtcgtcgtatttccgaatccgcaaaatgattttggcaactatacgttttggaattatgtatatatgcaggt

SEQ ID NO: 101384 - DNA, 689 bp, Mimulus guttatus
  Intron number 1 from transcript mgv1a015813m (locus mgv1a0 15813m.g) derived from phytozome v7.0 (chr-ID scaffold_22; pos 215071 to 215759 reverse strand)
aatcctacgccgcccatctcaagcgctccggcaaggtaaaagatctaatcgccgatcattttcttatgcttgtgctctcaaattttactttttttttattttatttttgggtaaagaagttgactttatcagagatgaaaccatttcatagttgtatgttggatagtttgtgttggaggtggggggaaaagaagaataaaccctttgggcctgttttttaggttttctgaaatttatgttgtttgattgtctgatgatattttgacttttcagagtgtgaattcatgtatttagtgttgattattttatagagtagtgtcaaattttgtttaattggatgattggatatgaacagtttctaggaatatgttgtcaattaactcaacatttccgaattttcgaaaacttcttctttgaattttcagagtgtgaattcatatagttagtgttgattttatagagtactgtcaaattttatttaattggatgattggatatgaacagattctaggaatatgttgtcgattaacttaacatttctgattttcgaaaacttcgtcatcgtaaatcgtcaatgtgggattatatctttgtgtgagacaatttaattcatttgtgggtattttaatatgttgactcatttctttgcacgttgtttattgtttctttttgtttcttcgtaaaaatag

SEQ ID NO: 101385 - DNA, 877 bp, Mimulus guttatus
  Intron number 1 from transcript mgv1a016275m (locus mgv1a0 16275m.g) derived from phytozome v7.0 (chr-ID scaffold_2; pos 4216381 to 4217257)
aagagcttcttcaacccttcaccggaatcaaggtaattgattctctcatagccttttgtattgacttttttcgtttttttgatcggatatgacttgtgctgcacagtgagtgattatgatattggctaatttgtggtttattctttgaggaaattcgtcgaacacttgtagtgttatggttgaaatgatgtttttttgatcgactgagatcccctgcctggctttttaagtgtagtgcttggtctggaaagcttgtaatggtgagaaattttatgccgtgagaacacagaactcgtattgctcgattaaaatgagtttatattgtatatgcagatagattacgttggcatcatttattcctattaaatcgcgacagataattatctttaaaatacatggtcaaattcattgatcgattttgatttttgagtggccgacctgtaagagtcactaagcaatgctgaatcaacttaaatgttagggctgttaaaaaaatatttaggaagataggactcacgatgcatgattggtttgaaacgagttgtacaaacttcccttatgcagtaaataattctgatgggatctttggcctcgattcatttcaaaagatttcttttatgctgtatgatggtagttcgttttagaatttccaatgggactgattagatactttgattatgtgtagttaagttctccatgtagattaagaaggttaggatcgcataatcaggcgaaaaaataggctcggcgataaatatctaagaaattgaattatattgttaaacgttcataacggagttggttagtcagattctcacttgtttctattgtaacttttgcagccaaagaaggcagaagagaagcagcagtaaatcgt

SEQ ID NO: 101386 - DNA, 581 bp, Mimulus guttatus
  Intron number 1 from transcript mgv1a011679m (locus mgv1a0 11679m.g) derived from phytozome v7.0 (chr-ID scaffold_270 ; pos 92568 to 93148)
taccactcgcgcaatcctccagaaaggcacttcaggttaacactcctctcttcttcttccctattcaaatacgcatcgtatacccacaatcaatttttacctgaatttttgatgatgtcactgattttcatttgaattactgggtaagcactaggcatattcagaaacggtaatctgaaatctctcaactattggttttaggttgttataattgttagttatggtctattcggcaattatttatttacttcaaacaccatctgaatttcttatttacttcgaaattatgctaatcaaacttgaatttattttttatctgttttgttttgcctgtaactctatagcttcttgaattgataaacataaatggggttcaagtatggtttgataggttaacaagtcaatctcatatgatattagaattcacctgaatttgttctaaagttagtatgctttctgctcattgactactatctactgctgccttcatagacaagaagagattcatagccaaagatgagcctcatttatgcttttgcgtttctttctgttagaatcagtggcaacaacggctgttgaaa

SEQ ID NO: 101387 - DNA, 1015 bp, Mimulus guttatus
  Intron number 1 from transcript mgv1a015006m (locus mgv1a0 15006m.g) derived from phytozome v7.0 (chr-ID scaffold_278 ; pos 181168 to 182182 reverse strand)
cgttaatttgaggtaaatttttgtgggtttttttttttttttaatttatagttcttgataaagattgagtttttttttttttttctggatctgttggttgattgggaatcatgaattgttggtttatagatagcttttgatgagagaaattggaatcatggggttgactttaaattggtcaacactaattgatgctataagataacaatttggtatggtttctaattatttatttattttcgatattcgatattcgatattcgaatacgaatggggaagtagttgatgtataggatcgatccagggttaggtatcaaatctcctaacgagctttgggttatggtttgtgataaatgcgtattatcgccttgttcaaaaatagtacgtcgaaactgcaagatagatactaatatccttttttttttccttgtagaaatagagccgattttttgtagttagatgtggattttattgtttcaataatcgtgcgacaattattcaaatgcattgtgaatttatgatgtacattcgggtttttttttttttttgcttttctgaatatacacatcaagaaaccgtgtcctggtttacgaattatataaaacagataatctaatgtgctattgcacagaaatgtggtgattacttaatggaagaaaggatttgaggtacaaaacgattagtttaatctaactagtgaagctattcaccatgcatccggtttgtttttttttttttttacgaaacatacttcatttgagcagctcggtttttaggcatcataaaaaatgtaaaaagtacaggaaataaatttgtggatggatcctgttcggtttcaatttattgagtctttgataatcggttttgtttgttagatacttgtccttgtgttgggttttttttacaaattattcacttgcaaaacttgttctcgaagttcgataatcttcagatatattgacgcaaaataacatgccttgattttttttctgtgcagaccaaagccaaattttag

SEQ ID NO: 101388 - DNA, 789 bp, Mimulus guttatus
  Intron number 2 from transcript mgv1a001501m (locus mgv1a0 01501m.g) derived from phytozome v7.0 (chr-ID scaffold_2; pos 1285406 to 1286194)
tccagcttttccgcggagacactattttgattaaggttctaactcctttgacttcacatacttttatccgttttttctttttaatatttttttttgtgggaagaggggttaggttttctgtttctacgatgtttcaaagctaactatttgggaaaataggtcgaatgaattagtggaagagtcgtcgatgaaatttgcttactgttttatttgaatgtctcaatatttataagaataatttggggagggggttaattagggtatatcttttgatccgagtgaagtagcaagtgcaaaagaggggttttgagttaagtcactaatgaggaatttgttatttccggtttggttaggttgtggctgcaatgaagttgtcgatcataattgaattgtggcttgattaagaatttatttgtttctcggggctgtgtctggggcatctgatccgctcatgaccttatgagttataattaatttgtttggtctgctcaaaattgctttaaccttttcttgaaacacgctagagtgtcccctgggttttcaatggtggttagcatagtgttttaagaaagattatatcccaaatacatgtttaaactgacaatattagacaaaagtctcagaacatttagtacgatttatgccatatcatgaaaagaagatgagatagtacacatgctcccttaaccttttgagatgtattatgttttatttggatgtgctgaaattttgaatgtcctgctattgtttccaggggaagaaaagaaaggatacagtttgcattgccct

SEQ ID NO: 101389 - DNA, 736 bp, Mimulus guttatus
  Intron number 1 from transcript mgv1a023731m (locus mgv1a0 23731m.g) derived from phytozome v7.0 (chr-ID scaffold_111 ; pos 137118 to 137853 reverse strand)
gagggttgtgggtagagagagagagttagagagagagaaaaaaataaagagacgagagagagggagatgaagagagagagagagagagagaaagaaattaaaagagtgggggaggagacggctggtgatagatagatgtgggagtgggaaaaaaaaaggctaggatttagggttttaaattataattaaaagggtaaaatgggtatttcaatttgtctagggggtctatcaaattaagattagaatttgagttttttactaggaaagaaaaatccatatgaccatatttcccctttcgaaaaaggctaaagtatttcttgacaaataaattattttgcgctgtaactggaaaatattgcactatgaatagtaaagctccttaaattaattagcaaggtctttttgaagtggtgaatggtgtgaattaaatctttcaactttccccttgttgttattgactcatgtcacattcacatcaagtgttcggaaatttctcatgcataatcaaagtcaagatccaagtctagtgaaggcaattttacgcggaaagtttcttaaattatattctaatacctttcagttaaccaaaaaatcatcccatttctcttctccttaaaaagaaaaaaaagaacgtagtagaattaatatatggattctcgaaaatggtttattccattggtattaataatgttattgattattataatactgcagccaaagatttcagcccagaatt

SEQ ID NO: 101390 - DNA, 603 bp, Mimulus guttatus
  Intron number 2 from transcript mgv1a012254m (locus mgv1a0 12254m.g) derived from phytozome v7.0 (chr-ID scaffold_245 ; pos 292413 to 293015 reverse strand)
gtgggcaggccgagatattgtccaaagcaatgtaagatatctttaacgtcattcacgtgctattcgacttcttttcgtctcatgcccgaattcaataatgtgtttgtaaatgcttcaaccactacccatgtgtcatgcagttgtgctctttgtaatttatacatttcgcctacttacgttcggcctttttgctttgatggtttcagaacccgtgtaatatttacgatcctgcttgcatgttcgaaataaatatattttcactgatacttgtttgttttatgagctttcttggattcaaatgattttattttcttaggcatgagaagatcgtttttactattccttctgtggggacatttatattaagattttaattgtttgttaaggctcgttattctgaaactcgtgcttatcggcacttgatttttgtagattagtggtaattttaccactgtgctgcttaagttgttgagccctcggacttcattattagattaatgattcttctgcttttctttttacgatacacgatggtgtgattagatgtttaaagatccgatcattaacgaaacccttttttcgcacagtgcccaaattgcggaa

SEQ ID NO: 101391 - DNA, 763 bp, Mimulus guttatus
  Intron number 1 from transcript mgv1a003312m (locus mgv1a0 03312m.g) derived from phytozome v7.0 (chr-ID scaffold_4; pos 1187481 to 1188243)
cggagctttttttttttttgctttctgattgtgaggtaataagctcgcaacacaggtttattttttttttcccttgccttctgtttctgtttttgaagaaagcaaagcaaatcattattccctgctaatttattgtttcttcaattaacatccttcttctgtagaactgtagttactagtttgaaaattttaagaacgatcgttattctaaaatgtttttgatcagtttgaatttttttcctttttttttttttgaaatatgcaaattcaggtagagtagattcatctaggttattgggccttgtgtgggaaatccttgtttgtattttccgttatattaaattgtttactattttgcattgttgttagtaactattccaaacaaaaaaaaacattattgaatttcaatctctgtttcaagttcagaaaatcgctgggtccgattgtggcactgctgatattatgcgtttccgtggtctgtgttcgcaacgtctggattaatagagggtgcaaggttttcgtatacggattatgttatattgaaatgcttatggtcttagggtattgtgaaattatacaacgaaacttttcgtggtttgtctacggaagtatgctaaaattttcatatattcctctcggttttaccctctttctctttgcttcttttatctgatgtcgtttgtagagctcaatagatttaaccattcacttttgctttaacatatcaggaaaatctttcacataaagagtagtctttcgtaac

SEQ ID NO: 101392 - DNA, 595 bp, Mimulus guttatus
  Intron number 1 from transcript mgv1a007853m (locus mgv1a0 07853m.g) derived from phytozome v7.0 (chr-ID scaffold_16; pos 1346277 to 1346871 reverse strand)
acttctgctctcccaactcaacctattctacccaggtaaatctttctcaaattctcacttctctcgttgtttgaattcatgcttcatcttttcagaatgtgtttcgcgcattttttttttgcttttaattttcgtttcatttgtttgagtaattttacctgaattgtaggtctgtgtttttttttttttgaattttaattttctgtttctttgtggttaatttggtaagaaatgattgaacgtttgaagagaacgaacgaagcaaaattccaacttcttgtcatcttaattatatattttaaattaaatttacagcatcggtaattttcgagatgttttctcaagttattttttcttgtcaattttcctgcaaatttttagatttatttttatattcattggatttctgcattttggtgtataatttagatctttgtggttatggttctaagtttttatttatttattattatttttttaaatttgaattgggttagaacaatgtctatgttgagcttatgtttgaattgtttataaccatttcttattgcattttctagatttgcaccgtcgtaattgctgcctattatataag

SEQ ID NO: 101393 - DNA, 509 bp, Mimulus guttatus
  Intron number 1 from transcript mgv1a021919m (locus mgv1a0 21919m.g) derived from phytozome v7.0 (chr-ID scaffold_57; pos 13127 to 13635)
gccaactgagaattcgtctcttcgaaatttaagtaatgatattaacatgttattttaatttatttgcagttatatataaaaagttaatttaagttaatattttgtactttgaatattgtagtttcaagtagaaataagagagtgtttgtaccaccgactaaatcaagtatttcaaactctttgactagacaatcggcaacaaacccaaaaacaagcgataaaggtatttttttttctatgattgagtttatttttgtaaactttgtttattaaatagtataaatttatatatttccttaacgcatgtaaatgtaatcaatatttacatctagagtgcatacagaagaccttcacgtacaacatgtgactaatgcttcgaatgagcacactggagttgttgttacaggttttgttaagttgtatatttttatttttaaatatttttacttctaacttatattttaaaaaactaattgtagaatcagtcgtagatacggtggataaagcag

SEQ ID NO: 101394 - DNA, 749 bp, Mimulus guttatus
  Intron number 2 from transcript mgv1a003411m (locus mgv1a0 03411m.g) derived from phytozome v7.0 (chr-ID scaffold_155 ; pos 561421 to 562169)
catcacaaagtgaggaattgtgttttttttttcgttcccatttttcagctctatattatggtactaacgtcttttcttataacaaaaatcattggttggaaacatgttttgaagtaaatgaatcaaatgtttccacactagaattatttcctgcaccctcatgcttatagttataaatgtggaagataaacaattacacgatgacattcttttttgttcgccaactattgcatattttttctctccgtgtactgatagcatgaaataattagttgctttgtgttttctgccataatatttggttaaagtttcatctgcactacaactattcagtttcactgtttgaacaatattgtatgaataagattgtatttaattccatcatgtcaatcatatcagttctgttttgcttttgttgcttatatgttgtggtataccttaaatctttgttttatcttttctcttcaatgtcaaattatttggtaaactgcttcatgttttttgagactgaaatgtacttataatttctgaattgttctttagcaaacttgattttcgattttactgcctaaacggtatatttattatcttctctttggaagatggcagtccatgccctttccggttgaggcatatcttatactcatttttacagaactttgcttaaatgaatcatcatgcttatattgatgttttttcgtcaatgttcttgcatatatatttactatatctttgtggtaattacaggt

SEQ ID NO: 101395 - DNA, 458 bp, Mimulus guttatus
  Intron number 1 from transcript mgv1a004342m (locus mgv1a0 04342m.g) derived from phytozome v7.0 (chr-ID scaffold_66; pos 599343 to 599800)
tctctctgcctcccttcccttcctttctcaccgaggtacatgcttacgttagccaaagattggatttttatttaaatttttacatcttaatctttcttctttttggttgcaaatgagattaattaatcgtgcatgaaattggggtctcagaaaagtgtttgattgatctaaaacatttcttatcttctttctttctttatttatttttatttttattttctgaatttttgtgatcttggtgaagaaaagttgatatacatataattcggatagaattcttacaaattcttacatccgtacagttttctctttcatcatgactaatcaatttagttcttcatgtatactgaccagcttgtttttttttttgctattagattttttttatcaatgagtaaactaacaagaatcgatttgttttaggaaaacaatcttatctgagcagaggaatataccac

SEQ ID NO: 101396 - DNA, 830 bp, Mimulus guttatus
  Intron number 1 from transcript mgv1a005705m (locus mgv1a0 05705m.g) derived from phytozome v7.0 (chr-ID scaffold_2; pos 1900397 to 1901226)
tcccaccacccgcgttgttggcggcgttagagagcgtgagtcacacttctcgtttttcaattgtactcttttttttatatatgtggaattagattactgaattgtctgcttaattttgggggaaaatggaaggatcgcaaattatgggtcgtgtatacaaacgacaacgtttcaatggttttatgttattgtatatgcgttagtgtggttgatcttcattacaagcttgctcgaaatatacatgtagtttaaaattgaaatggttcatctcgttattgttgagattgtgacctaattgcttatttattaccgaaaaaccaaggtcattaatactgaattaagatagtgttgggctaatcttgtggattgtgtcgttatcgctcatacgattgagattgtagattcttgtcgttattgaatttgtagaacttctgatagtacaactgatttatgtaagtaaaatgcgaaacatactgcaaatatctatgtttctgcaacttgaaagctacatcgcggcttaatattggagttaagaagggggtgaagatcagcttattctttatacaatcatgggacgaaaaatctgtatctggattcaataatttgacgaacaccaggaaaccagtttaagtgatatagatggaagttatagatgtcaaattgaaaagtccaattaatgtgttaatatttgattttatgtttgaactatgtcctaagctctaatgatctattgctcgtatttacaacaacagcgttttagtttacgactatatttttttttctgaattaagttagggtgtttgaagctcctacctccagagaaacttcag

SEQ ID NO: 101397 - DNA, 409 bp, Mimulus guttatus
  Intron number 1 from transcript mgv1a014240m (locus mgv1a0 14235m.g) derived from phytozome v7.0 (chr-ID scaffold_137 ; pos 453183 to 453591 reverse strand)
gaaacttggacctcttttcgtttgccctcctccaggtttgtctctttgatttcctgctcatttaatttatttcgacatagttgacattttactagtttcctgttttgattttcatcacttcttcttaattctgatttttgatttattgctaataaaacgcatttcaacagatttatggtttgtttagttcaaaattattctggttgagtgcattaagaattgatttaccagcaaagtaatatatatatatataattttctgaattcttattcaatggtacttgtcttatttggttggaggatttattttttctattacttctttgctgatttgttggctttgatttttccgttgaacctgtttataattaggaaatctgtgtctggattaggtagtggttcttgttggg

SEQ ID NO: 101398 - DNA, 515 bp, Mimulus guttatus
  Intron number 2 from transcript mgv1a008783m (locus mgv1a0 08440m.g) derived from phytozome v7.0 (chr-ID scaffold_115 ; pos 114283 to 114797 reverse strand)
gagagggtattgcttattctactaatcctctctctaacctccattgaattgcattggttgttgagatctcaacttacacttttcattcttctctttcgggctgggtggtgggcagtaatacgattacagttctgtttattttgatttggtcttcatattggatttcagaactttacctaaaccaaatcgagtgaaagaacctaagtatacattatttaatttttgaatagtaaaacaaaccttactgaattcaagtaaattagtaatttttgtttctcttcgcggtagtctttaagtaaatgtgtttcatctgaaacaatgacatcaactagaacttatgaagctccatctgtctatacttatcaaattttcatcttacttttagttataatcatttgattatagtggaaaacgaaaaaagtcattcttgcttgaatgatggtagagagtttcggtgtcttggtcctgttatcttcgtccggctgatctcattttatattgtttctcttttgcag

SEQ ID NO: 101399 - DNA, 607 bp, Mimulus guttatus
  Intron number 1 from transcript mgv1a024154m (locus mgv1a0 24154m.g) derived from phytozome v7.0 (chr-ID scaffold_48; pos 253460 to 254066)
caggtattcgatcgattatactccattcgtttcattttatctgtcgtttaaggtaaatttgcactaattaaaagaaaattatttaaatagttttgatctgcgaggaagaactgaagaagtccttatttgaccaagttacccctttgcgaattttcatcttctctttctcgttttattaatttatcgataattaatgttgggtaattattgagtaccgttgacataacaaatactttagtatagcacaatatgatatggtaaccactcaatttgtcaacaaatactttagtatagcacaatatgatatggtaaccactcaatacaaatattttcgtaagtaattggtacgattcggtaggacaatcgagtggtaggccaacatggtaaaaaaagaaaaaatcaccccgactagcaacacattaagagatcaaatacgtcataaagtaataaatcgatccgaaagttttttttttttctttttttttttcgaacatgagggactaaaaatatttttattttaaacttagggacacaaatgtaattttctttatttgatgaaaaaaatcctgcagcttacgaaggagaatccacgtggaccaattgcaag

SEQ ID NO: 101400 - DNA, 324 bp, Mimulus guttatus
  Intron number 1 from transcript mgv1a003106m (locus mgv1a0 03106m.g) derived from phytozome v7.0 (chr-ID scaffold_223 ; pos 214335 to 214658 reverse strand)
aaatctgaagcatttcaccgcgacggacaaacttggtacgaacgaaaacgtagatgtgattttgttattttttattcaatcttgtttcaatttttacattaattcagtcgacgtcaaatgatcatgaatcgggtttctgatcgagctcgagctgattttgatagcttatcgaatgaaaacacgtgaaagttttgctaaaataatcttctaacgaacgaacgataccgaatcaaatagtatcgattagtttcgtttaataataataataataataatgcatgcatgtacactagaattcttaattagtttgatttattgtaggca

SEQ ID NO: 101401 - DNA, 730 bp, Mimulus guttatus
  Intron number 1 from transcript mgv1a001509m (locus mgv1a0 01509m.g) derived from phytozome v7.0 (chr-ID scaffold_90; pos 358339 to 359068 reverse strand)
atagtgagttcgtcgagaaagtcaagtctagcctggtatgcatttcattgtacttttttctagcagtatttggtatttgaatttttcattatatagttgattcatgttcttgagattaggtatacacatactttctgccattttttttcctaataggcagcaaaattatctgtgaccgcagcaggcaaagtcggtcttattgcgaactagaaaataagccatacgctgaaattggttttgccagagtaaaattggatactttttttcggagtttcattttgcaagtatgtagattttaggttatatactgttaccattttgaagttatataataagttgagctaaatttgctgttcagaaattaatatcacttctcccttgattccgtgaagtttaaaaaataaaaatgaacggaagataggttgttctctaattagctactgttgtctccttgacagaagctgggtttgtataatttagtggtgaagaatatacccctgagaatcttagacacaaatcatttgattgaaacaatctagtatttgaatgtcaagacagatttttttgggacgtaaatgtttccaggcgacatggtctgtttagggctttccgtttatgtatatatatatatgttgtggtattggaattgacatttgattttgctggactgattttcttttcttttctcattcaaattatcttttgcagaaagcaatttgcaaggatccat

SEQ ID NO: 101402 - DNA, 689 bp, Mimulus guttatus
  Intron number 1 from transcript mgv1a000780m (locus mgv1a0 00780m.g) derived from phytozome v7.0 (chr-ID scaffold_124 ; pos 745587 to 746275)
ctatttgaagtaaactataaattaaaggcaataaggtcagcttttttaatattttttttcctttttcccccttgtttggaattttttttactcaaatttacaatctcgttatgccctaagttcgtgtttgagttattcaattgaagtaagtacggacatttgaaaatgaaaatgtattcaattgagtggatggttttgttgatatgtttggagaaatgtttttttttttttttttttttttaaatttatatgtttgttgttgctggttattctattgttttatcagttaaggcttgttcgaacacaaaagtaattgaattttgagttttccagcttattggttattgtttactgtgttttatgggtgtaaacagtattcatatttggatgggctgtgtttgaattggatatgagtatttttattttaattttaaggcctccaattccttttgttgaaggttataatagctagtttggaaagtacggactatttgttgcgtattggcgaaattattttcaatttatagttggtttaattcgtttgatgagaattgaatgacaagaattttgatgaaaagaaagaagactgaagaattgcataccctccattaaattcaagtgaaatagataatactaactcagtgaccttcttatgatacaggtctgcatttctcagttaacaagttccg

SEQ ID NO: 101403 - DNA, 624 bp, Mimulus guttatus
  Intron number 2 from transcript mgv1a015189m (locus mgv1a0 15189m.g) derived from phytozome v7.0 (chr-ID scaffold_2; pos 3939186 to 3939809)
attcctgcaggtctctctctctctctctctctctctctctctctctctctctctctctctctctctctctctctctctctctctctctctctctctctctctctcaatcgataataggggtttttgcaaaaattacccctataatttctaactgctgaaaaaaatcttcatattaaaactattagcaacgaaaagacaaaaatacccttcaaaatttagaaaattataacctcaccccataatttttgtaagacccaaaaataaaagtttcataattttcttttatatttaatatccaaaaaatcattattgaagtatttaaaaaaaaatcatgggtaattttgtcatttcattaaagtcaaaaaccaattttaatgtaaggagttgtttacttagtaaaacgcaacataaggggttattgctaattttttttaatatagggtttttttcgaaaattatagattacacagggacttatgtgctaataactctggattctctctctctctctctctctctctctctctctctctctctctctctctctctctctctctctctcttaaaaaaattgcatgcatgcatgcagtgcggaggtggcggtactagaaagcgtgtgttgga

SEQ ID NO: 101404 - DNA, 819 bp, Mimulus guttatus
  Intron number 2 from transcript mgv1a007315m (locus mgv1a0 07315m.g) derived from phytozome v7.0 (chr-ID scaffold_105 ; pos 348028 to 348846)
tagttagcggtgattgtgtactagttggttttcaggtacacatttttatgctgttacccttttgattatactactgtccaagttattttttgagagagcattgtttatgggatcgtttattttcttcggtttgctaatgttcataaagtatcgttaaaataaaaataatcctgcaattggatggaaaaagaaagaactgtatgcataaagaagcgaggagaatgggaaatataaaggacgagaagataaaaccgtgtacatggctgggatattgatcaaaactatattgaaacaagaagattgtgaaatttataagaaccttaagaccttttcttgtaggaaatcccttgaattctaagatactgcataatgattagttattaggtaaattatatggactcccttgatgtttatcctatttaaaggaaaaactcagttaaatttataaaatcacaaatatccccttgatgtttgttcttattttacaaattgaaccttttaaggggtgtgttggtaaaaaaaatcaaacttcaaggggtaacgaaatgccaaacacaaacacgtgtacctaacaatgaaaaaaatgggtcgtcaatcaacacggattacccaatatccacctctaaattggagaatactacccaatttttcaggtcccaacccaaactacacagccacagttaccagagtggatctcacccttaagttttttgtacataaatagttacatgcagtattgctatgtataattcactattattctcataattgttactaagaaatgtctgatattttcttttccagcctattctggttttt

SEQ ID NO: 101405 - DNA, 964 bp, Mimulus guttatus
  Intron number 1 from transcript mgv1a011993m (locus mgv1a0 11993m.g) derived from phytozome v7.0 (chr-ID scaffold_52; pos 890028 to 890991 reverse strand)
gccttggctcattggtattgaattctgaattttttattttgaattttgaatttttgattttgaattttttatttgattgattatgtgaattaactgaagtatagtttctgatttttatctacattttgctttgtgtgtatgttgagctacaaaaattaatacatcctgtgtttatttccgagatttatgaagagaagacgatcggttaatcgatgatcgataatgctaaattgtggtgcatgtagtgataggagctttcgaataactaattgcaatgctaatcgttgttttcttgtcgcgtttatgtatgtataattaaaattactgggatttgcggtgcacgagaatgaacaagattcaacctttttctacttgtagctagaaatctatgaatctttgtttctcaattgtgaagagaaaatgtaacgggaactaggactacacgagaaacggaaaattagtaatgtaacaactttgtttgtgtacatgcacaataagaatgagagagatggtcgggaagtgttacgagtttctaaagtattgatctcgtgggtcgatattacgatgaaagacgagattagatcaaagttaggtggtaaaataatgaatgaccactcaaaatttttatgattatgaatgagtttgtttactgtccgaaaatctttgcttttttagttggaacttcaatgtttttgaattgtaaaagccctcgtttggtttgtacaataagccatgattaatcaattaattaactatgtcttatttaatgtttggttaaggcaataacctttttttttgtagcggctaacaattattggcttgttgggtaattacgtattgggacttcttcttatcttgtttaattttatcagagccgatgtgcatttcttgattggtcttattccgtcgtaatagaaataaataaataagatctattttatttatatttgcagtgctgggattc

SEQ ID NO: 101406 - DNA, 1020 bp, Mimulus guttatus
  Intron number 2 from transcript mgv1a009283m (locus mgv1a0 09283m.g) derived from phytozome v7.0 (chr-ID scaffold_193 ; pos 70220 to 71239)
tctggttgatatttttgctctcctttctaaggcaagtgattattaacataaataaaattaaaatttaaaaaaaaaaaaaaaaaaaaccctcaatatcactcacatgatttagaaattaaagcgccatataatcaaatgaatattttttttatcactaaacgtatcaagtgcaagataagctttttaccacttgacctacaacccaatcttgcaatcattattcatatcacatgcatgtaataatatataatagatatctaaaactataattttctttttttttttttttttttaatcaagtgttgtcctcaagagtgtccacaagcacacccttgaatcactaccattatcgaagtttcggtaaaagtatttcggtaaaaaattggtaaggttaaaaaaataaaaaatcatccctagatagagaaaggggagagtgatagatggagagaggagagataagagataagacggaggaggggaaagagaatagagatagaagatagtagtagattgaaatgaaaggagggaatcgaaagaggtcccgtcccggatccagagaacgatccttaaattttacttgtagttttcccaattttttttaggaaaactcattttccgtgttttagtttaattttcttttccatttttttcctcctaaatactttacctagtattttatattgccaccaaacatgaaaactaatttatttacctaatattttccattttttacttactattttccttaaatcaaagaaagtcttgaactctacgtatatataatattagcataaattccttgtaataagtcgcttaactaaagaaattattatattataaattcgtaatttttttagagaatttgttgacttttcaatatataccaacaccaatcacaatgttttttttcctcgaaatttataacgaaagaactcgcaatcaatcatataggtgcaccggtgatttacatttttaactaatttagtattgcagtgtgacactaaatcaaaacctctactt

SEQ ID NO: 101407 - DNA, 359 bp, Mimulus guttatus
  Intron number 3 from transcript mgv1a005563m (locus mgv1a0 05563m.g) derived from phytozome v7.0 (chr-ID scaffold_8; pos 1590343 to 1590701)
gacaggtaaatatctttgatctcttacttaaaattccctctctctatctctctctctcacacacacacagaggcaaacaatcttgtatgtcattttcatgtacttgtaatacgctgatttagctagtacgagtggatttttttttgtttgttgttgccaaactgataaaacagcttagcttatctttcataattgcaccataaggtgttgaattatcaaaatttatcgtgcacattccactaagcttgttgtgaagagtagttgacagttttttcacattgtggattaaatattgaaagaaaaaagttctaaatttacttgtattttagccagcttcacccacaacactagggaaggag

SEQ ID NO: 101408 - DNA, 316 bp, Mimulus guttatus
  Intron number 1 from transcript mgv1a011893m (locus mgv1a0 11893m.g) derived from phytozome v7.0 (chr-ID scaffold_66; pos 1164255 to 1164570)
ccattgattttctcacattgtgccaccgtttgaaggtgtgtgtgcgcgaattctaacctttttttttttgccctaatgattgttcaggaaaggggttgaattaggggttttgtgtggctattgatattatgttatgaatttaaaataaaattaaattaaatgaatgctcttatacttcaaactgtaaataatactcagaagaatggaaatattatatattttttttcagtttcttacttgttgcatgcagtgtcatttaatttgcttttgagtataatgtttattactctctctcgcagtcgacaaaacggaaagg

SEQ ID NO: 101409 - DNA, 953 bp, Mimulus guttatus
  Intron number 1 from transcript mgv1a016732m (locus mgv1a0 16732m.g) derived from phytozome v7.0 (chr-ID scaffold_8; pos 1896854 to 1897806)
ttgaatctagctgaagaagcaaacattccgaagtatatatataatatatttatttatatttttagtccatttaatttcgtgaaaattgcggatctgagtctctatagagttttgcggaatgtagcttatttattttgcattatattgaagaaataaatgtttatcttctcgtaattttgaacttttctttttatttgttgaatatccaaattctgcaatgtggggtttaatttgtcaaattaattttgagttcatgtgtggttatttcacatttgatgatttgatcttggaatttggttattggatatttatgattgattcgagtagatgttgtaacgttcgatttgctgttttatacttgctatgtttgtcttgacatggtttttggatcataagaccaatttatttattttcttttttttcgtttattgaaaattatacgatccggatgtacaagttatcgtagttcataagatagcaatagtaatttgaagaaaccattacaagaaaatttgtgcgtggtttatatggctgggtttcgacctgttggttgattgatatcgtgaaatggttttgctgcctctacgaaatttaaaaatttaaaatgagagaatgtaatatagaactgttgctgcacattgatctctcagacaaacacttcttgagataaatcggtgtttcattttactagcttgtgtgcagttggcgtctgataatacaatatttgcacattcgttgacacatatgaatagatatattgtaatgtttatttcattatgtacaaatgaataattatttccgtgtcgtttgttgaatggtttcgtgcacatctccgattacttgtgcctatgctttgatgcagttttccttttcagtcatttagtttctattgttctcacgagtcgtcttttgttataggaaaaggaagcaaagaaggaggcgtttagaaaata

SEQ ID NO: 101410 - DNA, 797 bp, Mimulus guttatus
  Intron number 3 from transcript mgv1a008710m (locus mgv1a0 08710m.g) derived from phytozome v7.0 (chr-ID scaffold_4; pos 2066190 to 2066986 reverse strand)
ccagcaaatcaaagattcgttctcttatcagacaggttatcttcattacagccaataaacatttctacaaaacaaaatgaaaaattatggaagtggtagttttcatgcttaaatgtagtgtatctgctgtatatcgtactctatttgatatgtgatactagttaagaaaaaaatctccaaataaacgagctggagaatgcttcactcagtatgcagtttaagttgttgatgttgcattaatagattttatctattttgagtgattggtgctagagactggagaattcttactttacataagagactggagatagagaatatataattaacatccttacaattatgccttgagaaattgtgcttcatttaccttaaattggctatagctcatttgtgggatattgattgcacaacctgcagagttaaagtaattactaattactgttcgttgcaataggatgagataatttactttttttattcccttctggtaatatttgaatacatcgttatgtgatttctttgcatgtatctcagttgagtacgcttgtcattttctctgaccatagttgagtgtttgaattagtatctgagactgagagtcagcatctactattcattatgccggttagcttggtcaaaaatttctttagcatattacgtatccagttcatctaatatattccacatttcgacttcataatatatgctgctgttggagcatttgtagttatctgacattagttttatcaactgaaacagctgtgtacctttgtacaacttcagctatatttaca

SEQ ID NO: 101411 - DNA, 649 bp, Mimulus guttatus
  Intron number 1 from transcript mgv1a003478m (locus mgv1a0 03478m.g) derived from phytozome v7.0 (chr-ID scaffold_12; pos 1538287 to 1538935)
atcctggacagaggttcgaccagtttcttcttcctcatttttcaaatttagggtttttaatttttaattttttaatttcgataatctgccgcgccattgaattttatattgaattcgagttggttaggctctaaaatgaattcaattacagggctttgccatttcagcctggactctgttttgagcttgttaagaaaacaagtgtatgcattgagcgtgaaattaggctttctttttgagctgattgtagttgtaagccttaatgatcttggattagggagtggctcagatgaattagtatgtgaattcccagtacttgctaggcatacttatttttggctcgagcaacttgatgttgaattcttggacaactataacatgtggccgcgtaatcacacgctcacacttaaatgcactcgttcatttatgtacatgtctatttaaaaaacaatttagctaaatgctgtgtctctttagtctttatgtcgttgtttccatgttattgaccttcaaggtttattttccaaagttatgtgtttgttcataaatgtatgcagatattattttatggataatattacacatttattgatacgatactgtataaattgaaatttcagccggtcaaagagaaaacgcacaacacaga

SEQ ID NO: 101412 - DNA, 483 bp, Mimulus guttatus
  Intron number 1 from transcript mgv1a004564m (locus mgv1a0 04564m.g) derived from phytozome v7.0 (chr-ID scaffold_17; pos 1312189 to 1312671 reverse strand)
taaacaccctaaaagagaatccataaaatcttcaggcaaactacacacactctctctcgcaatccttttttttttctccgtacgaaagtgtcttattgatttgtttattatgtttttttgatggtagaaatatttttgtctttctctctattcgatatacgagaagcgttaacgatgattgattttttttttaattgttttgttattaagtaatattttctggttatttgaagaaggcatggtagaatgaatggctttattcattttcccccttagtggtggtggggttttctttgtttgtcatttatacttgcatcttttattgttgaaatagtaccattacattcgagaaccctaatatgattggaccgaggtcactgtgtgtgtgtgtgtgtgtgtgtgtgttttgatttgatgaattgagattgttttccgatggttatttcagtaggaagtatagccgggcagaggagacgggagaag

SEQ ID NO: 101413 - DNA, 515 bp, Mimulus guttatus
  Intron number 1 from transcript mgv1a014297m (locus mgv1a0 14261m.g) derived from phytozome v7.0 (chr-ID scaffold_51; pos 725123 to 725637 reverse strand)
actgcaaagctcttgccatagttgaaagtatgtgtttttttactctctacactcgctttctgtgcatatgttttctctgttatattttgtttcttttgaattggagaatatctaattttgaaattgaactaattaagtgaagaatattttgaatattggtgaaaagaatatatgatttgagtttatgttaattagtaaaaaaattatcacctatttgttgatacaataaaaaggataattgagttgcaggattcaagattcattttttattcttattaatccaccttgtctatttcatattttcggtgcaaaaaaaatcgaagaaaaagcgaaaaacgagtttgttaattgaacttttgagattgtctggagatgtatgtagtagttctagtgaattggttatatcatgtaaattactttgtaaagtctcgatttttacgtagcaagggttttgatgaattcggtatattattacagaagaaccggaagctgtcgaggagaagaaactcgagggc

SEQ ID NO: 101414 - DNA, 985 bp, Mimulus guttatus
  Intron number 1 from transcript mgv1a017345m (locus mgv1a0 17345m.g) derived from phytozome v7.0 (chr-ID scaffold_75; pos 404124 to 405108)
gagaaatccatcgcggaagagctctctctacatcggtacatgctgtgtttgttcattttttgcatttcttctctttgtttatttgtattgattcagctagggtttccacaatcgtttgttttaactgcggctttggggtttgtcttactgtttttatggttgattttctgagtttatagaccttacgacagccgttgatccggatttagggatttgacgggtttccaaatgcttagtattctcgtttgtttattggtaataatgggatttattccgcgagcggctgattattctggatttaaatgttgagaagagaacttttccgattctggttttcaatttgttgaaaatttgaatttttatatgattatataaaacccacataagagttctgtggttttgaattttggatctattgggttgtttattcttgagattttcgaatatgctttgctacgttctctcgttggatttatttaatcggttctgttattatcggccgaagtgatctgttgcatatgggacgagaagagctgcgaaaatacatgaaaatgtgatgcctctttgcatatgtgattgtgtctaatgtgatttggtaaatgtttgtttctgtatgacttttggatttgaaaacctcgtcgaatatattattctgtgggttttttgtttgtgttattattgggtcttctcttaattagttttcatgaagaatcgtatatgttttttgtgcttggtagattagacacgccttgctaaaataccgttttccgtttcccaatctgtccagcaagtagtgatttatgtcatcttatcttgttatgtcttgcttcgttttcattatttcttgaaccaagctttcccagcaagcccgcaattttaaaactcagtctcgaggtcatgatcatgggtaatttgttaaaacttgatttcaatttagcagttttggaaaaacttgatttcaattttgcagttttggaagcgaaaa

SEQ ID NO: 101415 - DNA, 615 bp, Mimulus guttatus
  Intron number 1 from transcript mgv1a019800m (locus mgv1a0 19800m.g) derived from phytozome v7.0 (chr-ID scaffold_285 ; pos 187768 to 188382 reverse strand)
cggtggctctgcaattaccacaagcactgatccaagtaatatgattttgctttctcaaactgttttttttacatgttatggttatgggttaattttaattaaaagaagggcaaattgcacgtcaccccctataaagttttaacttttgcactttactccctctaaatttaaaaaagtgaatgtcccccttcaaaatgttatttttattgcacactgcctcgatagcaaaattcccatggattattcaccggaatagagtgttttgttgcacgttgcccctttaaatattatttttgttgctcattgccccttaaaaaaagttcggcacattgccactttaaaatgttgtttttggtgcaagatgcccacaaaaagttggcttttggggaaaagtgaaaccgaaacagtattttcgaaggggggttaccctttgtttgaatttttaggggggaaagtgcgaaaatgtgaaatttatagggggtgaagtccattttgtccttaaaataaattgaccgaaaactatttttcgttaagcaacgagcttttttatccgttcggatagtgtaaacgctacataataagcgatattgattatacgatcttcttgtgcaggcc

SEQ ID NO: 101416 - DNA, 536 bp, Mimulus guttatus
  Intron number 2 from transcript mgv1a018005m (locus mgv1a0 18005m.g) derived from phytozome v7.0 (chr-ID scaffold_161 ; pos 378631 to 379166)
ctaccgggaaattatttgtaagttaatttcttatgtttcaaattaactattgattttgagatttgttaatccgcacattaggattccaatgttgcatttttctcaatttagcacttaataagttcaaccaaaccctaattatcgcccgtggagagattaattacgagaattagttgaacgggtagtttatcttattatataatatctttacagttatttcaaatccgaagacatatttcattcaatctgtttataagctgttaaaaagagcttataagttgttctaaagtgtttataaaaaactagcaaataagctggtggccggagagcattcaacatctttttcattaagtatacttctactccacattttctttaaaattttataatgggtaaaaataacttataacgttcattatccatatgctttaaaaaaactaataaaatcgatataacgagttataagctcttaaaacagcttaatcaaacgtaagaacttatcagctgttcaatttttacaggtaaacaggctatcg

SEQ ID NO: 101417 - DNA, 722 bp, Mimulus guttatus
  Intron number 1 from transcript mgv1a009280m (locus mgv1a0 09280m.g) derived from phytozome v7.0 (chr-ID scaffold_102 ; pos 667288 to 668009)
tacaagaaagcagaagctagtttctggactggtaataatgtatatctattttacacacacacacacacaattgttgaaatgtgtgaagatgcttgcaattgtgtttttggttttttttcttatgacatcatgtgatggtgtttgatttataatacttaggcctcgtttggttggggagattagtcgcgattaactaactaatgggactttgtttgatgtttggtataccgataacttatcggttcaacccgtaaatattatgttatcgtggcttatcttgccttctaggcatgtaatacaattgggtttcattagattatttaatcttatcttggctaatcttgttttggaaaccaaacgaggtgtaaagatactattttttgatttgttattgtttgagttgataagaatttgcattagtcttgtgtgtgttggatggactaattggattgctcgttcattcatgattggatatttccgtacttgtgtactaaaatggagctgcggagttgcggtgctatgtagttatttatttacgagatcgaagattgtatacttgcgtatcgattattgtttttggatgacaagttattacattttttatcgattcttgttttggattgaacatgttcggtattttctcttccgttggtttactcttaattatgtgtgttttgaacataaatattgggtttcagccgaggaggttgacctgtcgcagg

SEQ ID NO: 101418 - DNA, 740 bp, Mimulus guttatus
  Intron number 1 from transcript mgv1a016549m (locus mgv1a0 15494m.g) derived from phytozome v7.0 (chr-ID scaffold_36; pos 777590 to 778329)
tcaaggccaagattcaggtccaatttcttccccgatttttgttttccgtgccctaattttgctgatttgattatcgttctctttttgtgggtgtcattttgtgagttttcggattattctttcatggattgtggttattaaccgagctagggttttggatttttattggatttcttgcgatgaagtagctgtgtgattgttcaatttatttttttatatatttttttaatttttgaaattgagattctgtggcatctaagcttgtttcaagttcttctttcaattttatattacctggttattttattatgaaggtcttcttctaccattttctctcaatgacttggcatgaaatccagcttgttattaattattagttgatgttctgattatcgaactcgatccatctcgaagaacctatgttacgcttccacttcttaacgtatccgttgtactttttgagagattagaaaacatgtttcgataccattctttaaatgatttaatgaacaattgcaaatcgatagttgataattatatttattttaaaaatacatcctcttgctttttgggcctttgcaacgaagattttagttttaggatgtttaacttattagtttttttttcttcgttctttccgattctcgtcttgagtaatcttatttttttttttttaactaatatgaaattacggtgttttttcaggacaaagaaggaatacctcctgaccagcagaggct

SEQ ID NO: 101419 - DNA, 631 bp, Mimulus guttatus
  Intron number 2 from transcript mgv1a012046m (locus mgv1a0 12046m.g) derived from phytozome v7.0 (chr-ID scaffold_2; pos 4091819 to 4092449 reverse strand)
gaggttttctccgagataaaccaaggtgaattgttttcacttgtcattatctctttcccctatctccctctttttgctgtgccttgttctggaattctgaacttacatgcattgctttgtttatttcttttcggattttgaatctgttttgaacttgatctttggctgagtaatgcattgatgttgcccttttggggtttatgtaagagggaatacatctgctttacgagaatgtgaatagcttgtctgcgcaatgcccacaattactgtaatgttatgatctattggtaaatacatggagcttctgttaaaattactttgaacagtgtgctgatagttctaaaatagcttatgagattgtgaaaataacgtgtgtaatacccccaaaaatttaactatagagtcgagtggagttcaacgttatgtacagagtaatgtttttgtaaaggaaattatagaggatgaggatctatttaatattcaataatatcctacgactgttaggctgaaaaagggatatttcgttacctcatagttttctttgaggatgctgagcggttcttgctttcattgttctgttttctccagttgtgtatatattgtgatgttttcttttacagtaaaatttgca

SEQ ID NO: 101420 - DNA, 413 bp, Mimulus guttatus
  Intron number 1 from transcript mgv1a018642m (locus mgv1a0 18642m.g) derived from phytozome v7.0 (chr-ID scaffold_121 ; pos 362365 to 362777 reverse strand)
tcgtcgttgatcctctgcccgaaggtgtcgatcaggttcgaaatttcttccttcgtttattttttcctacatttctttatgttgcgtttggatggaattatttggaaaaaaaaaaaattcaaatttacgataacaaatcctatgatcttgtttcgattgtttcattcaacaatagaagttgtcacattcaatcaaaaatttgtcactaatgagaattagtggttatattatgttttcaaatgactcgagcgagtcatttgaaatcattattcgccaaattattacgggaactcgtgttaagctaaatgtttgttttaaataagttaaaacaattttcttttattcgttgattaatgtaatttgcgaagatataaacagggctacgtcgttcttaatcgaccgtgggctttcgt

SEQ ID NO: 101421 - DNA, 423 bp, Mimulus guttatus
  Intron number 1 from transcript mgv1a010983m (locus mgv1a0 10983m.g) derived from phytozome v7.0 (chr-ID scaffold_24; pos 1502431 to 1502853 reverse strand)
gaaggatcggccgccgtcgaattccacagatctgtgtaagaattgtttctctttcgctaattactgcaatcggaagttcatcccgctttcgtggaattacatgctgtttttttttttggtgttttttttttttggtcaactcttttgtttctttgttttgagaaatgctgtcgttgttttctgctagaaataaaaaaaaaaaaaaaaagtgaaaaaatctgcggttatgcttatatggtttttcttttttcagtttatgtggtgtgttaattaatttgtactattttattgtcagggaagagtttgggttagttaattaacataattattgtctatttttttctgttaattttgagtttaagatttttcctgaagagtttgggaacatcatgttagacttattataccttctactttggaaag

SEQ ID NO: 101422 - DNA, 629 bp, Mimulus guttatus
  Intron number 2 from transcript mgv1a021267m (locus mgv1a0 21267m.g) derived from phytozome v7.0 (chr-ID scaffold_207 ; pos 337068 to 337696 reverse strand)
cagcgggtacgaaatatatatatataagtcgaaacataaaatatactgaaatgttaaatgttgtttcaattttacattacgcacttcgttttcaatccaaccaccaatttagttgactcgagttgggttagaaagacgattgaaagagctacaatatagctttttattccttcatgcataactttctcaggcaatatctaatttagccgattcatgctagattaaaaagttaactctaaggactgcaaattagttgctttgagttttgccaaattcgaactgaagagtcaaaatcacatttgaagtcagaataccaataaaactgaaatcatgacatttagcacttccacatttataatataaaaaaattaaatgattcacgtgactaacaccttattactttaagataacgtaaggtggtcattcagcatgataaataaacaacttaacatttcagatgacgtggtaattcatttcaacaaatgtaccgtaatgttcattccgatcgaaacgacgttcagaactgattcacctcactaacaacttaaacttttagatgaggcgccgtaacatttccttttgttttgatcgacacgcgcaggttaatagtgcaagaagaagacacacta

SEQ ID NO: 101423 - DNA, 235 bp, Mimulus guttatus
  Intron number 1 from transcript mgv1a016790m (locus mgv1a0 16790m.g) derived from phytozome v7.0 (chr-ID scaffold_18; pos 1643340 to 1643574)
tggtaattaatgcttctaattcatgtaataaatacaagaacactattttcttattgtgaataatgagtttgcagagtagttgaaattaactttaatttgatcccacacaatttaattacttcctaaacttacaaacatttataaaattgctttaaatactaactaattcttgatttcttcaacgttttgtttttccgcagactagcagtgtcgtcgtatcggaaccttcagacag

SEQ ID NO: 101424 - DNA, 562 bp, Mimulus guttatus
  Intron number 2 from transcript mgv1a001035m (locus mgv1a0 01035m.g) derived from phytozome v7.0 (chr-ID scaffold_7; pos 573561 to 574122)
atcatcctggaaaaagaatcttcttttctaatcaggtattattaattaaaatttaaaacccatttttttgtaattaatattaattttttagaggctgaaaaaagttaaaagattaaacttttagatttttttttcagaaaattaattattattattatatgttctttgaggtcatgtttaaaacgcaaaggaagtttaaagatttgatttttttgattcttagatgccttttctatttgctatttttagtgggatatgcttaaatttcttatctttggtgcactatgaaaaatattctaagcacaaagttgagatcatgatgaaagagaacaaaaaagaaagcattgtttatttagacatcatttatcacttaaaacatgggcatcttttaatttaacgaaattttaaattatcgaactagtaatttattacgtttttatcgagtcgggaccgaaaaaaatttaatttatcgaggttatacttaatatttcttgtagtaatttaataatacttattgggttttttatttatttttttgcttctcaacagccatatttgccca

SEQ ID NO: 101425 - DNA, 645 bp, Mimulus guttatus
  Intron number 1 from transcript mgv1a006525m (locus mgv1a0 06525m.g) derived from phytozome v7.0 (chr-ID scaffold_55; pos 606701 to 607345)
gaaaggtactaatgactcttggatctctcctagggcacaatcaacccatgacaatgatattgcttattttaagatgtaataaaaagcatattatattcacaaattgaatgactaaatgcaactaaactttttggaagagtgtgatatctaatcgttgattaattaatttattattggtcgattattagtttgatattttcttttgacgtagacatgaataaataattaaccaatatagtattattgttattaagtactcaattatacaaatatactataatgttagtggattatataagtattttaattattgcttggtagcataattattaaggaaaaaaatagcagtaagctttacctaaataatatttttttttaatttaaatattttcttaatccatttgtagtagataaaaaaatattaattcaatttaattagaaataagaagtgccttttgaaatttggaagtgtcaactatttgacctttgaaaaaacataaaaaaattagaaagaaaaataaaaataaaaggatcaaattgtaaataatatggatctgctaaacaaacgtagattaaatcgaggtttcttctgcggagaaaattaagacagaaaccaaacaaacccttaccaaatacacacactcc

SEQ ID NO: 101426 - DNA, 968 bp, Mimulus guttatus
  Intron number 2 from transcript mgv1a006525m (locus mgv1a0 06525m.g) derived from phytozome v7.0 (chr-ID scaffold_55; pos 607398 to 608365)
gccactgtcattcattcggaattgcgctcgtaaaggtatgttcattcttcttactcctttccttttcgtaatttacgaaacccaattttttctgaaattttttttttcgaaatggggtttcgatttgatcgattttagctcgtagatctgttgcattataacgggattgggaaatactggttagatgagaatacttaaactttgatttagatggtaatttagttcttggtttatctaattttttattttttatttttcccccaatttgagttattaattttttcaggtgctgttgaaagtagaaatgttgttagttttgttcatcttcttcgcttattgatgtaaaccaaacataatagatctaattctgcggtcgatttttcgtttatcctgttgacaatttatctgtgttttgcatcatagattctttaaatattcgtgttggatcgtaatatatatcattctttttttctttacgattaattattatatcgataaattggagtgtggtgtgataattatttctttcaagctacaattgaggcctcaaaacctcgaaactgcaggagatccgattctcaatcgacttattcgattatgtgtggaagtatacttgactataaagtagttgtaggtagcatttttaagcatgcccttttttcgtgttgtaaacattcggatctcgtgtatgtttgtccatgtaacacaaggatgttgacaaaaaaagttcgctcgtatctagagtgataatagacctttgtgttgactttagtcaactgcataataatagcccttgttggagtaatatctatttgcttttcgacacccttcaagtattattcatgatcgtttgacgtatttttggttcgttttagggtttgtcttttgttgatcgtttctgttcgttgtccacaatcggtcaattttttttcttttttttttttccctgtgcaggttgggtttacaaa

SEQ ID NO: 101427 - DNA, 376 bp, Mimulus guttatus
  Intron number 1 from transcript mgv11b015538m (locus mgv11 b015538m.g) derived from phytozome v7.0 (chr-ID scaffold_7 1; pos 929929 to 930304 reverse strand)
ctgctaggaaaaacaggtgtgttcgtgtgtctcactcgcgcgcgggttctccgatttttcttcattttttgttctgttaaatgacagaattgcccctaccatctttttttttttgttttttttttctgttttttttttgaataattttatactagtttttgcattttctctgttttaaatttattaaattataaataattataaataaatatttggtacttacaaaaatatgaaataatgaaatacataatatgttttttttagaaaattacaattcagtcccctggcttattttattaagtttttcaaacttcaatttggtcccctaatttttttcgcagaaacacggtacttcggtccatttacaaccggtcaa

SEQ ID NO: 101428 - DNA, 909 bp, Mimulus guttatus
  Intron number 1 from transcript mgv1a011928m (locus mgv1a0 11928m.g) derived from phytozome v7.0 (chr-ID scaffold_12; pos 995185 to 996093 reverse strand)
gtttctcttccccaggtcacttttggacccaaaaggtttcttcttttcttttcttttttttgcattttatttctgtatttaattattagctgtttcaggtgcttggtttatgcaatttgttgtgatcttacatcttattagtgttagaggaagacgaatgggtattatttttaggttttgattttgctacttcaatggaatttatattttgctttttagaatacacacggttaggggtgtgaagtgtgaacgagccgagttcgcctattttggttggctagagctcgactatttgtactcgagttcgagcttgcatgagtttcggtgagatcgagctcgagtcgactcgagctttaaataataaaaataataataagtttattgtgaaatatataaaaaaaaataaaaataaaaaaattaaataagtagctcgcgagctgtcgaacaactataattgggctcgaactcgagttcgtccgaagctcgggcttgaaaaacccgagcacgagttcgagcttttgtcgagccaactcatcgaggtcacgagccggcttagctcgtttaccaccctgacacgggtatggttttgattttgtttgcgttaatggaattatatcgtattctttttatttatttaggtatatatgcgtatgtgatgacatatttgatttgggttggttggctcaccgccgggcagttgtttatgctttgatgttccccgatatatttctgattcattgcatttggatgatgtttctcaaatgttttatgttacttccttaacttaggctaatacaaattacgatttctttacagttgtttgtggcactataacgtacactgaatattagtgagaattgagaaatctttgtttgtttgtttgtttgtttatttgtttgttacaatcag

SEQ ID NO: 101429 - DNA, 748 bp, Mimulus guttatus
  Intron number 1 from transcript mgv1a010926m (locus mgv1a0 10926m.g) derived from phytozome v7.0 (chr-ID scaffold_190 ; pos 92223 to 92970 reverse strand)
cttcttccccactgcgaccactcctccatcaccaggtcacttcatcttgttttctcatcttaattttaccagatttttttttttctttattttttttgaagtgagaaatcaagaaacagttgagttctaagaagttcattaatgtacatatgcaagcacaagtgtgtcctctttgttaggctttaataaataaaagagggtaaggtaaggttaaaacaaaaaaaactcctcatgtttgggtaattgcagcgacctccctcaactatgaatcttcttacaagttcagttcacctttgcggtgtcaaatttagttgaatcttctaaattatgtggaatattctccagtttgcacccgtttcacctcattcgagctccacatttcataagatgtgccttttgacttgtaaatatgtgcttcagaaaatgcatttttgcacaaaacgagtagaaattagagaacattccacgaaaactagaagattatgttgaatttaacaccctaagggttgacgtgtaagaaaacttatagttgagaggatggttgtaattacctaaacatgaagggatttttcataatttgatcttacctcagggatggccgtaatttacccaataaaaaaatcagtttctatgttgttgtcaagtgtgagaaaagctcatttcttttgtgaataaatctgatgattgatttgagttgcattgattgaatttaggtttgtgaaattggaggatagaaaacgggcacttg

SEQ ID NO: 101430 - DNA, 821 bp, Mimulus guttatus
  Intron number 1 from transcript mgv1a010719m (locus mgv1a0 10719m.g) derived from phytozome v7.0 (chr-ID scaffold_7; pos 2095643 to 2096463 reverse strand)
tggtccgataacggaaatccgactttttggtacgcttcttcatcatcatcccattaataaccacctacagttgaacctcgaaaaattaataatctcgcttaaataatagtttcttctggttcagattcggtaataacctactaaattattagttcgataatttaatatttcgctaaattaatagaattttgttagtcccgactgtattaatttatagaggtttaactgtactttatttccttctcctattaattcaataactagctctagctggtttaatttaattgtgtgtggcagtgtgctatattccatgatcgcttaaataattacataaaacgaattacataatacattcagtaagttagatgttacaactgattatttacatcaagtggatttgaaccttctatgtgattagataactactcactaagcacataacacacggcccaattcacggagtttttgttggggggctggggttcggaggcaatgcccttgattttttttttaattactttaggaagcaaaaataattctaaaggttacttaataatacaagcatatattatgcttgtacaagcatatattatcacacacacttatgagtgtgtgtgattgtgtacagatgtacggttcaaactaatcggtcggggctaatttaataacatgtttggttaatatactataactaattaattgaacaattacatcttgtacggtatctatttagccctttttctttctttttcttttgatatttttttatcttggtttattgacaagcgagagcataagatcgatttcggaggagttactcg

SEQ ID NO: 101431 - DNA, 578 bp, Mimulus guttatus
  Intron number 1 from transcript mgv1a002237m (locus mgv1a0 02237m.g) derived from phytozome v7.0 (chr-ID scaffold_12; pos 1073105 to 1073682)
cgatccgtttttcccttaacaaacttacaaattgggtatattttattggaatcttatggactcttttcattttttaatgcatcagaagcatgtgctttgtttttgtttttttgttaatgatctgagtatgcatgttcttgtttgttaggctcgcatgtgttagatgttttttattgtaagttcacctttgaaagttcctttcaaactccgattttgtgttcatcgattttgctgtatgaagaatttaatcttacctcttttaacctaaaacggatatacactaattttgtgtgtttattttttccatttggtgataaaaataattgtaaaattcaagtatacatattttcaacaggcgacgatgcgtttttttgtaaaatctcagattttacgaaaacaattgcggattcatgaataccttgccagatttttatcctttgtctaaaatatgatttttcctgtgtctaaatttgatgttagagatcattactcgatgttggacgcttagtttgattaatcatggtgatgtttatctgttatcagggatttgcagtcatatctttcacatctcagcctgt

SEQ ID NO: 101432 - DNA, 610 bp, Mimulus guttatus
  Intron number 1 from transcript mgv1a004972m (locus mgv1a0 04972m.g) derived from phytozome v7.0 (chr-ID scaffold_45; pos 1084596 to 1085205)
acacaaagttgctcgactttctttagagggtccatgtattttaacaagtttacctcattcattcaaaatactgtactgatggaaattcttccttatataaaagatttacgttcgtactcaaaacaaaaaaaagtgtcccgtgtatcgcacgagtatatagttactagtatattaaaaaaatatggaaaacatatattggaaaaaaaacctcaatttaaataattaataatattccaaaaatttcgaactaaaatcttcaaaagttgaaatttcagtccggatttcggaactcataacacattgtcctaattttctttagtatgatatgctctttcatttccaaaattttcaaggaaactactaaatctaatatataattttaattgttatattatatagaaatctaaattaatatatggttaaaaaaaaaaaactttttattttgttaaataagaaaggggcagaaaataagaaacaaatagagaaaggggcagaaaataaataaataaagtcaaaacccaaaaaaaatctgcaaataaataaaacagagaaattatctatccctatatacaaaggcacagcccctcaaaccccaaaaaccctcaccact

SEQ ID NO: 101433 - DNA, 864 bp, Mimulus guttatus
  Intron number 2 from transcript mgv1a016746m (locus mgv1a0 16746m.g) derived from phytozome v7.0 (chr-ID scaffold_384 ; pos 100591 to 101454 reverse strand)
aaatatcactaagagaagaaagcgtcaaagagaaggtaattgcattcatctttcggttgattattcagtaacgaattttcgttatatatcgatttctttgtcaaaattattttgtgtaaatagctcaagattttttgcttgttttttacattgtacatgtgtttcgacgagattaaacttgagagatttgtttactaccaaagcaacttcttttgtctacgtttctagttcagttatatgcaaatgtttctattgatgctcgtgtactttatgtactgtctgtattggcaaacgatgtagtgttgtgtaagttagttttaagatttgcctcagatgttgcacatagcaaaactctcgtaccatgttcatgtgttctgatgctacatagctcaatacgtaaccttaatttttctcgtttctttagttgctgcactagttttttaatttgttgaatgtacttacatacgagaattttttttaaagttttttgggtttctgtaaactgaccgtatcttcgaatattgcaacacttgaagatggtatcaaaaaaattagtcttcaaataatccgagatattaagttcttcattgtcctaatatctcctttcgtatttagttctacattgacactgaacttgtctcttatgacgtgctatcattttagtaataatagtatatttggctcccccgaaaacaaaattgcggtatacgccactggatatgatcttgtgaagaatctgtctatgttttatattttaacattacgaaagcagaaattttacatgtactactattcttatatttgtatattttacgttggttatgtacagattatcttgtcgcaagaaaagaagctccagacatt

SEQ ID NO: 101434 - DNA, 870 bp, Mimulus guttatus
  Intron number 1 from transcript mgv1a012531m (locus mgv1a0 12548m.g) derived from phytozome v7.0 (chr-ID scaffold_245 ; pos 39703 to 40572)
cggagtttggccgcattctaaacatcggaaactaggttacgctctcatcatttcaattgattttctttgtttttattgtgtaatttcatgcttcttactgctgcttgttttttccgttcattatgtgaaaaatattgcatttttttttttctttgggtgaatttcttgcgtttggtggagctactgtgactgttacaagctgaatgtatagacagggaagatgattaagaatatgagagttggaatttacctaattttgaaacctcccaaactgaaaatacacgaaacgtcgaatgggttcgtaacacattgattaaattgggagttagagaagatagcggaacaaaggagaaccgagtgaacaagattaagcaaaaatatgtctgctttctgcattcactttgtaccccttttcgtcatgttaattttcaggcaaatgtctggtagtaccgacattatacgattgcctacgcacgtatggaagtactctggtactccttatatattgtttgttttaaaatggcaaaattgcattttaatttcttgttaatgaccatctcatttgcctgtgttgtcagaatcgattttctttgtatattatgatatgtatgttaaaagataaatgatcgtgccctctgctctatgagaattatacgaaatgatttcattttatttaattcaaatatcttgcaaaccgaggaagctgttggtattggttgttcatacaattagataatgtagtttgctgggctaaaattacgccacgattggcatcaattattagttattatggtttaaatatcaatctttgatttggtttgtaacaatggtgcagatgtttgcagttcttctttaactagctgtgggatt

SEQ ID NO: 101435 - DNA, 596 bp, Mimulus guttatus
  Intron number 3 from transcript mgv1a011144m (locus mgv1a0 11144m.g) derived from phytozome v7.0 (chr-ID scaffold_17; pos 2362272 to 2362867 reverse strand)
tggctggtggaacaggtgatcttttagtgtggtggtatcttgtttgatgattagaatattgctagcatgaagataatgtcaaagtgttcactgtatataagaacgagatcgagttttctatctagaattctgatcaactagttgcttaatagaaaagtcccgtgttgctgctaaatatggtttacattttttttggaaactatttcagtttctttaaggccctatgagaggaactgtaaaagtcatgagctacattcttgagacttcttttccgagattgaacgagttatgaatgaaccacaaaaggataaaatgctaactatatgcatatcctcaaatgaaattctaaagcgaatttatattgcaagttgcttgtcattcttgttctggatggaatatgcatctgatatggagcaagttgatcttaacgtttaatatccgacttttttgttgagaaataatattatccactcttgtcgggctttgtcttagcgaagataaaactagtttcttgtttaaattctcttttgaccatgaactctgtttagttgtcttattatttacttggataaagagcctctcttattttacagggg

SEQ ID NO: 101436 - DNA, 469 bp, Mimulus guttatus
  Intron number 2 from transcript mgv1a003671m (locus mgv1a0 03688m.g) derived from phytozome v7.0 (chr-ID scaffold_3; pos 3479063 to 3479531 reverse strand)
agagaaactgctccaaaactcgcttccaaggtaaaatctttttcattccgaactgtgaaaaatctgattttcgacgtttccgacaaattttttttatcggaattggaatatatatatatgggattccaatttctaatccgattttaaaatttgaaaatattccaaaagatccgattcttttctgaaaattacacttataatttaaatattataaaaaaaaaattgaatttttgaatttctccgattcaggtccgaaatttttcgattttggagcaaatttttttcttccaatttccgattttttctgattttttccgatttcttttgaatgaaactgtaattaatttttcacttaaaaaaaaattggatttttttcaggctaattgcaatctgatctatcgggtttctaccctgaatttcgatgaacatagtctcaaaagctcgtttgttttttttttcattgcagaac

SEQ ID NO: 101437 - DNA, 662 bp, Mimulus guttatus
  Intron number 1 from transcript mgv1a001113m (locus mgv1a0 01113m.g) derived from phytozome v7.0 (chr-ID scaffold_13; pos 2563288 to 2563949 reverse strand)
agagatttgtttttcaagcagctgttcaggtacttgtttgtgtgtgtctttggtttttgtgttcattggggactgacctcaatcacgtattctgttctcaaatgagatttcgttgatagattttgatttaactgagtttatgtttgcaaattaccattatttttttagaggttttgatttccttctcatgtttcttggaaggattagactttcttgttattcctctaatcttgatggtaccttgagaagtcaaaaggatttaaagtattgcccattgtatcttctaaaatcaatgttttgaggttcctctccaaattgaacgatttcgaccttctaagtagagacatgtggctctctttacctgtattcttcgacaacaacactgatttactagcaagtaaatttactttagaaaattatttttctgttatcgcctgttgctcctgagaatgatcactatgtttttactgacagttcactgtctcccaacttttatgaattctctttaaaaaagttatcattgcttgctattaacctagttccaaacatgtttctgttagtcaacccaaggtcgaattatgaatacaagaataagtgtgtatcaaagttattgtacttttcctgcaggatcttcatcaacccaaggtcgaagctcgattacc

SEQ ID NO: 101438 - DNA, 447 bp, Mimulus guttatus
  Intron number 1 from transcript mgv1a025296m (locus mgv1a0 25296m.g) derived from phytozome v7.0 (chr-ID scaffold_349 ; pos 101801 to 102247 reverse strand)
ccgactccatccgccgcctcttctcgactcaatcggttcgactcctccgcctctctatttcaattttttttcttcttcttaattaatttacgagattccagtttaatttgcatctgcgacgagctcatctcgaaaagttgttgcctgtgtgcttcgatttgatttgatttgatttggtttggtttttcgtctaattggttgattttgattgtttttgttagcttgatgggactaggtctttgaaattgaatatgtttgttcatgagacgaaaatcatggggttccgtgactgtggctgttgatcttttgatttttgttttctgatcttattgatgtatttgggtttcgattttctaaagtgctgaattatccgtgttttaaatttgatgcgtttttattttcgttattaattgtctttatttattaatcctattgggtttgaataga

SEQ ID NO: 101439 - DNA, 903 bp, Mimulus guttatus
  Intron number 1 from transcript mgv1a023841m (locus mgv1a0 23841m.g) derived from phytozome v7.0 (chr-ID scaffold_126 ; pos 72911 to 73813 reverse strand)
ctggaaagtaacgtccaggtatgaattagtatctttcacattactgattttgtttgattttaaagtagctaaccagcctgaaataagagtcctgtccgagaattttgtatattctgagttatttaacagatgaaaactactattttggttaccctatttctgccgatatttattcaacttgagttatcctaaattcttatacccatggtatgaattggttgtgattaattagattagaagatgtttctgtactacacttcatggcttatatggttatttgttaactggaagaaaacatatggatatgttggtgtgaggtataatcaaatgatttaatgtgctaaatacgtaaataaggcctcactaaccaaatatattgaaaataaactgtatttaaagaatctcaaaataagacagctgcccgtttatttggtttatgtgggttcttagagataatatattagtctacttctttctaacctaatttttgaagttctttgccttcaaaccttgtagttcccacttcacaattctatcttgagaaatttgtaccagttaattgatttacgttttttctctgttcctagtatgtatatcatgttagttacatgtaaagtttaaaaatcattctccatgatgttccttcgaaatatttccttattttgaacttcaaaatgttttttttggattgttattttatgcttgtgctaggtagttaaaattaatgtgttggactaatcttgggttcttatatgttccgttttgaatttcaatctatgttcattttattttttaatctatctttgggtaacacagattataatctatgtctgagatcctatattgacttctttgttattggatgcagcctgtaaaaagtcctgtgacaatttgtggtgatat

SEQ ID NO: 101440 - DNA, 770 bp, Mimulus guttatus
  Intron number 4 from transcript mgv1a010258m (locus mgv1a0 10258m.g) derived from phytozome v7.0 (chr-ID scaffold_1; pos 3770015 to 3770784)
gcattcaggtatatctttcaatgattatggttttaactgctacttcctctgataactctgagaggcaaaagctagtgatcggttgggtctgaatccgtgttagtcaaaattttatcacacatccaatttaatgaatacaaaatttgagggcagtcaccgtcttgttttattacgtcattgtagttcaaatatctgtgggagtacgatagtagttatatgattcagttcacattagtgtggtgaactaggttttcatattaaattcgtggctttgcctgatttgttttgttcatgtttgtaagtttcgtctctctgctgcctggaaatattgttgttaataccttttcttgttataaatttatgacattggttgtaatttagccctatgttttttgctattacagtttaatgatattttttctagtatttgttatgtcttctaaagaaataaagacaaaggaaattgtatcaacctcttgaattaaatattgaaattggagcgacttgactatcctatgaatgaaatgcaaggttatgataagaaaattaataccatttacttaaatgttggaattcttagtagcaaagaatatgcgggttcgtcaagcctttttcctgccgatacattctttcatttgattgtgtagaaggcccttatggttatagttgaccttagttgcaaccagtgatagtcattttctgactcattttttgaatttctaacctcatcctgtgttttttgctttttcagagacgaagaactgcagttg

SEQ ID NO: 101441 - DNA, 867 bp, Mimulus guttatus
  Intron number 1 from transcript mgv1a002766m (locus mgv1a0 02766m.g) derived from phytozome v7.0 (chr-ID scaffold_181 ; pos 328845 to 329711)
ctccagtttatctcccgccggcgacgtcgttagaggtcagtacattttagggtttatttaatttgtggattagtcgaagttcaattttgactgtgaatccgtgtgtgtatatgtattcgaacaagcatctattgaatgaatattggtttttgatgtgtgattagttgttctggttaatgaaatttaattgtaaatttgaaggagggatttattgtgtgtgaatggatgatttattgtgaggacaatgcattataagtcaaagcacttctattggttgatctctcagtttctgatctcgagattttcgaattataactcggaggaaagcatttaatcgagttcgcaattgatctcacaatttaagcaaatgaaattttagttccttgaacttttatgaaacatttaatttatggtgtttgattgtctttatgttcatttagtgtggctcgttagccgtcattattatgatcggtagtttgagaaacccgcgtaaaataagactcgagttagcaattgtctcgacgatagggttaattagtagtactttttaagcataaatctgtttcttgaatctatattttgaacatatgtttcgatccatgctgtaagattatttcgttgttgtatgcaagtacgtatgcggtccttcaaattaatcaaatgttgtttgttagtcttgatcgaagcagccagtttctgatattgtttttcaatttcatttattacgtgcgacaaaatagtttctgttatttcgatttttcgataacaagggtggatataaaatcaattcatgcctcatttatttgtatctcttctcttaacttttttgtcgcttttatattattgaagcaagttcaccgtccttca

SEQ ID NO: 101442 - DNA, 606 bp, Mimulus guttatus
  Intron number 1 from transcript mgv1a011665m (locus mgv1a0 07515m.g) derived from phytozome v7.0 (chr-ID scaffold_58; pos 507929 to 508534)
tactttatctttccaagacattgaagctaattttggtaagtttgatttgttcttctttatctgttggtgctgaacgaattttttatttgcgaacagattttaatccagatgggtctttgaattgctggactgaatcgtaccttttcttttttggccctttttattattttggtttaatttgatctaataattactctgtttgtcgagagttgcttacttaagtaatctatgctagtttaggcttttctttatctatgaaggaaaatttagctagaaagtggactagctaattggagtgattgagttgcctggattaattttttcttgaggatttttttttatttagcttattagtttctgaatacaacaatgtaagaaattacatatggatcggaagttacagctcggattcatttcactctttttatgctgtcttagtaatcaatttaatggtgtttgtgtgtgtgtgtgtgtgtgcacgcctatatcttctgagagttgtcccttaataataagataacagttatggagcaaatattgtgtgtcggtttgtgttcatgagcaattagtgataatagtctgttgtggtttcagcaccatcagtga

SEQ ID NO: 101443 - DNA, 1021 bp, Mimulus guttatus
  Intron number 1 from transcript mgv1a009709m (locus mgv1a0 09719m.g) derived from phytozome v7.0 (chr-ID scaffold_3; pos 3018646 to 3019666 reverse strand)
ttcatagcaaataagtaagtatcgattatgtggccttggtgattgttttttttggtgctctgaatttaatgttcgtgtcactgttttcagatcatgcaaaatataggtcgggcgaaagaccacattttttagtaatctcgattgcattgatagttatcttgatcgctaattttgcgtgcttgagttgattatttagctttgtgggggcgttggatggtaatttggacacgttgcatttaattaaattgaatagacataagtagaacgaatctatagttatatccgggtgggctcgtgatttgtataattttgtaggggtatttttgtaattcgagtcataaatacgtaagagttcttcctacgagtgtagacgaaatagccacgtgggaaaaaaaatgccgtcttatactttttgtgcacccttaaatacatttccatctctataagctagaagagcttgttttatataaagacgacctcacttcatattatatatttggaaaaaaaataaaaaggaaattaatttgttcgtattatgtgtttctagatcaatacaaatataagtcgggaaataccacatttattgctatcttgatcgcggtttttgatattcgacttgacatttttactttcgtaatgttgcatttgattaagttgcatagacataagtagaataaatcgataatttatatccgatggagtcttcttcttcattagacagatgaagcaacttcgtagggcaactgcatgtgatggatgagtactcgtaaccttgaaaattttgtaggggtattttagtaattctgttgtatttgtgtttccaccctttactacattttcatctttattgatataacctcacttcatattatatattaggaaaacaaaaaactcatctttttgttacttgacgccgacgattaattttttttttccttcatttattcatcatttctaacaattattcgtctttttttttttgcaagtgctcaatctttacgaacattgcgagtgccgaggt

SEQ ID NO: 101444 - DNA, 548 bp, Mimulus guttatus
  Intron number 2 from transcript mgv1a010158m (locus mgv1a0 09717m.g) derived from phytozome v7.0 (chr-ID scaffold_77; pos 860751 to 861298 reverse strand)
cttgcggcttccacaattattcttcacgtttgcaggtcagatcaactataatatgtaggatttatagatgaatttttgttttcttcttcttagaatatgtttattggttgcaatgggctgctagtattatcaaatataagaacaaaaatatgatcaaaagtttgtcttggggcgcttgatcattatttaataatcatatgttcaagtattgatctgattcggtttgttgggggtttccttgatatgtacttggtcatttaaaatggtgtacaaatggaaacttttgcagttgaacttgttgtcagaacaaatattatgagtagtctgaccaagaacttgtattcgcggtcaacgtatatctctgctgttcggctttttttgtggtgttcgaagttgggtgctccagtttaactttgagtacctgagattccaaattctctaccttcactttggttttgcttttcgaaaacttagagtgctatatttttatatattcccattaaatcataaatgtctttgcttgtttcaattgcagtgcaaaaagtgta

SEQ ID NO: 101445 - DNA, 832 bp, Mimulus guttatus
  Intron number 1 from transcript mgv1a007395m (locus mgv1a0 07395m.g) derived from phytozome v7.0 (chr-ID scaffold_1; pos 4734973 to 4735804 reverse strand)
actaaggagagttgagtaatccattgatctaaccggtacagctacaaatcccgagcttccagttttattaaatttatttttttaatttaacaagatgaagaagtttgccttctttatttccactctaattgtacttttttttttgtttctttaaattgtttggttttgaagtttgttcagagggttgggttaattgctgttaaacccttttacattttcttttgttgttctggggtttgttttctcatttttgttggaatttgcgcatcacatcgacaaattagccacttgattacgttttgatttggaaataatccatcttgatggttattcttttctctttttgtttcaatttttaggatatgattgatctttgtggactagattttacttcccagatctcgttctaatcatttctctaattattattattttgtgttattattattattattgttgttgttgttatatatttctgggtgcgcttataataattgcctggaattttgtgtactgtaggtttaccttttgttttataattttgaaaaattttagcaatctatttttcaatttaggacaagtgattattatgcaaatatgcattcaatgctaaattaactgttaattgctccaagaattgcctttcgaacaatttacacttgtcaattgcataatatgaatctcgtagttggttgtaatgttgcttgatacaaccagatgcattttcatggatttattgtagtaagtgcttttgtgaaaggcatctctgttttaactgtaccttgaatttattgcaggtaggttctgaatttatctattagagtttgtagaa

SEQ ID NO: 101446 - DNA, 760 bp, Mimulus guttatus
  Intron number 1 from transcript mgv1a012436m (locus mgv1a0 12447m.g) derived from phytozome v7.0 (chr-ID scaffold_20; pos 315108 to 315867)
aagcggcgattgaaatttgagtttttgaatttaaggtaaatgaattgagtgaatgttccttactttggattttgggcagttgcaagtttgagtttgttccctttgggcattgatttcacacttctgaagttgtattttctaaatttattcccaagcaatcatttttctaaatctgcttttttttttcttttgtctctctgaagttttgtgaataaattttgttttgttgatatggtgtttgtgatttagccccttttggatttatttatattagaaaaggctgtggatgaattatttgcagaaattgtttattgtgcatgctaggtgtttgatgaattgatttgtggtattattattgtaaaaagtccatcttggcaaatcagttgagcccttttaagggcaaatgagctgctttgaatgctaatggactaatattaaatctctctctttctcttaactattttccgcttcttcaaatctgttaagtttgcatattagtggagatgaagcatattaaaaaaaatattgaatagttgtttgttgaaattgtgaatcttttgtatgcaaggtgtttgatgaattgatttttttgtgtcaaatttatttttttctactccatctaggcaagtagttgagcccttgcaaatgagctgcttttgaatgctaatggacttacagctaaatcatctcttcatttttgttcctcaccactcaccggaacacagttaccggtaaccgccgccggctcgcatcgacacca

SEQ ID NO: 101447 - DNA, 913 bp, Mimulus guttatus
  Intron number 2 from transcript mgv1a012436m (locus mgv1a0 12447m.g) derived from phytozome v7.0 (chr-ID scaffold_20; pos 315981 to 316893)
cagcggcaattgaaatttgagtcttcaattttaaggtaaatggatttgatcgcacatttacgatctaaaattgagtgaatgttccttacactgggttttgggcagttgcgagttgagtttgttcccttcgggcatcgatttctaaatttattcccaagcaatcatttttctctgtggtggatttgaataattggagttgttgatgtgaactgagtagtatagcccagctagatggtattgccatcggaagtggcccggagttgtgcattcatatggaattaagttttagattagattacagcattctacgatagattaagatcggtgggataaccttctcaatctgggcaggttgttttattctacgtaaatgcgggcagctcgttttttagtttaacattggttttttttgggacatgtttttttatgtgttaggagatgttttcagtgtattcaaacgtctaatttggcgtgctattaattttacaattacaatatatgtaaaatattgcaattttatgatccgattattgaaccctctctctggttttactcaaagtctcgactttgtgtaccttgcgtgcgaatcaaatgaattcttcttcattttcttgacatttgtgcttgatggctagagcctatagttgttgccttgttggtaaattacgatattttttatctcccttaatggtgtctttgatctggcattgtttgacgaatgaaatggtcgctcgggtcccacttttcgagttactatctcgtcaactctctttcgtctaaaaaaattcttctcttttctctcttgtgatatgattatgtcaaagcttaatatccatggtggacgaggaaaacaggtgtttgtcttaatactttgtatctacttttcgtcttatcgttttctatggaacagata

SEQ ID NO: 101448 - DNA, 290 bp, Mimulus guttatus
  Intron number 1 from transcript mgv1a008697m (locus mgv1a0 06907m.g) derived from phytozome v7.0 (chr-ID scaffold_81; pos 267427 to 267716)
gcgagcccagattctcataattaattcttggtaaggattccaacttccatgcctataaattatgtttagtagtatgtttttttttcttgcaagaagattcggtttttgggttcttgaaaaaattgagggtttttaatttaatatatatataaatggtgatgggattttggtgtgggattgttgctgctgtgtttttggtcttcttgggcaaatgggatttagttgttgttgagggttttgaatttaatggtacagatttttctttgttggaatctctttcgtatctggaa

SEQ ID NO: 101449 - DNA, 620 bp, Mimulus guttatus
  Intron number 2 from transcript mgv1a008697m (locus mgv1a0 06907m.g) derived from phytozome v7.0 (chr-ID scaffold_81; pos 267773 to 268392)
tactcttgttcagggagctgctgctaaaggagctggtactctctctctctctctctctctctgaatctctctctctctctctctctctctctctctctctctctctctctcacacacacacacacacacacacacacacacacacacgcagaaggtgtgttttgtaatggaattggaaatgcagttcattgtttgctttgattgaatttcagttcctctctctgaatctctctctctctcacacacacacacacacacacacacacagaagatgtgtttttgtgaatggaattggaaatgcagttcattgtttactttgattgaatatctcagtccccctttaattgtttgctgatttgaatttgattattatgacgtcacttgttttttctgcccccatcttttgattaaattcatctctgccattttcatttgaacttctgcctaaacaacatttctaaattcaattacgatttctccttccgtaacgaaatctttcgattgttaatcatgtgtactacttactttgtagttaccttaaaaggtaataataaataaataaataaatatcttctttataattcgactcttaggaaatatatctcgaacttttttgcagt

SEQ ID NO: 101450 - DNA, 549 bp, Mimulus guttatus
  Intron number 1 from transcript mgv1a010262m (locus mgv1a0 10262m.g) derived from phytozome v7.0 (chr-ID scaffold_251 ; pos 82988 to 83536 reverse strand)
tgaaggccgttggaactctctttctcgttgcgccggttcgtatatatattatgttttctctatatctcttttttttttttaattaattactcatatctatatatatgtaatatatgtttcaaattaaacgtcgctttaatttgatttatattatttttatttcatattatctgaatcggaggtacggtagtatatactaaatatagatacatgatttggcgtgggaattttaaagaagaaaagttatttaaagatgatgatcatcttttatttaatttttccaagatacatatggccggatgatttatttagtccaatgtccgtacaagaaaagaatataaattaaaggtgtttgtgtgtgtgttgagagtatcgtgtgaaactttaccacttaaaagttttattattttttttcttttttctaatatttaataattgttattgttattaggtgatgaaattaaataattaattaaagagaataatgaaatgtaataaaaatgaactactgcagggttaaagagaacagggaagagctgcagattaaga

SEQ ID NO: 101451 - DNA, 806 bp, Mimulus guttatus
  Intron number 1 from transcript mgv1a015955m (locus mgv1a0 15955m.g) derived from phytozome v7.0 (chr-ID scaffold_44; pos 875256 to 876061)
gttttctgattgaagctagagcacgttcaaaagtgagtctccgtcttcctgtttattttattctcctgctttccttcatcattcgattttgatttttgttgctttcgatgcgattgatctgatttttttgtttttaattgtgttttgatttttgtttgatcagcagttaaatttagtttactcgtttcaactgatccgtaattgactcggtttcatttctatggtgctgtttgctgttgattttctgtactgagtttcagaaaattttgaaccgagttatttccccatttttttcaattattgtccgcagaacaattaagctaaatgtgcggtatgtgattactcgttcatgtttaacatgaattttctgattcgaagactattcttcaattttttaagtcttttcaaccatgttgttcaacagctttaagcaaagatttcgattcaattattgatcatgattagcttcgcaaatagatgagatttcgaattcgaattcgaatattgatcaggaattggctttaagatttttcatatctttttctgtgtgtgtgttcgtacgcacatgaactgttcgatgatattcctaaaagtcgattagtttgtaggtgggggctagaagaatgtaagggtatgtgttactgaatgtgaatcatgttacatcatttgataagctgtttagtccatgtttctttgattgctatcatttcggtttggggttctctgttttgattgtttcgtggcagtaaaacttttcgctctgttattcgaatgaaattcttatgttcttatatatatgtaggcaa

SEQ ID NO: 101452 - DNA, 387 bp, Mimulus guttatus
  Intron number 1 from transcript mgv1a008557m (locus mgv1a0 08557m.g) derived from phytozome v7.0 (chr-ID scaffold_211 ; pos 227653 to 228039)
gagctgcaggtataaaaattctatttacgattattcgagattcagtatattgtttcttctatgtttagctaaacggcaaagaagggagctaaatgaaattaatcgctattttatatttgctgattttagatcgagtttcgtaaatcgatgtcattgccgtaggcttgtattgtaactgatttcgcatgttgtcataaatatatgtatgcataacaagattattattatgatatttcttttttttgtcttttgagttcttgattgctcctgttcttcgatctaaatagataattatatcattctaagtcttttattttttcgataaatcatgatatatttctgtaaaaaacagaactgcatcaatacggtggaggaccgttggattcg

SEQ ID NO: 101453 - DNA, 921 bp, Mimulus guttatus
  Intron number 1 from transcript mgv1a016523m (locus mgv1a0 16523m.g) derived from phytozome v7.0 (chr-ID scaffold_2; pos 4506327 to 4507247)
tttgggtccccatatccagactcgagacccgacgggtacaccgcaattaaaaaaaaattgaaaaattcggttgagacccagacccggccccatctccccgcgggttagttttggcgtcccggagcctgacccgccccatggccgtgtctaggcccaatggatactactatggccccctaacaatgaagaggaaaagttggagaaatctcagtccattctcgagtcactagccctaaattttatgactgttttatgattttatttattattttaagatattaataattattaattacagctaaaattaatatctggctctatgattaataaaatggcccagtatgaaattgggccggcccaaaaagaaatgggcttactttctgcataagaagtgtgaagtaatgatgacgtaagcatgtggtcatgtttataccacaaatggaaattcaattccaaaatttatgtaaaaccattatagcagcacaattgacatccatagttatgcaaacctcagaacactcatcactgaactcacacaggatcgaaattataccaacttcctatcaaagaatcgaaaatcgttgtttagaacaaactagatagacaagtataacgtcacataaataaccttaccttaaaaaacgacatcttaaaagattgctgcaaacgaaaacggaatctagaacaacaattatacaacgcgtatcaatttgacaccctagttatcttaaaacagaggaagttcgacttctacttcacataaacgaaacattcacattataccgcgcgaatcaaggttaagttaatccaagtacgcaaatcaaagggacaacctaaacgaacaaacaacatttcatagcaaaaacatcttaacaaacacgacgagtctcgcaataatacaacatttccaaacttcaccaa

SEQ ID NO: 101454 - DNA, 740 bp, Mimulus guttatus
  Intron number 2 from transcript mgv1a012424m (locus mgv1a0 12399m.g) derived from phytozome v7.0 (chr-ID scaffold_2; pos 1643392 to 1644131 reverse strand)
ctccgccttgcgtaagttttcctcaatttttttttgatactgtttaaccattgattggataaaatgttgtaaactaatcatcattttcacatccgttgatttttctttttctattccgccattagatctgggaaaatattgatatattattgcgcggatcagtccatggcttcaatttattttaaatacacagacacttgcaatttagataataaatcgtaaaaataaaatattaaaaaactgtgaacgagagaaaaattcaacgatcgaattgatgtgatttttgtataagtctaagtgttatatccgtttcctatacatgaatgttacacttgacctgaacagaggtgaaactactgctgatgagtaatatataaggctatgaggttaacttggatctgtttattagcctgtgttacgattaaaatattcaaagtacttgtatcaattaagttgttccggttattttgccaagtttagttaagtcttccttttggtaattacgttaaagttatctaggagttttatttgtccttgcgatgagccatcgagcctggtcttcaaacatgtggttagattgatattgatgatttcagtgctatttatcttttttgggttatagactggtgcaactaaggcatataattcttctttaattgtattgaatcatattccaagtgagttgattgtgctccaatcttgatttttaatccttaaaatatgatgttttgtgattgcag

SEQ ID NO: 101455 - DNA, 735 bp, Mimulus guttatus
  Intron number 3 from transcript mgv1a012781m (locus mgv1a0 12781m.g) derived from phytozome v7.0 (chr-ID scaffold_11; pos 2507314 to 2508048 reverse strand)
aagttaatcttgactcatcaggttaaattttttaatgcttttcaatgatcacacatcttatctgttcagtttcgtatgattcattgtgtctataaattcatatttcgggttacgacattggttacaattagggttcccaaaatccttggtattttttgcttgacataattaattctattaccactgataactactttagtgttaatatgaataccttcttgtggtcattcttctaattctatattaaagtagcttttcgctcgttgattttgtgtgcaaattcttgaaggtcaaatctgtccaaataatattttctgcaccaagatatgcaatatctttatgatgccaaaaccgaatgtccttttgaactttattttcttctctgttccggcaaatatgtagattataatacgatgatatttttgtttcgggtttgctatagttccaagtcgagttgtatctatatgtagatcaattatatggatatctttttgtaccatatgaagcttattatgcttctttcataattttccctagtttttatttcggcataagaatgtaaagcgagtgtttgtactctaccccgagacttatccaatgaaaaattggcatgacaaatatttatcattttttgacaattttgaatcaaatggtcaaccttattcacgaactttctttcattcattcttctcttacaaacagaaccgatctttgcaggtatacccacaagtgacg

SEQ ID NO: 101456 - DNA, 536 bp, Mimulus guttatus
  Intron number 1 from transcript mgv1a012781m (locus mgv1a0 12781m.g) derived from phytozome v7.0 (chr-ID scaffold_11; pos 2508511 to 2509046 reverse strand)
tgcgacatcaacaagcagccattccttatttgcaggtagcgcctctctctctctctctctctctctctctctctctctctctctctctctctctctctccgtgcgtctgtgtgtattttcttcaggagatttttggtacagggattgaaattagttagtttctatggtaatttactaactagttgaaattagcagtgagtttattgttaattccccctatttacacaaaacaatgaagaaaccaatttgaaaaatctgtgaaaatattgatttgaatttaaactgcaattagccgctaatacttattagttgttactatttgagctagaagacacaaatttatgaaaataattagcaactgtgaattttcatttcattgtgatacttgtagtatcagaatcattataactgagaaaagattgagactttccggaccaaaaatatcaatgttaattgttcggctattactcgatttgtttgttagcatttttcgatttattgtttctctctttacttttgcagttgaagatacaaat

SEQ ID NO: 101457 - DNA, 896 bp, Mimulus guttatus
  Intron number 2 from transcript mgv1a006951m (locus mgv1a0 06951m.g) derived from phytozome v7.0 (chr-ID scaffold_45; pos 1223079 to 1223974 reverse strand)
ttaaaaaggtaataactttttttttttttttgaataattgtttgtttggggctttatgattcaactatttgatcggtttgggcacatgggttttttcttaatcttgcttgttggatgttaaaaaaaaattaatcttaatgtgaaatgaataaactattatttgtgtaagaatatgaattccgatgttctttggtcgaaaagaattaactttttatgggatgttcgaagtagttgtttttatgtatgtttggactttttgaaatgtttccaactgcatataaatgtagttagatcttttttcgttaatctcgagatatttaattgatgggttctgtgtttgaacttttagtacattcgtctcgatcttcggttttcgtacatgtagaatgttgttagatgtagtttcttcattaatatcttgtcggctaatgattcgaggcatatttgacaagttagtttcttcattatattaacataaacgtctttactacatatattaataaacgagagtagagatattaataaacggcatttattggtaatattaatatatatattaaacaactgtcatttttcggaagtcgattttgtgcgtggtttagtgaaccgaagagtgagctagcttttgtttgttgtataagtgctaccgacgaacattcaagatcattcatttattatcggataagggtttcaagaccgtttaaataaccagatctccgttgaattctaacgagtctaacttattgctaatgcaatttggccgggaaaacgtgaaaaatttcgattattctattatttatatcatttcttgattttacagcttcgattttttctttattttttttcctttttctgatttgcgtaactatgctttcgaaataggcatctctttcaag

SEQ ID NO: 101458 - DNA, 531 bp, Mimulus guttatus
  Intron number 1 from transcript mgv1a008522m (locus mgv1a0 08522m.g) derived from phytozome v7.0 (chr-ID scaffold_290 ; pos 21591 to 22121)
ttctacagagggtaagaatcaatttaaaaaactcttttcttgtcatttttttttttataatttccctcaattaagtattcagaaatccagattgatttaatgtcaaactaacgtaatttgccgaggatgattgactatgtttctgcacattttgttgtcttgttctttccgagtctaatttgggggtttgttttttgattatttattttcattgttttctttgctcgattaatttttaggaatatacccttaatcccccataacaaatttcatatttcaagaagtttgattaatcattttctagcatgctattgctccttagattcttgttgtttgaacattgtttgcaaaaatatatctgtctggtgtaagaattacatactcaatccgtagctacagatgaaattccggactcattacgtgttaaaacgattacgatttacgagacatcatttttttttttgtgccagaaaggtgtagtgctgacctagtgaatgtctttgtttttttggctatgtagtaaatacgcgg

SEQ ID NO: 101459 - DNA, 782 bp, Mimulus guttatus
  Intron number 1 from transcript mgv1a008976m (locus mgv1a0 08976m.g) derived from phytozome v7.0 (chr-ID scaffold_60; pos 1225784 to 1226565 reverse strand)
gtgtcccactcactaaagaactcggttttcaccaggtcagacttctcgccttaatttctttattttttttttcaattgattttttttttctgtttcctgtttattggggtttctgttttcatttagctattttgggatttagcatttgttagaatagtgctggaaatctgttaacaagaagagtttagaacttttaagacggtttcttgatccactagttgtgttcttgatcatgatcatgaactatagtcgggtaattttcgacctttgatcgacccccgataacatgcatattagcatatacatgtgaattgcatcgaaaacgtcgggagcgattaggttggatcaatggatcttcgaatttagtttacaagattttgaggtttgtggatttgtcttaaacagattttaattgactgtgggttagttcacctttttccatgtgttggatttctgaatcggtggacttttagcaacctaattctactaaaaaacaagaatccaatgaaattggccccacttaattaaatcatggagttgatctatgaagacaagtgttgctcaatctttgctgatcattaaacacaacaactatgtaacatcattgtctattcgacaagtgctttcttgaatatgttgtaattcgagtgtggttggtgaaaaaacaaacgtagttggttcggtcccatgtttaatcatagattttcgaaaaaaaaaagaaatttacaatttttgcattctgaaatttgattttttttttattgatgatttttttcagtacg

SEQ ID NO: 101460 - DNA, 680 bp, Mimulus guttatus
  Intron number 1 from transcript mgv1a007078m (locus mgv1a0 07078m.g) derived from phytozome v7.0 (chr-ID scaffold_2; pos 1849534 to 1850213)
tattctcgaattcggcctctatattaccagaggaggttacgttttttctatttaacctttttttttttttgtggtttttatctgttagtctaattggatttatacgttgatttgattttcgttgcttcatgattgtatatttttatttcgtatatgtgtttaaatttgggtatgattccattttcatgcgtagtttggtttatcaattgaattggggtttgaaatgctcctggtatttggtactttttatggcaaaatgaattttgtttcgtcgtgttatctttcgtggttcggtttatgttttacttgcaatgagttggaagaaattgagtaggtactgcaatgcagttgaaactttattctgaaacagttgaatcatggtagctgtattgtgcttttaaaccgactcacttttgaacatctagatatttccagaacaagccaacaaatgcacaaactcttttagtattaccaaattcgttaaatcctcggtcttttgtttactggctgcctagagattataacttgtcgtattaaacgagccttttcttctttaatgttttcattcttctcccttttcgtcgttagttagtgggaatataatgcaatctgcatcttgttagtatttttcattttgcgtggggtggttattgactaactttctcattttttatatccag

SEQ ID NO: 101461 - DNA, 907 bp, Mimulus guttatus
  Intron number 1 from transcript mgv1a006022m (locus mgv1a0 06022m.g) derived from phytozome v7.0 (chr-ID scaffold_98; pos 3470 to 4376 reverse strand)
ccgacgcttgcgtcaaaggccagtggggcactcaggcaagtactctctctctctcttcgacttgaatttggggctattttggtaattggagaactgcgtatttagaatgaaatgatttattgttgcgaaatgaaattgttgctacagttgtttctgtcagtagtttgaatgtcaccataaattactaagatagaaaaaaaaaacatggatggaattgcgaagtaagtgcctcgtttgaactcggcatttttaaatgcttcatttttgttcaaagagaattaaactcagtgtcgtcaacaattgctttggtataatggaatctcgcttggaaagacactttttccacagttggagccatctgcgtatttgcttcttcggatgggattggagcaaccggtgagagctgaggtcaccatcttccggcgttgatttcttctgcttcttgggcgattgaaaaagttttttgcgagcgtggtttcattataccaagggtgttttgttgatggcgttgagtttgatcgaatcgagttgcttgttaaacagttgtcatgcgaatgcaatatgattttagtatcttaggagcacaacatcactgttggtataagtgaaatattcaattcgctgcataaaggaaaaggggtcttgatcactgctttaaggttttcagtgtgtcgtattatattgtgtatgttatgtgattagaagccccgaattgtgagttttgattaaattaaaaattgtgcagtttttggtagagatttcggaataagaaaaacaactacatttggatctatattagaaatacctaaagaaaaatatattggatttttttttgtacttcttaattttgtctaatatttaattcaacttaggttaagatacataggttgcttttacaatcaacatt

SEQ ID NO: 101462 - DNA, 448 bp, Mimulus guttatus
  Intron number 1 from transcript mgv1a002198m (locus mgv1a0 02198m.g) derived from phytozome v7.0 (chr-ID scaffold_26; pos 1700276 to 1700723 reverse strand)
ctgcattgcgagacggtttatcgctcaatttcgaggtttgaccgatacaacacttgccctgtttttgtttcttttgttgcatatgaagatttatttcgaatgttgactttttttattattcctcgggaactactgtttgaagtaatcaaaagtgaagctaggttagatcctattactattggtaatttcatatttacgacaaaaggcttttgactcggaatcttgaaataaatgccgaattgttgcattccaggttataggtacaggataaacagcccttttttattttctcagtattcatcgttcgatgtatctcgttttccgtgaattttctcggccgcaactttactatttgtttcatgattggattgaaggtaagtgtcgaatatgacactttatcgaattattttcaggaagcaagagctcttcttgggaaattggaatatca

SEQ ID NO: 101463 - DNA, 763 bp, Mimulus guttatus
  Intron number 2 from transcript mgv1a016416m (locus mgv1a0 16416m.g) derived from phytozome v7.0 (chr-ID scaffold_48; pos 805333 to 806095)
aattctataaggtttgtgcttccacacgttttgcttggaatttctcttgtcttaattgcatgtcttgtatgtgttgtagtactgaatctaattatttgccattgtgtgaatattttgattttaagagaatggtgaattaagtttgtgtttgatataattgatagaaagaaaggtttggggaatttttaggggttcttgtggcaaagttgtaaataggttttgaattgagatagaaaaactggtggtgtttttggtcaatattacggagaaatcggcgatagttaattcaatggttaattagtgttaaccggaattcttatattacaagtgttggaaattctctcaaactcaatgaacctagaaattttcatctaaattgcgtcatggaggaattcattatattttctattttctgtcggacgaacatttagcagtgtcaacaattttcttgcagttcgaaaaagttgtctctggacaaatagttgtgacactcgtgtcgatttctgcttagagaacgttctttatctttcagaagactgtattgacttagtgctcaaatgattttttaattagcattggtgtataggtcgttcgacattcaaaattcaaaattagcttgtgaatccacaatttctttgtgggggctgtgatttgatattgttatcttaatgttcatggttactttatttcttgggaatgttcttcaattagcttataactaatcaatgtaagtttataatgaaatctgtgtttagggatcgta

SEQ ID NO: 101464 - DNA, 898 bp, Mimulus guttatus
  Intron number 1 from transcript mgv1a004198m (locus mgv1a0 04198m.g) derived from phytozome v7.0 (chr-ID scaffold_22; pos 287978 to 288875)
cacactcgaaggtgtcaacaagtgctcctcgttcggtactctccctcgtttcccttttgtccacccaatgtctaatttgtatcgtgtttgttatgatttaatttgatcttaatgctgttagttttatttggattgggtttgttttaggtgattgagtataaatattgattttgttctgtgttctgacttttgaagttgtatatgtcggtgttggatctgaattttttatttatgctgtgcatgctatggttcttatgttcctcctgtctgtaacgagtaagcttaaacaaataaacaaaaaatactcaattatgtgtatagattttcaagattagtttaatcttgattaggagggtttgtgcttttcggcggcagttccgatcttctttcagcggtaacatagttcattttcttctttcagaagttctattgaaatacgttatttcagctctcgtttccaacctctcattttgatctgcatttttgtgcatgtctgaagctgaaatatttgggcatattcatttgcttcttgttttcagttgattagttcttctgctgtgtaactctgtgatttgtagtaacgatagtgtcctgtctccagagcccattgtagctggctatcattttataatgttcttttggtgataaattgagtaccattgctagtctttgcgtctgtggatgtgcgataaaaagtggtgaaaaaacacgggcagtttattacctgcccgtgttcctggctcttgctttatatgtgttttctgtatgcttgttccctttctccatctgattgtcacgttattttgttcattctatatcaaaaagctgcaaactgtctgaaatttacttttctatatattcagattgtttagggcgaagattggggcccaagcttctt

SEQ ID NO: 101465 - DNA, 726 bp, Mimulus guttatus
  Intron number 1 from transcript mgv1a012264m (locus mgv1a0 12264m.g) derived from phytozome v7.0 (chr-ID scaffold_17; pos 755929 to 756654)
cgtatgtctctcgcttttctaatcttccagtaattatcactaatttttttgttgttgaatttattgtacgagtctgatgaaatttcgttcaatagtatattaattcattcttgtttagggttaataatgaatcgtatgtatgtatatatatcaaaccctagttacaagatcaagaaagtgacgagcgtgatagtgattcttgttttcttgtaattagtttaattttgctgtatcatgaaatttgattagttttttagctagagagtactaggttaactaagaatagttgtttgagatagttgccagtttaattttgtttcggtgctgagtttatttatttttccatgtattcgattaattcaccccttgtatttttacaacttggaattcgacattttcatcgtttcttggatacgatgtcatttatttcagcttgttcttggatgaccttttaactgtatttcatcagacccaatataatcttggggaatatcagaaattgatcaataaattttgaaaaaaagttggcatttgtgtgatacgaaacaatcttatgacgggttggtaataaaatcacgtttatacccataacacccttttctccctttattttttacttttttcctctgtgcaagacttacgagcagttgtgtcatagacttgctgtgtagaattaattttgagaatttactgttgtatgtatggccgtcggtcgagcattgcaga

SEQ ID NO: 101466 - DNA, 954 bp, Mimulus guttatus
  Intron number 1 from transcript mgv1a005240m (locus mgv1a0 05240m.g) derived from phytozome v7.0 (chr-ID scaffold_18; pos 630612 to 631565 reverse strand)
tcttttttgggacaaaagcttcgtatccgcttcaggttagttttcttcttcttatttcattttctattggcgcaattcgttgatttgataaggtgctcggattagggtttctgaattgaggattttttttttcagttaaaaaattggatcgtttaattgctttatgcgtttcgagtctgaagaattgaattgaattttcgcttgattgattgggttgtctatccctttcgtttatttagttgatctttactgggtattagtgctgggttggatttcttactgaattttccgtttcctatgtatgcaagatttaatttgattttatggagctgcagctgcaatctttattccaccctcaactaatttctgttgcaacttttgattaagatcgtttttttttttggaattacatgagctgattttgaatctttcttgtatgcagtttaatcttagcaaggtgtttttcattggttatataggcaaaattgacctaatccccaatttatgatgctaaattgttcacggcaaaccggaaatcatatccacgaacaaaaatatcatttcccgtagatgtctccatattaaattttctcaatttaggaagccttgatgcaaatagtaaaggcccttcatctccagtttacaatctgagctccttcgattgagagagtttgatgggctgaactgatttcatttgtagcattccgtcagcagaaacggaactgtgaaatgaagattaatatagataatacacgtagtgtcaaagatttcatttggtctgttttataaacattgtgttggcctgctctttcctgttgtatgcgttgctgttcgtttcgttttctactcaactctgttttactcattaaataaaatcttgaattgttcgattccgtttttcccttttcagatcaatcacactctgttggtacacatatctaacacaagaagagt

SEQ ID NO: 101467 - DNA, 369 bp, Mimulus guttatus
  Intron number 1 from transcript mgv1a008093m (locus mgv1a0 08093m.g) derived from phytozome v7.0 (chr-ID scaffold_236 ; pos 203938 to 204306)
ctgcttctctctctattctctaccgggaagaccaagtaagtgatgatctttctttgtttttattcttgttattttatgcccaatttgttttctgcaaacttcaatcttcttttcttgagttcttcaactagcgctactttcttgatttttttttattttgtttgttttcaacttagattgtttgttcctaaaaccacattgttatcgaaacataatgtgttagagtatttctgtatattaagcaagaatattatttattattccttaaatttcatctgaattttttgacagctactttgagtacttaataatcttcttttatgctggcttctagtaagttgtgtaggcatttcgtgtggtttcttcaat

SEQ ID NO: 101468 - DNA, 1002 bp, Mimulus guttatus
  Intron number 2 from transcript mgv1a016607m (locus mgv1a0 16607m.g) derived from phytozome v7.0 (chr-ID scaffold_2; pos 790574 to 791575 reverse strand)
aggaggagaaggctgcagaaaacatctatatcaaggtaaattcttaatttcggcccaatatgtatgtaagtttagctgaaaatactctattcttacgccttctctcccttttttgaacaagaacacagaactttattaaatcacctttgaagcttgatatttcttaacctgcatcttccgtttagtgttgcctgaaagtattatcaggaattcatgaacatacaatcttaatagggtggctattttgatttagtgggatactagcaatcatcatcatcatcatcacatagatgagcagatattcatttgatattagtcagatatattttgtcattttgaaattgattgattgaaacaaaatgtaactgtaccttgaaaatggagataatgatactgaatgagtgatccttatgcttttaaactttacaatcaacttaacaatttccataaagttgttctcaaaccttctaacttcgaacactatgattgttttaaattttacttgaactgttctatggtggtgtttatattttctgtaaatttcgaaaatacatgcactaatgaagcgtttattttcaaaatagattactaatttttaataatgcattgtgaggtttataaactgtggtaatatcaacaattcatcatgccaaagtgaaagcatatgcacgtgatcagtgtgatgattctcctaagtgtcaatatgcaacttcttgctacagaactaaattatatattacatgctcacatgactcaaatgaaggtacaatcgaaatctaatttttatcttgtctcttgttaattatcatgaaaaacatatgacctccctcttcgtggatgtgcgtcaaatctatcagacaagaataccgatgcttactttagtttattgcttaagatgcatgcttcatcacaagtttatgaatatgcctattgactcttaagctaaaccttttgaaaaatgtggcagaaaaaggaacaagagaagttggagaagcttgctcg

SEQ ID NO: 101469 - DNA, 715 bp, Mimulus guttatus
  Intron number 1 from transcript mgv11b005172m (locus mgv11 b005172m.g) derived from phytozome v7.0 (chr-ID scaffold_8 5; pos 529836 to 530550 reverse strand)
gctatttctctctctagcagctctctgattttaaggtatgatcttctctcttttcgtttgcatgtttcgtcgatttataatttttgaattgactgttcttgtttcgattagatttaatctgttgtttgcatgtttcgtcgatttataatttttgaattgactgctattgtttcgattagatttaatctgttgtttgccttttgtttgattaatttttgccgattctgttttgatgaaaaaaattagatcttttctttagaagccgatctgagtatttgccgattttgtatgcgttttcatgtctcaatttattatttttgaagaagctagcgtacggccgatcatgattttgtcagcagaataacatagtttggaataattttgtccttgcagttattgaaatctatgttcatgtgtgtattgatcttatgtttaatgtctcctttgagaatcattaatttttaatttgatgtatgttatgcggtcaatttgtttcatgaactacaatttgggttctcaattatgtttgtaatgatgttagcctgttgatagattagtttccttttatttgtattcggagtgattttgatgatatatttttataattgctgaaaatctatgagttcttagtgattctatttggtatctgttattctttatcatttatgcagacttgttcatttaattttgatatgattgcagttaagcatccatt

SEQ ID NO: 101470 - DNA, 607 bp, Mimulus guttatus
  Intron number 1 from transcript mgv1a005941m (locus mgv1a0 05941m.g) derived from phytozome v7.0 (chr-ID scaffold_41; pos 36037 to 36643)
attaatcgagcaagtaagatcggttttattctgtttttatatgtgcattaaataaaagttactttcttggattatgcatcaatggattgtttagatcttcgattttatgtatgaaatacacagatgatggaggaatcttgtttcacgtgttcgggttaccgtttttgaatattttctgaaactttcgatgtgatttttttttataaatcagttgcgattagttcagccgaatgtgttcactcgtttactcatatttgaagtaggatttataaaattttatgtgtagtgtcaagcaagttaaacgagaaatgtccttcatcttataggcataactttctgattaatgttcgacaagttttcttggagctgcatgaacactgaaagcaaatccctttttatcgtttcggcatttgatttggtattgcattctaatgattgttcaagaaaaaggaaaaaaaaaaagaaaaaatcaatcttgaaattgttatgctgcatagatgtctttagattattcccgttttgtaattttgcgataattgaaaaagacgagtcatttctaaaatcatgtggtgatttatgcgtccgtatttttgcagctgggattcca

SEQ ID NO: 101471 - DNA, 423 bp, Mimulus guttatus
  Intron number 2 from transcript mgv1a020086m (locus mgv1a0 20086m.g) derived from phytozome v7.0 (chr-ID scaffold_5; pos 3659437 to 3659859)
ggaaaagtacagtttgcaccgtcatgtttgcagcgattttgtattttggtccctcgtgcacaaaaatacacatttgattcctcatatttaaaaaaattaaacacttttagtcatttccgtcaattttccgttagtactaacggaatcaagtgtgtgccactaaaagtgttaagctattgaaacttgatggaccaaatgtgttttttatgaacatgatggaccaaatgtgaaatcggtgcaaacaagagggatgaaaattgtaatttccccttatctttatctttctttttgtttcttctttttttatttttcgtgttaattagtttgttttagtcctatagagtagtttctttaaattgtcaaggactactttttttttatttataatattatttggcaggaataacaagacgtttccaaaca

SEQ ID NO: 101472 - DNA, 1048 bp, Mimulus guttatus
  Intron number 2 from transcript mgv1a014880m (locus mgv1a0 14880m.g) derived from phytozome v7.0 (chr-ID scaffold_2; pos 2662477 to 2663524)
acggtgcatttcaagccgctgtgggcgaaaaactggtgatctcctcattcctttcttcttttcgatcatgttgttcatgaatattaattcacatgatctgcaaatggtttttgattaacaatttgaatttgactcagtagaagaatttagtgtgctctctttctacagtttattcgattctctactgccaccatacggtaattgttaaaagattctcactcggagaaataatcgtaaccacatactttctccctattactctgttactgataatgtttctaattgatatttgcatagatgaaggcctcggttggttggggagattagtcatgattaattaaataattggacattgtacgatgtttggtaaacccaataacttctccggtcaacccggaagtattatgttttcatgtcttatcttgccttttagggagttttttttttttttatgtcgcggatccgataaaataattgggttttcgttagattgtttaatcttatcttggatcttggctaattctatcttagcaatcaaacgaggctgaaggtgattattggttttaacatttatacatctcagtttgtttttctctacgtatgggaggatctggttttgtattcaacttttcgactgttgaataattgctgcagtttttagatatgatcattgtgctattggtgctgaagttctcaacacttgaaaatggcagttagctataatgcatgcaactcttttcttcttcctaaacaatcgatcgtccttgcatcttattacattttaaattcgaaactaaaatttggatgaagaaatacaccaactaaatacttccttcaatatagttaatagtgacatggtggctaaacgaatggaagtttgttagttccttttatgcagtcatgctcctatgaaagaaataacaatgttaaagtaatcagtggaaaatgatttcatatctcacttgtcaatactggaaccggcaaatttggtttttatattgacttgcgcattgtttttcgtatggcagccctagatttggaatagcgc

SEQ ID NO: 101473 - DNA, 795 bp, Mimulus guttatus
  Intron number 1 from transcript mgv1a007813m (locus mgv1a0 07813m.g) derived from phytozome v7.0 (chr-ID scaffold_10; pos 459251 to 460045)
gctgtttgccagattgccgataccaagtcctcagagtatggttttatttccccctccttttttttttatttttttattagtttaatgcaactctatttgtgcatcttaaatttatttaattcataatatttagcattgaaaagagcaaaaaaattgtgtctggaaagaacgctcacactcagttaatgatgttttggttcagagaaaaagcataaattatgtctcactgttactttatctaagtagttataggcctttgttgtgtttttttaggaatacactccttacataactatacgaatcaacaactacaaccaggctcaccccttgatagctatgtcattgagaatttgagatagttgtttttcacttgtatttacatctttaagaattgtcaagataatcagttaaccccttccactatgattgctgaattttactgtggtacctcatccaaatattaataaaacttcaactattatggatttttatatgccaaatgaaacaactgagctcttgcaagcttaactattacctatcacttggagcaatgataacgccgactactctcatttgcttagattttagtaatcagtttattagtcatcacaaattagtatctttttttccattcaacatttatgcttatcatttgattgcttttggcatgttatttgagttctatagctgatggaaaacggcgtaaaatcccattctgattttaaaatactttctttgcttgtatctatcttaaacttagggtccaagccttgatactgtcacctacaagagagc

SEQ ID NO: 101474 - DNA, 408 bp, Mimulus guttatus
  Intron number 1 from transcript mgv1a010179m (locus mgv1a0 10179m.g) derived from phytozome v7.0 (chr-ID scaffold_102 1; pos 4592 to 4999 reverse strand)
acggcctcagtgccatctccgacgcattcggacaggtttcaatttccccaatttagcaactaatatttaatttttttgttagtgactgagtttatttcttcaatttatgcaattgattttgtattttgtatgcaaatgcaattggtggtgtgttcattcaattttttcatataagttgatgagattcgtataaatttttaggtgattcctaatttgaatatggtagaaatttccggaaaattagaaacatgtttcgataccaaaattccgaagattttgttcttcacatgattagattaatcaattgcaaatatagttcatggtagatttcgggctttattcgtaaattgtaatagctgtatctgatttttagcctgacgtcgtgataaattgcgctgcgctttccgt

SEQ ID NO: 101475 - DNA, 774 bp, Mimulus guttatus
  Intron number 1 from transcript mgv1a006325m (locus mgv1a0 06325m.g) derived from phytozome v7.0 (chr-ID scaffold_3; pos 1584632 to 1585405)
ccaccgtttggctcgcttacgatactcaatcatctgtaagaatttcctcttttttttttttttttttttttttttttttattttaccaatttctgtggatgacattgtttggattatatctcttgtttgtgactgtgagtacctattgatgtgcaaatgcaatttagaaagatatctttgtattttttgaattagctgtattaatcgcgattggatcgatgcttggtttgtttgtcgtcgttcgtattgatgatctcgagaaggtagttatttcatgaaaggaaatgcgtggactcactagttttgaagttcattaacttcaacgcggaatgatagttgttacacgtgttcttaatcatggctgatgaatgaatgatgttataataataagtatagcttatttgacgtgttgtgatcccagccttttcaaatttgatgtcttgtttctgaaaaataacaattcacgtgtaatttaagaagtaattcgatgctgtttcgtatttcatactacttgttagatgcggaaaaaaagtgcttttagtacgcaaagtactaactgcaagatttgactcgggggatcgtttcattttcagtacttacttttcgagaattatagcttttgtaaataaattattattttgcacgattgcaagtcgcgtaacatgtttaataccaaaaccggagtggattttgtgacattttcatgtttgtggtcctttttggtgtttgtgacgacatcttcgtgtttgtggtcctttattatttcacagaaat

SEQ ID NO: 101476 - DNA, 450 bp, Mimulus guttatus
  Intron number 4 from transcript mgv1a014470m (locus mgv1a0 14470m.g) derived from phytozome v7.0 (chr-ID scaffold_2; pos 2287299 to 2287748)
ttcttcaggactacggaattaggaccaattctcaggtacgcttcatttatatgctttcaaattcccatttcctatgaaaagaaagttcttctgagaattaatttcttcttccatcatttcttgtagattcttgttacattaatagctcagtgtgattaaggatatctcatttatctgtacatataatcaactattttcttggatcagtgacgaaaaaaaaggcttcacatcattttattaaaatagtgtagttcgtataaataatttggcaagtgaactgaactagtcatttctttttctcgttctcgatagatgctatatgttacttgcctatatgtcgcctattcttatcgctggatattgtatcttacggaggcatctctgagtattgcaagtaaaactttgttttttgcaggttcagtttgttccttacgttatttcgagagattt

SEQ ID NO: 101477 - DNA, 795 bp, Mimulus guttatus
  Intron number 2 from transcript mgv1a026570m (locus mgv1a0 26570m.g) derived from phytozome v7.0 (chr-ID scaffold_15; pos 1740654 to 1741448)
tgggacactcatatctttcttcatcacatcatttggtattaattatttcaattcgctgcccattctattatacccacatataatgtaaatcttacgaaatcctatcgaacaatggataaatcatatattgtttagaaatcaaagttgtaaggaattttattttcatcgattgtaaaatttgatcacatgaaagtatattttcctagtcagtttacgataaaagttatcggtattttgagtttacgcatccgtaaagctttgatggttgagaagtggttgtgtttgcatgatttcctacttataacttatttttgtgcacctgtctatatattatatattttatggtttgtgatttcgcatagcactaagtatttaactttttcaggttcgaaactttttttcgagacattgggaatagtcaattttgaccttaaagattatcttggtcacttcatcctcttcactacatattcatcctgtatatgatatttcatcgtatattcatgcaattatcttgtaattaattctttgttagtcgataatttcatattatatctcctagggttctctctctctctctctctctctctctctctctctctctctctctctctctctctctctctctgccctgttgtatatatatgtcgaactaatgaaacgtcttcttgagggatacgtttccaactttatatgtcgaactaatgaaacgtcttcttgagggatacgtttccaacttgagccttcgttttttatgcagcaattggaaccatcttttcagctacggattctata

SEQ ID NO: 101478 - DNA, 799 bp, Mimulus guttatus
  Intron number 2 from transcript mgv1a011500m (locus mgv1a0 09901m.g) derived from phytozome v7.0 (chr-ID scaffold_303 ; pos 34040 to 34838)
tatctgctgcaagtcttgtctactcgggtgcagaagtaagactcagtctcttgccatattttcataggaattcttgttaattactctgttatccgtgctagtagcgacgactttttgtataattggttaagtttaaaattcatgttcgttttttcggtttacatttgattttttaactctatcttcataactagcagactactatacatgtcaagtatgaaacgacagttgattttaattttaactgcagcagaagagttttcctggttggtgtatttacgatttcttttcatgtggtagtattgtgtggtaaagaaagttataagctatttcttgccgattatgttaattgtataaaaaaattaattgcatatatttagtggattggttgaaatggcagtgaaagcctattacatacgtatgccgtagcttttatgtgtcaaatgcacacgtgtgatattataaattcacacatataaatttgcttattttcctaacgaagttttgggaatctgagttctagcgatcttgtgcctttctgaggtgaaattgttgtcttgctccatcttcttcatttttttgcatttgttagtgtataccctgtaaggctttgttgtataatgccatttctttgtcctttggggaattaaatgttacagtgccctggattttgtataattttgaccaataaatagttgtgccacttatatgtatatatattttttatgactgccatttgacaattgttggtactatattttcagtcttgaaaaaggagttgaattagactgccagtggg

SEQ ID NO: 101479 - DNA, 630 bp, Mimulus guttatus
  Intron number 1 from transcript mgv1a010195m (locus mgv1a0 10195m.g) derived from phytozome v7.0 (chr-ID scaffold_34; pos 1273449 to 1274078 reverse strand)
tcggacttcattcagcttcaatccattaattggaggtaaaaactcccaccttcaactccaaaagtcagaaaaaacaagaagagagagaaagaaaacatgaaaagggaaattttatttttgggcctaaatattttcttggtatgtagaattattggatgtattgctgtttcgtatgatgttcaaaagtgtgtcgcttttgttttgatgaatatacattatcatctatgtaaattgtggtttcagaggtgagactgaagtgacttgtattttgaggagtgagaaagcttctgcatattttccttcttgcttgatcttttgcttctgtttgctcatatagatttgtatacagatgctatgcatcccggcagatgtgataattacgcagagagatgaaattattggagattagaactcgattgtaactcccccttttgctcgataaaatttagttcttggcaattaataatttagtttggagaagtgatgtagcatcccagttgtttgtttttatttagtttcttattgaatttgtgtcttccaaactgaatctgaattaacagtaccatcaattcattttatctctaccattgctgagtcgtaatggggtttgattgtttaacaggagttttg

SEQ ID NO: 101480 - DNA, 694 bp, Mimulus guttatus
  Intron number 2 from transcript mgv1a007450m (locus mgv1a0 07450m.g) derived from phytozome v7.0 (chr-ID scaffold_115 ; pos 685580 to 686273)
attcttctaaagatctcctcctctataagtaagtttgtcttttttatttattttatttattttttttttaatttatgtctgctatttaatataataactatactgtcatatatgcttttagtctttgcaaaactaaccccttgctactataatccgagagacaactttgactttgcctcatgttttttgattgtttgtggttgtgatagacaaaatggacttatttttttgccatatttattttccagttgtaagggaattcctctctgcggatagcgtagtttggtcttgttttttaggttctaactctatggaattcaaaagctttgtatatgtcaattctccaatcaattgttcagatggataacatattactcaatggtaccatctgctttagagattaccctctaatgcaggtgaggaactgaagaaaatgtatgcactttgtgtgtgtgtgtgtgtgggggggggggggggggggccctaaattggtctctgttaaatatacaaacaccaaagagtataattcctcagacaacaaactctctgatgatttcacatcaaaaggactacatgagtaatttgatatatactcatgtttttgttctcgtgttagttgttttaagttgtgatgaatgcttcttgtgttggtatttcaggagaataggtgaagtgaaagagaaagaaagaagga

SEQ ID NO: 101481 - DNA, 677 bp, Mimulus guttatus
  Intron number 2 from transcript mgv1a011358m (locus mgv1a0 11358m.g) derived from phytozome v7.0 (chr-ID scaffold_8; pos 2545157 to 2545833 reverse strand)
cagaaggtgaatccaaaggaagtcattgttgggtaattttcagtttattagacaatattcttttgtttgtttctgctactgtatgtgcgcatattattgtccactaattatgcaatctagttcaggaaatccttagttcttgaagaattttttaatattataactttgtggctttgcttgtcatacgcatcacactattatgtaattttgccttgtttttgttgatttcattatagtgcatctcacgcaccataaattgattttatgactatttccatcttttgattgagcagaacatatgaatacttgtctaacaatgctttttgtgattttaatatttatggatttctacttgatgtaaagtaagtgagctactaatatgttttcgatgtcaaacttccactggtatttttctgatactaattggatttttttatatgtacttctatgttgtagtgagttgctttcaccctctgtccttttttatactctgtttctgatttccaccaactttaagccgtccgttgagcaaatgtttgattcatgagaactcaataatttagctgatgctttcactagatttcttaattctgtaaatagattagatgcttatgaaatatgaatatacttttatttgggcaggttttcgacaggtagagtcgttgctggtagtgcat

SEQ ID NO: 101482 - DNA, 643 bp, Mimulus guttatus
  Intron number 1 from transcript mgv1a000949m (locus mgv1a0 00949m.g) derived from phytozome v7.0 (chr-ID scaffold_311 ; pos 3993 to 4635)
ctttctccatcaaaattcccgtcggagatcgccatgtgagttttatttgcagttatttttattgcttgttgaagttagatatttcgaatttggttgataatgggtgggaggtacgaatttcgtcggcacgaggtttagtgtgtttaatcttcctttccgggagttcatttcattgtgttttgacgacgcttcgattttcgttgcgtagaaagatagttgaatatgacttattcacgctggaaaggtttataattggggctttgcaattgtgtactgaatgattgaagtatgttacagtgagtgtcataaaccaacattgtttagcatccagtcaaaataatcgaattgaaatgtctgtgagattggaaatgccagtagaaaattttcagttttagtacaattaattatggaatccaaccatgaatctctcaactttatgatcaccaaattatcagcatactaattacaatgttgtagtactcaaactgttctttcattttccctggcctggttattttccgacacgttcttttaatttgatgtttggatcctactggaatttattaccaaattttaacccagcaagtgacttttctgaatttttacagatattagtcgagacaggtcacattgggagacaagc

SEQ ID NO: 101483 - DNA, 806 bp, Mimulus guttatus
  Intron number 1 from transcript mgv1a024890m (locus mgv1a0 24890m.g) derived from phytozome v7.0 (chr-ID scaffold_68; pos 620511 to 621316)
ccattgacctcgtttctgtcaaagctctaacgctggtaagaagattctatatttgcatttattacccttgtgttattaatattagcaaaactcgccctagaatgcattttttctggcaataaacccgtgaaacgagggtttattgcatttaccacccctgtgttttctctgatcactaaaatactttccctgttattttattagcaaaaaacccctatgattcatttttttcagcaatattcttcccctaactcactatttaggggataatttgattggaaaaattgaatcatagaggatgttttgcatcaatagggaaaattgcacatcacctcctgtaaatttttaattttcgcattttactccctcaatttttttaaaagttaatgcctctcttcaaaatgttattcttgttgcatattgtcccgataccaaaactccagtggattattcgtcggaattgggtattttttattgcacgttgcccctttaaatgttatttttattgcacgctgcttctttaaaacactattttttttgcacgttccccccttcaaaatattatttttgttgcacaatgccctccaaaaattgggttatggggcaaagtgcaaccaaaataacattttgaaggaggaatattcctttttttttaatatttatgggggacattgcgaaaatgagaaatttatacggggcgaagtgcattttgtcttaattttttaaaatattttgaggagcttgtatgtttattcttcacatggatcataattcattgtcagttttttccaacttaaaaaaacagg

SEQ ID NO: 101484 - DNA, 755 bp, Mimulus guttatus
  Intron number 1 from transcript mgv1a025440m (locus mgv1a0 25440m.g) derived from phytozome v7.0 (chr-ID scaffold_119 ; pos 168574 to 169328 reverse strand)
ggccaccgcgccgtcgtcgccggaatcggccatccgttagccgatccctttcggtattcttttccctctttcttttcttccgtttttctaactattacgtgtctggtgccacgtgtttagtagatcgaagtatacgaggtgaaatccgagatgaggaagatcgaagatcgaaaaatcgaggagcagcacacgagccgaagccgcacgcctccccacgcgcggcccgaagaccgcgcgtgagtcacacgcgccgccgtggctcgtattgccgctgctgccgtttcgctgcttctgccccggattgtacgaattggtttccgtagcaatctcgtcttgcttagtgcgcctacctcacgcttcaagatgtaaactcacaaattcattgttcttagattcgtttatgtttaaatagaatgtttatgttcgttcttgtatgattttatgtgactacatggaattatttatttattgcgagcatgaacctttgatttaaacgcgagcatgctaattgatttaaattcagttaaattattaagcatgtatgttgtttttatatttcgctggaagcgcaaaggtacgcaattaattgttttaattatcgggcatgtgtttatgtgttttaaagttgtttaaatcgcataaaagttttgttttccgctgcgtacacgtggccgagcgccatgaatgaataagaaattgacagggcccgttacccaacaatcacatctttaagatatctcattctagattccaac

SEQ ID NO: 101485 - DNA, 921 bp, Mimulus guttatus
  Intron number 1 from transcript mgv1a015713m (locus mgv1a0 15730m.g) derived from phytozome v7.0 (chr-ID scaffold_1; pos 1013679 to 1014599 reverse strand)
tttgcagaaggatcctccgacgtcgtgcagtgcaggtatacttgtttttttcttcttgtggtggcgagagatttttattttattagtttattgtaatttggctggtaatttgtttttgctcgacttcatttagctgatctctgttggggataaaattttgtgtggttgatgctgatgattgctgcatttttctgcttctttatggttctgactgaatatatgtaggaatttattttttacgtcttaattgatccttttttagacgagaactagctattaccactgagttatcaaccatgtagaggtttttagcttactgaatctagtttttgacttaactagacaacttggtaatatggtattgggttgtgttgctatgcggtttgcttctaactcgtagtacctatcggatgctggatgtggatggatttgttagatgtctggataaaattttcatgccacgccactcgtataatttaggtcgaactctagacatatttgtgtgtgtggttgagtggttgaattgttccagtttcaacccttcgcagtaggacataaaatgatatacagctgagcagcataacatttcttctatcatatttactacattcatgattctattatggacatttggccactttttaatgcaatgaagaacttggtgctaaaaacacgttctatgttggctccttgatctgttacatatttgttatgcttagttctcttaggggcctgtttccaacttagattgattcgtcgatgtataagcggccaagttattttgctatttactggcaaattttatgtgctactttctcatgtgctacctacatcttaattcgtcaacttgcttcagcattttcccgtgattccaatttaacattcattgtataagggtatataggtcctgtagcagaagat

SEQ ID NO: 101486 - DNA, 262 bp, Mimulus guttatus
  Intron number 1 from transcript mgv1a003196m (locus mgv1a0 03196m.g) derived from phytozome v7.0 (chr-ID scaffold_75; pos 1011374 to 1011635 reverse strand)
atagcgttcgctcgagctcgaccagaccttattaggtttgtaatcctttttctgtttgttattgttcatcttttggggcgagattatttttccgattttaaattaggttttcatctactctgttcatgtcgattttgtcttgcttaacagaaaaaaaattagagtaactgcttcagcatcattaattatcttcctgagttgagtttgatttggcaattgaattatagatcgctttcgaggaggaatatcgaagcagttgtat

SEQ ID NO: 101487 - DNA, 1036 bp, Mimulus guttatus
  Intron number 1 from transcript mgv1a000747m (locus mgv1a0 00747m.g) derived from phytozome v7.0 (chr-ID scaffold_113 ; pos 650637 to 651672)
tcgggtgtcgatgattttcgcgatatgggaaatcgaggaactacgactaatgtgtgagtagttttttttttttttttttttttaatcgtgtgtcgaattttttagtgtttcgaatgtgtgttagtgctactataaaaaataatcacgaatcgaattttcggagaggattaattttgtttcgtgtttcggagcagttttcggaggtcgaaaagcttagagcctcagaattcgtgtgaacacacaagtggatttttaaggattaatactaatcataatgtaagttcattaattaattgttcttaataagatttatattattttcgatttttcgttacttttgatgatccaattgcaaaaaaaaaaaaaaaacaaacaattgatgcagattgtactaattctcaacaaaattactaatatttcataaccatttagttcttggatataaacattttgatctacataaatccaagattctactttttttcgatttttcgttacttttgatgttcaaattgaaaaaataaaaataaataaaaataaataaaatgatacagcttgagaagctgatttcataataatttaattattggatataaacattttgatcctaattagaaatccaagattctatattaattttttttcgattttttccttacttttgatgttcgatttggaaaagaatttgatgcagcctcgtagttctcaagaaagcagtactaatggtgtggaagatgagcaaattgcatcttattcgaaaaagacgaaaactaaagttagatcgaacatcaaatgcctcaaagatattttaacggaatcagagccagaatcgaacgcctcctctgtggaagaagatgttttccctgaccagtcacaacgtataatcattaaaaaaacagcgacgaaaaaagttcgtcacaaaagtttaaggattcagaaaagctcaagctgcagaaccgaattagttcccttacaacaacaacaacaaaacgacgaaaaagaagaagagtaccgttacacgttcgaaataacaaag

SEQ ID NO: 101488 - DNA, 692 bp, Mimulus guttatus
  Intron number 1 from transcript mgv1a005935m (locus mgv1a0 05935m.g) derived from phytozome v7.0 (chr-ID scaffold_114 ; pos 530739 to 531430 reverse strand)
ccgccgcgtatactttgcctgtcacggctgcccaggttattttcttaatttattattagaaacgtttatataacaatgcacagctttaaatattttatttcgattgttgttttgaatgttcttgattaatggatgcatgaatgtaccttttgatttgattttatttgattggattgcataaagagtattttttttccctgttcatggcaagatgatgtttatgagttaaatattgtttgtttgcgtgatgtcgttggtttatttatttatacacgcagcattgttttgttttgttttgtttttttttcgtgtcaagtgttggttttgcccttttggaaacaaagaacttgcatttaaagacatgacaaataattcggttttgttatcaatggctttgttaataagaagaatctaatagtccccgcctttttttcgtaatcgactaccttcaaataataattttttaaccgttgattttgacgacacgtgccatagtttatagaacgataaaaggatccatctacattcattagtcattacattccgttttctccaagattttgtatatcggtaacgttaatctattactaccgaaaagacgctaagttattcacattaacacgtgttgtttgtatcttcgtctttttttttgtttaggtggggacgtactttgtggggcagtactatcagat

SEQ ID NO: 101489 - DNA, 924 bp, Mimulus guttatus
  Intron number 4 from transcript mgv1a009616m (locus mgv1a0 09616m.g) derived from phytozome v7.0 (chr-ID scaffold_26; pos 183411 to 184334 reverse strand)
ttggaaactggctcaagtctcaaccccgagataaggtatacttcaaggttactttgataccagaatttgctttgaaattttcgttttaataacaggattaaatttttgtttagtttttaatatcttttcttattccgtccctcgtttcgcaacggtcttcatacaattcggtatgacccaagattgcgtgggatgtcatgcaaataccatattaatgggctattcataatataatcctacctgtaatgagtttgttacgttgtaactttcgacactccttcatggtttagtaatcatttctttgtggccaagaacttcaccatatgtaaatgctgcagcacatagtgacataactcaggaaatagcttgatcttccttcaccatttttttgacagtctttcattctcagactaataaatctgacctactaaaaaagtgaaactgaagtatcttgagataaaggagtataggtcatggactggtagctttaaatttagttattagagtcgagcttttccttgtttatgattttcgttgaatgttatttgattgtcatgtagttattgatatatatttgccgatatggtcagattctatgtcttcgaagatcaacatgcattagcgatctaagtaatgaattttaacatttgaagcccaagttaattcagagttgcttcagtctatgagggtcaatattgctgtaatgtttttgggtgttcactctttattaataataaagaattacagatgtggcatatgcaacgaattatatatcatttcaaagatttttgagaactcacatgttatgcatcatatatagtgatcccactgagagtgttaagcaatttggttgagtagcaatattcaaatattttttttctcttattaggttattttggccacaaaagttgctggttactccga

SEQ ID NO: 101490 - DNA, 481 bp, Mimulus guttatus
  Intron number 1 from transcript mgv1a008031m (locus mgv1a0 08031m.g) derived from phytozome v7.0 (chr-ID scaffold_32; pos 731298 to 731778 reverse strand)
ctgacctcgattcgaattccctttctgatcagcccgtgagttttctgatcaattattcgcgtgcacgcacatttattgggtgtcggtatgaatttgtgtttcatatatctgtggttatgaatcatgtgggggtttactcagatttttcttagcttatatgtgttttacctttgagaattgagattgatttgtaatttggtaaaaaaaattggtcttatcaaacgagattaaagactggagctattggtataggaaaatttattgcaatgattgtttttatacagcagttatcactctctcgtgtttgggatcagtataaacatgctttaggatgtatgtagttgtcaagatttaagatgttacttcagttattagtttgaatatgtttttttctcattttcttttgggtttaatttacaaagttatgatttttttcactatataaggtggcagaacttggaactggcagtgatttgccgta

SEQ ID NO: 101491 - DNA, 504 bp, Mimulus guttatus
  Intron number 1 from transcript mgv1a012230m (locus mgv1a0 12230m.g) derived from phytozome v7.0 (chr-ID scaffold_2; pos 3233996 to 3234499)
gaacccattgatctgttccactcgatcatatctctgtaagcctcttaattactttgctacctttgttcataaatacacatctgggtttttctctttttcaagattttcttgtcaaatgtagctctactctgaatcttagttaacggtaactttttccccaattttgttttcgtagcttattttcatttatgccaatgtagttagtcagcatcttttgtttcgacaagctgatgatttcttttgtgggttttttttttttttttttttgcttttgtgtgtgtgtgtgtgaagtgcattagtagaaagtcccaattcacagcttaggcatagtgttgatcttgaattctagatgggattttaactgattgtttagtatttgaatgattagatgaatctgatgtactacattgtgtcgattttcatacacgaagttatatcgtttcgtcttttattcagattgcattagtcttataatcatgtttcttgttatttttcagggtagat

SEQ ID NO: 101492 - DNA, 319 bp, Mimulus guttatus
  Intron number 3 from transcript mgv1a022126m (locus mgv1a0 22126m.g) derived from phytozome v7.0 (chr-ID scaffold_7; pos 437634 to 437952)
acgaaaatgtatggcccactgactccatatttacacacacgcgcacacacgcgcgcacacgcacacactttttctgtcgataatgccctactagaaagaatcggaacggtaattatcaaatgttgaaaagatggaattggccctttagaatcaaaattaaattgggttattggtgatcatattattagattgatgattttttttttttaattgaagaaataaatcattttgtcattaaatgagttttatttaatttaaatcaagttcatatgattgacaataactagctcgttctattgggaccgaaaaaacgcagggt

SEQ ID NO: 101493 - DNA, 682 bp, Mimulus guttatus
  Intron number 1 from transcript mgv1a018326m (locus mgv1a0 18326m.g) derived from phytozome v7.0 (chr-ID scaffold_299 ; pos 4543 to 5224)
agcttgtggcggcgctcataccctttttctcaccggtgaattttctttcccctctctctaaaattgatttcctctttctttgtggtcgtgatcggattttattagtgtttgattggacttcaatttgattattatattgacttgtgtaatccaacgtcgcgtgaggttcacgcgctccgatgaattttagttgatgaatttcgtagacattttgcgtaggcaacgtcattcgtttttctgtgttcgtattgattgtagatggctgatcttgaaaatctgtaactgtactgtttttattttcgactttgatgagaagctgcaatcttctattagatcaagttattgccgaggatcataattcgtaaaaaaaggatgttctaaatttattgtgttccgcctttgtttcgtgtgattgctcgtgataatcgaaccgtcactaccattttgctcttgctttttaacataagaaagtttcctacgagtgttgtgcgtttctgtttcccggagtttcctcgtcgatagttcactctatcgggaaattcggaatttatgtggtctctctattttcatttttcagccttaaaatagttgcttcagtttaacgaaaaaattagatatcgtcgaaaactatttctatttccaagctcgttaattagctatgctgatctggcagatagtggtg

SEQ ID NO: 101494 - DNA, 560 bp, Mimulus guttatus
  Intron number 1 from transcript mgv1a023972m (locus mgv1a0 23972m.g) derived from phytozome v7.0 (chr-ID scaffold_13; pos 548879 to 549438)
tggatataggaactctttgggattctttggttggggtattacaagggatgggatgggttgtaccgttttatacaacgtttggttttctttagttaaccatccttaactgttgggcccacccatttaataccccattcgaattattgttagtcaaaccaaagttggcttgactagttatcacatattgaatccccttttgtaacccatgtgtaatgtcgaaaatatccttcgaaaatacatcaattatgaaattaataggtataaatactacaatcttcatcttcccctttcttgcatcgtgccctagtttttttccaggtaaaaacacatgaacaaaaaaaaaaaaaaaacccatcttcttcctccttcccaatctcacagctcgtcaccaccttccttgttcaaacccaatttatctactactctcaatttcaaccaccgtagccccgcccaccaccaccgccctcctcctctcacatttgcaatcaatcacttcccgtaacaggaatttaaaaaaaaaaaaagccccaatttcaacaatcggaatcggaacccatata

SEQ ID NO: 101495 - DNA, 854 bp, Mimulus guttatus
  Intron number 1 from transcript mgv1a011711m (locus mgv1a0 11711m.g) derived from phytozome v7.0 (chr-ID scaffold_33; pos 1458550 to 1459403 reverse strand)
gttcctccgctcaccacaatcattcgggccgagaggtataaccattttattgtttgatgtatgcttatcatcgtcttcagaatgtttcctattagggttttagaaatgcaagttattacactacttttttttcttctatcaaatttagatcagctttttctggaaataggtattaattttgtttagcctaatttcataggtaaatttaatacacttaataggaagattgccttgcacgagagggctttattaaaggctgccttgctcagtcaacactaatttttcttttcaaagggctttattagtttattgtaatatgaagattgctttacattagaggcagggcactgatatgtttgtgttatgtgatgaactatttaatgtacaagaaaatgggcacgacacctctaaattgtcgaatggtaaatggtgattctgtttatcgtctgtaataggaactcattctaatacgatgtttatcacatcgaatgcttattttgaaatgagaaaggagtattatagattgtcgttctttttgtttctttcctcgatacttaatctcctgacttcaattagtgcacattctaatgtttttcctgcaattttttgtgcctcctgagctgattacacacagtaaggatgcctggatgttaagtatatatatttataaagtttgcttatactgggtgcgcatcatctaattaatgtgaacaaagtgttgcataattaatataggacccgactttgtactgctttttgaacgattgtgttcgtctctgtcagatttctgatatatttgttcatcttggtaacctgcagacattctacaaagttgttaggagctgggcttcgaa

SEQ ID NO: 101496 - DNA, 567 bp, Mimulus guttatus
  Intron number 1 from transcript mgv1a001599m (locus mgv1a0 01599m.g) derived from phytozome v7.0 (chr-ID scaffold_96; pos 537530 to 538096)
gaggcttcttctagtgtggtgatcaaggttgtttttttatttatttaattattgttatctttaatttcgttgattttgtgctgtaatatcttatctgattttgccgtttgggttgtgttagctattgtttcgtgaagattcgatttttatgtactcttgatttttttatgggattgttgtgatatgatgagtgattttgtttctgttttttcttttcatatgttctagtgatgaaattctgtagataatcgtaattgtttgttgattttggttgtgaatttgatcttatttgtcagattacctacgctaatttttatgaacaaatattcattgcaaagtgggttgactgatcttgttttgggtggggttagggtaaagagtacttaataattttcaaaatgtggttcatattttatttatgatttgatgataagcagtagaccaggattttgtcttctgaacctttgttttatgctattagcatctgttcactttcttgaattctcgccttttatctatctgcagctttcttcttaattgtttttttaacatttctgcaggtcaagt

SEQ ID NO: 101497 - DNA, 400 bp, Mimulus guttatus
  Intron number 4 from transcript mgv1a008132m (locus mgv1a0 08132m.g) derived from phytozome v7.0 (chr-ID scaffold_36; pos 17822 to 18221 reverse strand)
tggggagttcaggtataaatcttttgcaatttttgtacttcgtaatacatcattatctagatatgattagatattggcatgatgtactgaacagaaagaaaatgggaagcgttaatcaaagatccacgtttgaggccttaaaacatccaaatattacggggtagtgttttgataatatgcttataattcgggtgttttagatgcaaaatacgtgtagtcgaactcatcctgcaaatttactccgaatacttgaccttaagcaaggtggaattcagttaaatctctagttattgattttgttgaaccaacattatgttgtggaattctaagtttttgttggcattcttatcctctgcatattgcagcaatttattccaccctacggtacttcaccacatcc

SEQ ID NO: 101498 - DNA, 835 bp, Mimulus guttatus
  Intron number 1 from transcript mgv1a016417m (locus mgv1a0 16198m.g) derived from phytozome v7.0 (chr-ID scaffold_30; pos 1717094 to 1717928)
gcagcgtttgggctcagagcgccgccttccctcaggttttatttttttctctcttcctacttttttttaaatcgattgaatttgcggatctgattgattgacggatgcttgccttttaacttgattgtactccgtttgagaattgagattgatctgattggagatagatttattcgatttgattgattctgtggtttgatttagtgctcggagttgttagatccaactgtaatttgaatttttgtagttgcttttgcttgggtatattcgttgctgtttgaatttgcccgatctggttgatgaatatttagtttaccttgattttgtgccgttttgaacttgatttgacttgtgagatccgtttagtttgtagctgatggtttcgatttttgttgtattttggtttttaagttcttagtattcgttgtagttggatccagctattggttgatttttcttttctgttgttttgatcggttatattcgttgtttgataaattagaagtttttgattttgtttatatgcgtttggtagggtcgaaaagccgtttattgcttgatattagatcatattcctctcttaaattctttgattagggttatcagtttattctttgatgcacataaaatatctgctaaaataaaataaataaaaaaataaaaaatgtttgaataaaaacaaaccttttaaaataaataattaaaaagtcgtagatgatcttttcgtgtaattgctccctaatttcaataatgtactatttgattgattttattgtcctgtttacgtatgaattcaatgctggtgcagttgaagcccgaggaggtaacaggtatc

SEQ ID NO: 101499 - DNA, 774 bp, Mimulus guttatus
  Intron number 1 from transcript mgv1a001088m (locus mgv1a0 01088m.g) derived from phytozome v7.0 (chr-ID scaffold_32; pos 93129 to 93902 reverse strand)
gatctaacggtgggacgaaggagaaaaaggtaaattcacaaaagggctctcctctcttctttgataatcatcgtcgggttgaagtttctgctggtcaataaagtcaacgtcaaaagaaaaattcaaaattgtgatgtaataaattggtctcatattcttaccttatttcacaactcagaataaactttttgaaattttaactttgatgttggaaatctaaatattagaaaacatttttatgtgtttttcattgatagcaagtttttgaaattttccgattttggaacaatattttcatttcgaattccaaagtttccgattccgatttttttatttgtttttggaacggaattaaaatacatattggattcagattttccgatttgattttaatatccgaacatgtttccgagaattaagattattttccgaaaactgcaaataattatgtacttttgtagtatatgtgactaaaaaaattgaaatttccgaattacgccgattccaatcggaactccgtttttttcgggaacggaattagaattagttttccacttccgaaaaaatggattttttctgaagaccaattcccatccggttggtccgatttccactcctaatccgaatcaactttatgtatgatttacgcgatagaatagataaatttcgctttttagtaacttaaccagttttcctggactaagtcattcttgattattgattcttgattattacacagcctccagttgttgaagaagacaacgttgtcggttt

SEQ ID NO: 101500 - DNA, 534 bp, Mimulus guttatus
  Intron number 1 from transcript mgv1a005259m (locus mgv1a0 05259m.g) derived from phytozome v7.0 (chr-ID scaffold_13; pos 2241158 to 2241691 reverse strand)
gggtgccaggtttttttttttttttttttaatgattgtattgattcttgatcttttgccacatctgtctgtctgtcttttaatggtttgaattttgccacatgttaactaattcactctgtttctttggatgcaagtcagtttcttgtctgaaagtctatgttttcagttaaattttgtgttttttttttaatgttttggcaatcatgaaattcatatccaagcctatagaacttatgtcttatatgcagaatttacagattaatttagactagatgaagaaaagaaaaaaaagtcaaaatcgatcagcacgcacctaaaccttaatgaacatctcaagaatatgacatatatctccaatttgattttgttatgagattattacatacattaattatttttcttttttttttcgtttccgtcccatgtctcgcctttgctaatccttcagatcatggtgttattatatctctttttatttttttattttaattttttattttttatatataaatcggttgtgaatcatcacagg

SEQ ID NO: 101501 - DNA, 982 bp, Mimulus guttatus
  Intron number 2 from transcript mgv1a000994m (locus mgv1a0 00994m.g) derived from phytozome v7.0 (chr-ID scaffold_48; pos 46697 to 47678 reverse strand)
tcacgattccttgctaatttcgcagattcaaataggtaactaataattaatcttcttctttaataattcatttttcattttttttatgcttttgcttagttaaatgaatatttatcctaaaaaaaaggacaagaatattagatggaaattaggttgtttggttttgaatttaacgttgtcttacggcggtgttcttggtattttcacgagcaaataagggcggtggatcggaaaaatgaaaaaaaaaaaacatttaatttgatgacaaattaaaagttgggttgatgaaagttgaaacttttaagctgataaatagtgtgatagctaagcctgtagtttggtgctagttagtgcctcttgttgcatgatgatgcatgcaattcttgttttctagctatttcccttttcacatgacccaaacatatatatgtatacgcatgtgtatatatatatatatatatatatatatatatatatatatatatatgtgtgtgtatgaaggctagttcaataggggccatagcccccaccatttttgaaaaaaaacttaccgtatctataatctatatataattagagatttgttatttttcgaacaggtttttcacgaaggtaaaatctcctaattcctaattgtttttcgcataattgcaactacgcttgtgtttgcaaaagcatatttaaaagtagaagttggtgattccgagtgaagttagaattatgagcttatttttaaaaagttggatgtgtctgcaaattagctggaaaatcaattaaaatagaaaaaacaggtactcgggtttatgggtgcttttaaaattattccttaaatcagcttattttaagagaatcaaaagcaaaagttaaaaaaaaaaaaaagaatatggggaaataacttacataaaagattcttatttttttgttcgtccaacgttgttttgtttcagttaaagcgttgaaccaggcgaggctggaggcgaat

SEQ ID NO: 101502 - DNA, 632 bp, Mimulus guttatus
  Intron number 4 from transcript mgv1a012104m (locus mgv1a0 12104m.g) derived from phytozome v7.0 (chr-ID scaffold_164 ; pos 250784 to 251415 reverse strand)
gagtggcgatataggtgctttaaatagacttggtgagtgactatggtttagaatgatgattcttactgtttcaatttcttatctaggaaactcttgcttttgttattctttattatcatgtgccttagcatatcaatggatacaatgctcgaatttacataaaggaagacgcctttgctagatattattttccctctttcacttatcaaacatatcccacgcttgctaataaaaatgaacctcattccgatttatttacccattttctcttttttcagtgaatacggattaataatttacgcatgcgtagaagttttcgtttcttagactcgccatcgctatttctgcaaatttcctttttcttgttttttgagtattttggtgaagatggtggtattttcttcgttttggtagaattttgaaaacaattatcattgtaaaaatacatttaggagattggttatttcatcaaaagggcgtcatatccaattcacataattttacttcctaatttacatctgatgctaaaatgacgttattgatgtgtatgcttatcatggttgccctgatatttacctcttgagtcttacatttgatgaaaattgtttttacatatatgcaggtggagtttc

SEQ ID NO: 101503 - DNA, 715 bp, Mimulus guttatus
  Intron number 1 from transcript mgv1a012104m (locus mgv1a0 12104m.g) derived from phytozome v7.0 (chr-ID scaffold_164 ; pos 251882 to 252596 reverse strand)
gcagatctagatcttgttcgatttccacgttttaggtaaaaatctcgcatttgcaattttgtgttttttccgtacgctcgttgattttgtttcttcctttttttcatttcgaatcggtattgattcgttggtctttgtttcgtgaggatcatggatccgtacatttgatcgtgttcttgtggaatttcagctgttgaattgtcggtttcggtgcgttgaattggttgatcgtttgtttgatttcatttgattgtggttttctctaagattattaagtgtttggggcaaaattacttaccgataatgtgggaattgtaccgttatcttcttggttgatgcagaaatatatggtgaattggtgaaagattcaattgtaataatctttttttcgattagatcatgtaccccgtcggtcggtgcatttgctactttggataatcatatgctagtttcttcttatttcaggattagtaatagattagggttgcttaaggactaattatgaagaatgtgatgtgtagatgggattagtttacaataattagctttagtttctgtttaattattcttgttatttaaactcgtagcgatttctacgagcaattggtggatatatttgtgttttagttaccatttagctgctaaattacctttgaatcttattttctactgtatttatattttgggtgtgacaggttattgcaactgtaagacg

SEQ ID NO: 101504 - DNA, 1016 bp, Mimulus guttatus
  Intron number 2 from transcript mgv1a010536m (locus mgv1a0 10536m.g) derived from phytozome v7.0 (chr-ID scaffold_44; pos 1106706 to 1107721)
attggaagtatattttagggggtctcatctttcaggtttgtttctacttattgttttatgtttaatcgatcgccgttacagttccagagctattcgctaaccgaatcgattaattgaacgaacgatagaatcatgagttatcatgagttgtttgcgttgtttgctcgttgcaaccatgaacttttgtttgaaatctccgaattatatgtcaaataatcgatttgctgagttgtcacccccattgaaattcgatacaaaccaatgttcctaatttggtatttacttgtgaaaggccaacttcacctaccccttggctaacaactaatatagtcgtggctgctgcatatggaatgatttattaaacgaaaacagcacgtattagctgcactgcttttagtatagtttcctaattttgtttaaatgttggtttcttgtgcccaaaataaaacttggagtgggtccacatagcgtaacagagaagcattagcagaaaatggtttgataaatcatctgcaagatgtaaactacagcttttcttgtctgctcttttagaattgtttttatagatggaaagttgttcataaggaaattgcttcctacactaattatgcccgtagttatccatattcctataagtttgccagctgtcatgtataaccatgtcattttagtatctatgaacagctaaagattgtgtctccttacgctatttttgaatttgaaagtttatattaattaggtcacggagttggcatgaagtgagctctagctgtgacttgatgaatgtgatttacttaccctgattttgattataatgtgacattgcaagagtttacgtaaagtggaatttatacaacttttatgtgatgacgtttgctaatatctctaattaaatggatcacgcttttctacaacttataacttcattttcacttctctaattaagtggtttgttgaagaaactttctataactgatacttgacttgtatctataacgcctttgatcagtacatcc

SEQ ID NO: 101505 - DNA, 800 bp, Mimulus guttatus
  Intron number 1 from transcript mgv1a023538m (locus mgv1a0 23538m.g) derived from phytozome v7.0 (chr-ID scaffold_77; pos 763276 to 764075)
ttgtaggcgctgtaatcaccgagcagctccacaaggtaaaacctaaccacttgtttctccgaccttttttcagattcaagatgaattttggttggcactattaaatttctctattgattttcttatgaattattgaaattttttttatgatcagaggattatgtttttttttttttttaataactgcaagtatttgattggtatgcctctagttctaggtcttttaggttgctacatgtggttaaatattcgggtaaaatagaacaaaacccgggttctgggcatcgaattgcgtaattgaattccttcgtttcgtgtttgctgattttgaactcaattgaaatctacgatactaattttgacgaagaacaagaaccacacgtgttgtcgatgtgtctgtctctatgctatttgctttataacttccgttgcattatatctcatatatcatatatatatgtgtattctgaaatagttataattcggaattgtgttttgaaattgaattctgctgcctttattttagaagctcttattacacgagtctttcaatctgcaaggttaagcccgttatcgaaatatgaatgcacgctacttaagatcatttcctgaatggttctctactgtttaactgtattagaacaagcggttgcctatttttaacacgttattatcataataccggtactgaaaactgaaaagattgtggatcaatggcttcagaggcctgttcgactaatatttgtttcgttttttttctcttaggagaaatattgggatacacaccctggggaatcggt

SEQ ID NO: 101506 - DNA, 926 bp, Mimulus guttatus
  Intron number 1 from transcript mgv1a018687m (locus mgv1a0 18687m.g) derived from phytozome v7.0 (chr-ID scaffold_38; pos 1656897 to 1657822 reverse strand)
gggagaaggcatccattcaatcaagattggaagatgtaatggaagatttattgcctcggatacatcagggtttttaacaatctctctctcacacacacacacacattttgaatatattgaaagtagttgacgattgattgtacgaaggacacgtgtcaaatacattcataataaggaagcttgtttacttcttttctcgtgtattcttgtaatactgtttatataagtatttcacctctgaagccggtccacaagtatttacttgccagatatcaaattttgtgtttactatgtcaagtgttatttcaccccatacgacatctttgtttttttcttttttttttttttaattacgtactacaaattcagagtcattaattatttcaaagtaaactccgaggacaagaaaaagttaacctcaagtattaatcatgttgaaaaaattatttgaacataatgtatatatattcatagtaagtaattttataaaaaatcacatgtgggacaattttggtatctttataagtttcaatgggcatagttggaacaatagaattttgaacttcgaaggttagatctattgaatttattgtcacaattttgaggtttaacgatttcttttattattttttaaaataattaaaagtcaagtaattttaatacaaaaataaaaataaaaaatagtagtagtattagaagaacaagaaacaccgcacacaaatttcaatcctaaatcaacaaggtaagtacatatattcgttctagtaaataaggaaaataaataattaaggcgtgcccaacatggaagtattgtgacacatgcaaaatcctaccatatatatatttgcatatatggtaaattacaaattaatcactattttatttcctaattagttcaggtctctatctctgaatcatctatataa

SEQ ID NO: 101507 - DNA, 619 bp, Mimulus guttatus
  Intron number 1 from transcript mgv1a010670m (locus mgv1a0 04315m.g) derived from phytozome v7.0 (chr-ID scaffold_24; pos 290085 to 290703)
atcttcttcaaagttttcttcgtcttaatttcaaggtaattttaatacggcgattttctgttttctgctttagatctgttgattgtatggtaattgttcgtgttaatctctttcgatctgcgattctgtggtgattgtttctgtttaatcgctttcggtgtgtggatttggtgaaatcgtagatatttctgttaattattactgctggatctctttcgatgtgttgattatgtcgtaattgtgtaatttctgttaaatctctttcgatctgtgaaaactatggaaatttatgttagctgtagctgaattggggtcgaattttacctttttcagctgaaatctggatgttgacttgttgaatgaggtttttgattaggtttctgtctggtactggtagatctgttgtcgatctggttgattgttgaacgtgttcatcatggattgttcatgaattatcttaatagttgatttagggcacttctattttttggttatgttctatttgagctgattttttcagatcctatgttgtaaatgggaaatctggatgaagtttgattttttttggacgaagatgttatctactagttttctaacgaaattgtttctgcctatacag

SEQ ID NO: 101508 - DNA, 935 bp, Mimulus guttatus
  Intron number 1 from transcript mgv1a015901m (locus mgv1a0 15901m.g) derived from phytozome v7.0 (chr-ID scaffold_3; pos 1861004 to 1861938)
atttctgatccaaatcaattttgcccctttacaaggtatctcaatttcatctctctttgatattaatcttgataatttctattatttttttttaatgactgaattaatatatagttattcttaacccaaaaccttagaaattaatctgagtttaatcctgctgtttattaattattaataatttggtagatgcacagtttcagtttcagctacttaattgagcttaattaatgtgtgagctatgttgcacatacacaagtcaactgctggaaatttgtttggggccattttgtaatttccggaaaggtagaaatgtgcttcaattgcaaatcccagaatttttctgtagcttcctcaatttctttacatgatttagtaatcaatttcatgtcattgataatgatagtcatattttcttgaacaaatttatacgaaaatatattatagaaatttagtatttttaactcgtacccattttcggaagcatagtatgtaaaagagagttctatcattcggcaagataacattttttcttcaatagcttatagttagataaagagtgttctttcttgaaaacgagccgtacatgtttttcattactagttgttgatttcacaatatttggtagagctatgtgaaacgattagtaatcccaaatcgatgttcgataacgaactcaaaataggagaaaaattagtttttgcagctattcctttttaatggcatttctctaaaattaccgaaaaattgcaataatcgtattcttgtaaaccattttagtacatagtttttgtagcttactataatattatactttgcatgtttctattcatttgctctaaaagatgttcgattatactttaatgcggaattgctaaatcgtgttatagtcgattaatataatcgtgcgcagatattataaggtttgtcaaatt

SEQ ID NO: 101509 - DNA, 335 bp, Mimulus guttatus
  Intron number 1 from transcript mgv1a005245m (locus mgv1a0 05245m.g) derived from phytozome v7.0 (chr-ID scaffold_2; pos 3372254 to 3372588)
gatccgtacaaggtattattgattgtatttgagttttaatcttcgtttgtttgatggtcgagttgtcgtttaatttcatttttttttgccgattatatgattgtctttggagttttcggtaacttgtaattgaaattcttctttctcttcatgcaattgagtgacctaattgattcttaaatcgtttcaatggcttgggttggttgttaccgaaaagaggaacggatttcgatatttaatttggtttttttgattttgtgtgatgaaatttgatgtattggtgtttgatgattggtgcagtaccgtccgtcaagtgcgttcaattcgcctttcat

SEQ ID NO: 101510 - DNA, 899 bp, Mimulus guttatus
  Intron number 5 from transcript mgv1a004958m (locus mgv1a0 04958m.g) derived from phytozome v7.0 (chr-ID scaffold_122 ; pos 23760 to 24658 reverse strand)
tcaaggttaatatgatcccctttcagtttttcttatacttatcgtggatgaacttgtctagacatattacatgcttgagatgaactgtgtcacttactgcagtctatatggcgaaattgctggtgagttatccagattggagtttgttggggtctatgtatgataatatgaagtcacaattttggctattcttatacatttctgaaaattttaacggaacatgcacatcgagtttgaaagctttgttgtcttctttgcggttggttgggtgaatgaactgtaggtctttaagtaattttatattcttgttttcttgaatagaatgaagatggtcttcattttttgagcatttaagcttgtacagtgaacatatcctaataggaggaagttggactgacgcttcaaaaaacttgctcaatatggatcttactcattgccagctaatactgaccaaaaaaaaaaaaaaaaaccagcgtgaaccactacacatcaagatccgcagtatattagtcgaacagcgcatcaattgatatgaaccaaattttcgtatgaaactgccaagtgctaactcaaccaaatttcattgtgaaaatgccaactgatatgaatccaattagtttagaatgtaaaattctgctcttctatttaaccataaatttcacgcggagttaccagcaaagagtggttattggttttgttaaagacagcaggattcttaactactgttaagggtataattaagccggatttcatagtactctgtccttgtatcatcttaaaatatttgtgaactggcaaaaatgatttggttggggattactttgaggttgttgctgcggttaagtcgatttttttttattgcaggttttgtttagacatttgcaggaacaacttcttgt

SEQ ID NO: 101511 - DNA, 569 bp, Mimulus guttatus
  Intron number 3 from transcript mgv1a004370m (locus mgv1a0 04370m.g) derived from phytozome v7.0 (chr-ID scaffold_108 ; pos 339764 to 340332 reverse strand)
ggacagggctttaccttccatctagcgatatcgatgtaagcttaaattaagccttcaatcattgatgatggaaattttgtctgactgttttttttttttgattgcttgacaagtattatgtggtcgtctttctgtccgatgaaaagtgaattgctttttactcatttgataggactgtgggccatggcaggtttaatgctatcgaacgactttttatctatttgtcgtgttgtataggagtaacggcactacgccacttgtcatataaacctagcttgagttgtaaataaaaatatgttggtcataatgacagctttaatgtctttgcaacggaataggatcgcaagttctcgtcttgaaggtgtttatcgtaaatattagattccatgaatatatatttttttaaattattttctcatgaagagattcttaaccttgtttattatagtttattttcacttgaaggatttgctctccgagcctgcagattttctttatatcgaaggattctttcgcacatgtttttttttaatacgtcgatacatcgcaggttgtgatattggattcaa

SEQ ID NO: 101512 - DNA, 771 bp, Mimulus guttatus
  Intron number 2 from transcript mgv1a005864m (locus mgv1a0 05864m.g) derived from phytozome v7.0 (chr-ID scaffold_66; pos 1066291 to 1067061 reverse strand)
tgtctttactccgttggcctgtctcaaacgcatcggtaaggcgctctactattgaaatttatcgaatcgaaattaatttttgaattttttttttattattgatatttgagtatctgtataatatggttgtagaatcgaaattcgatccttcttgttaccggtctctaagtcgagctgataagtagaaaacgaacgtgtaaatacaattgtttgtaaattaatcagctccgattgatcaaaacttaattgtcataagtgccgtaaatttaattcctttaaagtagatatgatccacgatttttaattatttctgatattacttaaatgtaatgtggaaatccaattcaaacatttcctactttggaacaatatctttttattctgaatttcgaaagttctgattcccactttttttcataattaactgcactcgaatccttattaaattttgattttcaatccgacttaattttcgaaaaaaaaaacatttgatttttttttcttccgaaaattatgcttataatattaatcatattatataattttgcccattcgatccgaaaatttctgatctttgaacaagttttttcattccaatttttcatttctccattatttttccgaacataattggaattagttcttcactttcgaaaaaaaaattagattttttatgaaagtgctaattccgatccgatacatccgattttcaccccacgattccttttctctgcagattcattgagacacacatctgcactggcagtattt

SEQ ID NO: 101513 - DNA, 834 bp, Mimulus guttatus
  Intron number 1 from transcript mgv1a019376m (locus mgv1a0 19376m.g) derived from phytozome v7.0 (chr-ID scaffold_9; pos 1266506 to 1267339)
gttcattactacggcatgtacaagagcaacatccgattgaattcggcttctcaaatacaaacaccgccgtcgaccgaagacacgtttaaatatactattattgaactaagcatgtttcaatcattggacgacacacgcgcaatgcgtgtaagaaaaaatgattcgatttaaacgtggatgatttcttcaacaataatttgaagttaacaattattagtgtttaaattcaacttttttatttattttgaatttaaaattaagctcaagttttttcaagtttcaatttacttttgtttttttaactataattcattaaaaaaaaattggactgtcacggaacccttccactgtcgaggcggtacccgcggagacggatatccctgaagtttgtttcagtttttgtattttttaaatgaacgatttgttttcgatgtattttctctatgttccttgcttttgaaacgattcctttctttatgccaagtatgtacagttgtggagttcgcctgaaaataccaatttttgagcaacttgctacaaaaaaacgagtttagatagacacgtgcgaaaaaaattatttggggggcaaagtgcaaaataagtatttgtataaggagcaatccggtattttactctatatttaattcgcaacggacaagaatctgtattttctttcaggtcggcctacgaattatattgcatgtcggggtgggccataaaaaaaagacgaaagaattgtcaagaataaaaaccctagccatgtgatatcaccctccgctcactgtaaacccttaaaagaaccaatagtacggttgaaaagaaaaaaaaacagac

SEQ ID NO: 101514 - DNA, 998 bp, Mimulus guttatus
  Intron number 3 from transcript mgv1a004513m (locus mgv1a0 04513m.g) derived from phytozome v7.0 (chr-ID scaffold_235 ; pos 271151 to 272148 reverse strand)
tcttttcgcaatttactttggttgtggccacacaggtgcgacttagagtactcttcattcacaatatatttgttacatcgttagaattataaatgtggtcgacagataggtagatgtgaagttcatgctttattatttgataaaacaatgatctcttgtattagtgtagcttggccgtcttttcgagtggatttaatgtaaattattgatttccgtacctcaaatttagtaggggattaacatatgctatatgttttttacttgccattcattaaagcagtaagactaaatgttgttcaagttgtcgtctacttgtacaaggtagttgctgtttgaaaagttgttgtgtccacggaggtagttcttgttatcagcatatgcaaattggtttgcttttctccacctgaaataaaaccttggtcttggtcttggtagacttggcttctaagaagtgagaacaatgtcacctttcgtgtttggtctaatttaagttaatcttgagaaaattaagtataaaaaaacatacctgacaagtgcagggttatcatcagggttgcaactacttctcctcgacactagccaaattattatatccttcatcctaggattatcaacacactacctccaagttttgccgtttattcaactttcccatccattaagatttgaataagaagtagcagtatcatcaaagaagttatttagacttcctagtttttcgatcctcatccacatatttattattttctgaccttttcatggacaaccatctatcattattatttccgtattacccttcaatttgatggactttaaaacataattgttactgttgcaaagcatcaccgtgttgtcaatttcttttctttatttttaactgtagatgtcttatctaaatactcattgtttggttccttgaagctgctatattatgaatagtattctaaattatctgacaaatcgtgtcttggtgtcttattcagcttgttgaatcttca

SEQ ID NO: 101515 - DNA, 707 bp, Mimulus guttatus
  Intron number 1 from transcript mgv1a016047m (locus mgv1a0 14628m.g) derived from phytozome v7.0 (chr-ID scaffold_1; pos 225803 to 226509)
gcaaccttcctcagtcaagtaagttccttctcgtgatttttctgcttcaattgttgtttctggattgttgatctcaacttcccgattcgcaagatctgatattttctgcattttttttctctcgctcgtagctgattttagatctgaaatgtcagcattcccctgttgatctccctttgattcgtataatttgtgtgttttatatccaatccctttcagaaataatcgttaatttgtaaattatatgtagttcctttgaagaatcaagcattttgatcgctgcccggtgtgtgtgtgtggagatatttattggcaaacagaaccttaaatttgatatttggatgattatgagtgataattattttttattaggaaatatataatcaggactgtgtgcgtgcattttttgtgtaagcgtgtgagatgcattttgggatcacaattcacacgtgtgccctgtatgtgtgaacaatatcagtaatatgaatagtggatatacgagttcacttttataattatcgtaaaatgtgtgtgtgcgcgactatgatctgataaattttggtttttggcgaatgatgaagtgatcagtaatgtaattaggaattttgataattagttaagtaggtgttaacaatgatttatggctgtaattttgatcacgcgaaaatgtaggaggcttgcccgactataaagaacattcttttgtt

SEQ ID NO: 101516 - DNA, 527 bp, Mimulus guttatus
  Intron number 1 from transcript mgv1a002818m (locus mgv1a0 02818m.g) derived from phytozome v7.0 (chr-ID scaffold_7; pos 2847932 to 2848458 reverse strand)
tttctctgcgagctgatcctttttcttcctttaaggtgcgacgttttttccgagcttttgtgtttgtacgaagcgagtgatgagttatattttgtttcagattttccggtttttgtgtgtgtacgcgtctgattaagcttttcggtgctccgggttgactcggttggttgtacctggtcgactctggtgaaatgtaaattctgattctctcgtaatgattattctatgctgatgatacatttttttttaatatactttttttcagcaattttgatggataatgcatgactcaaaactgtttgtgtagtgactagggattgtatactcagcattagtatgaaaggctgattcaatgtttgagtaactatgtcgtgtatattgtggcacggttagggtttgtttttgttttttattttctgcctatgccaagaaaatcatttcactttttaggtgatcaagttatggtttgagtagcttctatttcttcttttcctcgtcatttatatttgcacaatgttgttattcag

SEQ ID NO: 101517 - DNA, 470 bp, Mimulus guttatus
  Intron number 1 from transcript mgv1a012955m (locus mgv1a0 12955m.g) derived from phytozome v7.0 (chr-ID scaffold_51; pos 519110 to 519579)
aaatcactcgcctcaaagacgacgatctctttacagtattacatctttcctttcaatttctttgtttatacgttgcccgttcgtttttatttgctaattttttgttcgtcggaaagttatatctgtgcatgattgaccattgattttatctttttgtgatcagttttttgattgttgaaaatgatcatttgatggattttttgtattgtagctccatattgttgaatttcaattgttcccatcacttcatcaattttgcacgctttaccaaaatttaggttttgcaaaagtgaatttgaatatttggtttaatattttgtgtagtggatggaagattgtgcttaatataccagtaatttgtgattctgagctcccaattttaatatccaatactaacattgatgtagtttgtttgataatccttgtcgttttggtttgtgttaatcagattccaaactatttaacttgtg

SEQ ID NO: 101518 - DNA, 358 bp, Mimulus guttatus
  Intron number 1 from transcript mgv1a003827m (locus mgv1a0 03827m.g) derived from phytozome v7.0 (chr-ID scaffold_68; pos 1049271 to 1049628 reverse strand)
accaccgctgggtcttgcgttttcctattgttcaggtttgttcatattttaatattgctttttttctttcagttagtagcatttgatgattcgattgttaatgctgtattggatcgaatagtgggtttgtaatgatggttgactaagatgaagagatattttgaatatagaaaataaatagtgttacattcccgagcagagatttcacatattgttcagtaaatttgcgatcgagcttgtgctcaacgaagattgtttattcgttagaaatgagattcttgttcttatccatgatattcattcttgtgctaacacaagctacgtttatcaacagcgtcctcctttcttcagcttgaag

SEQ ID NO: 101519 - DNA, 606 bp, Mimulus guttatus
  Intron number 1 from transcript mgv1a014106m (locus mgv1a0 14106m.g) derived from phytozome v7.0 (chr-ID scaffold_60; pos 437205 to 437810 reverse strand)
cggatttcaattttcaacagcaacttagctaataggtaacttcttcttcctctccctttctaattgttgaattataccgtgttgttcttcgtacaaactcgttgatttgatgcttcatcagtagcggatgggggttccgattcgttccattaattgagctgtggtaggatttttttttttgaaattttaaaccctaattttcataattggggttttgtgatgattctggcggcagctctgaactgaatttgtgattttgattgtttagggcagaaattgtaggaatataagtaaaaataaattgcgcgcgacgttttatcttgtaaattcaattttatgtggaaacacagttgaagctgttcatagttctgggaatggagttgttcaattgattcatctatgttttggcgattgcttggattttcttttttgtcctttaaatcctgttaatatctattgagaagaaataatgtcagaagaataatttaagtcgaaaagaaaatatacccgatgttcgtttgtcctaacttgttgggtgtcaaaaagttcgtaagctatctgttctggatatattgatggattttgcttgccctgtttctcttccag

SEQ ID NO: 101520 - DNA, 689 bp, Mimulus guttatus
  Intron number 1 from transcript mgv11b019841m (locus mgv11 b019841m.g) derived from phytozome v7.0 (chr-ID scaffold_4 ; pos 1418618 to 1419306 reverse strand)
cttgttggtggtggtgcggtggtggtaattgtgcggtgagtgggtcgctggtcatcgccggtgccgtgaaagtctcgctggttggcagacgtgatatttttttttgttgtttttgttttttgttttttttttgatttttggtcttgaacaaattaaaaataagatttatttgtatttgagtattatttgtggataagagtatatttgtcatctttggtcttgatgtaataaaattagattaatttacgggcttgaactaataaactcctttatgtggttttgaactaataaaaaaatagacttgtatatagccgccgcctaaaaattattcattgagtaaatcagaataaaattgatctataattctatataagaaattaaatatataattagtaatatacgattcttcagtttgaaaatcttaaatcgcgtgttttccaattagcgaccttaactatgtcacagtcacccagtaaagcgctactcgaagtgcagacaggcgctttaacatcactttaacgacacgtgtcacgtccccagaagattctctctctctctcatcggaccttattctgtcgtccccgtcgctttttctctctctagggtttgcgtccatattctgtctgtcgtccccgtcgttttttctctctctagggtttgcttgtccaagcgaattcttctgcggccgg

SEQ ID NO: 101521 - DNA, 191 bp, Mimulus guttatus
  Intron number 1 from transcript mgv1a012884m (locus mgv1a0 12884m.g) derived from phytozome v7.0 (chr-ID scaffold_379 6; pos 3514 to 3704 reverse strand)
actgatttggcctgcgatacttgtggtactgctatacgcgtttcctcaaaataaccccaaacaaaattaatgaaatcccttttgctaattattatcgttttttgatctttttaagttcgttcatttagtattcttcattgatgtttttttcttcaggtggaactggcgttcctccgggtacaaggcctgaa

SEQ ID NO: 101522 - DNA, 974 bp, Mimulus guttatus
  Intron number 2 from transcript mgv1a011206m (locus mgv1a0 11206m.g) derived from phytozome v7.0 (chr-ID scaffold_27; pos 1045984 to 1046957)
agggagagatcgcttcgatatttgcttgtggaacggtttgtttcctctttcacacaagtgtttgcaaatatagctttagcttatcgtacgatttctgggtaaacaacataaaaccccctgtgttaaggaaaaactgcgccatatcccctgtattttttttcttgcgtaaaacccctttgtattttattttactttgcacgaaatccccttttccgttaaaagttaacgcattaactatagagggggttttatgcaagttttttgtaacataagggcatttagtgcatattttctacaatacaaggggattttatacaaaaaataatttatttgtttaaatatcatattattttctgaaattaagttaaacacattcagtcaattaaaatatcaaaaataaaaacttaataggtgttgtgaatgtttttttttaaagttaattattatatgatatataatttattaatgtatgaattttgattttttaaatatataattattttattagaattattatatatgtttataatttattcttgattatttatatgtgaaaagagcataaataattgagtcattccaacttccatctcgagtattattttcttagctttcgtattttaaattaatagatatattcgatttaatttaagaaaataatttgaattttaaatgaataaattaatttgcgtaggccccccttgttttgcaaaatcatgcaccaaatcccctgtattacaaataacttgcataaaaccccctctatagttaacggcgttaacttttaacggaaaaagggatttcgtgcaaagtaaaataaaacgcagggggttttacgcaagaaaaaaaaacacaggggtatttggcacagattttcctaaacacagggagtttttatgctatttaccctatgatttctttaccaaattgatgatgcagccacaagaagtggagctaaaagcaagcggaaccat

SEQ ID NO: 101523 - DNA, 819 bp, Mimulus guttatus
  Intron number 1 from transcript mgv1a013071m (locus mgv1a0 13071m.g) derived from phytozome v7.0 (chr-ID scaffold_51; pos 730185 to 731003 reverse strand)
cgtgggaatctacgaacaagaatcttatcttcaatgtatgaatccgctttcccctcgatttctgttcttcgttttcgttgaaattattgctaattgagtactgattatatatatattctgtctatacagtatagttattgattttgatctgatgaatgttgaaagcatctgttagggaattagaaagtgctgattaggggggtgatgatacacgtgtactgctataagtggctaactgccttgataaataaatgaacatgagcaatgaatgaggtccgaacataattgggagttattttgtttagggggtgtaaacgaatcgagtcgaattgaatacgtatttgttcaattttgttcgaattattatcgagctcgagtagtatgtgttcaaggcttaaggtttggttcgttatgtttaacaaactgatctaaaccgagttttttttcaacgaacggtctctaatcgatctttgagaagcttggtttgaaattttcagccctaattctgttaagtcagtagcataaactggcagctgatgaaaatcacttcatctgaagtttatttccttttacgtcactgcaaattaataactgtgcacggtttcgtaattgaatatattcctacaacgttttactcccgttacaccagagcagtctttcttgtttaagaactttcgggtttttggattttaggttggaaaatagaaacgtacatagatagaaaccttgtaaagatcaccgtacaaaaaactacggtagttctaatttgtaaatctcatatttttattctctgttttgctccagctacatcctgttctg

SEQ ID NO: 101524 - DNA, 606 bp, Mimulus guttatus
  Intron number 1 from transcript mgv1a006895m (locus mgv1a0 06895m.g) derived from phytozome v7.0 (chr-ID scaffold_92; pos 1004847 to 1005452 reverse strand)
gtattttgaagctgcagaaatctgttcaacttagggtcagttttttttttttttttttttttcaattattgattcgcatatttttagtggattaattgaagtgggtgttgttttattaaatcatcaatttcatcgatttgactgagtaattatgtttctgaattttttattaagttccttaataacctataacgttgagaatcaatcaaagcatccttaattcatttattagggttttggattacagttttgattgattctattacactatttctatatgtgctggagctggactgtgtacttaaatgctcgagaatggtactcgagctcgttcgatttttaccttcgtaaacaaagaaaaatatttatgtggaattaatggctgggagtgattcccatttctgaattatatgtccaaaataaaattaagttacaatgtgatgcgcgtaaatgagtttttgtatttcatttagtttaattcagtaagtctctatgttaattcttttcttcctaaagatcgctcgggtttttgttcttgcactggtttttgtgaaatgtcttaattttcttgaataaattattttgcaggatcaagtgctcctaagc

SEQ ID NO: 101525 - DNA, 853 bp, Mimulus guttatus
  Intron number 1 from transcript mgv1a002861m (locus mgv1a0 02861m.g) derived from phytozome v7.0 (chr-ID scaffold_121 ; pos 308840 to 309692 reverse strand)
agtgtttcaagctcataaattacattaggtctcaggtattatacataaaatatactttttttttatttgttttgtttgtgttgtgtaggttttagcaagtatgtgttaattggtttcatttgttgttcattttgtgaaagtttatgctgctaattctccctcagtaacactattttgctctgtgcccagcttaattgatttcgtaggtacttatgttgaattgattgaactaatttttctttctgaaagtataatgtgtgtgtttctgaggaacaagggcgttttgttgattgtattttagcttggactacaaatagtcgtttcttggtagtatatagtatatgtagttatttatataatgtcttgttatcattttaatttatgttgggattttacaggagaaaaaacgtggttttttttgcttcatgggtatattcagtggattcttattcacgatttgttttcgtgtctcgggttgaaacttgcttccccttttcagtagagttctttgccctgttagaggtgaagaaaattgatgcggacattaccacatcttgaattaatatgcaattgtctttttccgaaatagatgattgtcgttttggcagtaaaaagttcgttaagacaaaagtttgtggtagagaatggaaaacgagtagtatttggtgtatagagaggttccctgatttctatgtgtgtttacctactctttgattaaaacgaggtctcaattgaagccatcagtgggataatattaccatttgattatttcatcaacattattattaaacttaagttactatgtaggttatttcatattttttgctttcaattatcaggtggcagtaaacaa

SEQ ID NO: 101526 - DNA, 927 bp, Mimulus guttatus
  Intron number 1 from transcript mgv1a001749m (locus mgv1a0 01749m.g) derived from phytozome v7.0 (chr-ID scaffold_90; pos 759572 to 760498 reverse strand)
ggtctccattgttttccttcccttctctcccacaggttcggacttgctgcttccatttaaatcgttcactgtctccatttcttctctactcgtcttgttttcgctttctactattcgattttcgtagtttccctattttttcttttcaaactgttttttttttcttctttcgctttactggtaagagttcgttgcgtgatctgctgcctttttaatttttttttttttaaatcgtaattgatcagaaatttacgctatgtttgtgtatttaagtattaattaaaaaaaacatggtgaaatgacaatagaagcgacttgtgattgggtggcggggagtggattgtgaggatagggtttaaatggttgaattttggggagtggtgattcgtagatctggaattttgtagccctgcactacacggatctgatatgaagtggcttttgagtgtgttttgttccgttaaatccgcgcgcggtgtttcaaattactgttcgtgcagcatgtattctattcttccatctggatcttaaagttgatggatctgattggttgatcagtataggctccattcactgcatgtgtttgtagaatttgaatgatgtcgtcttattattgcttagagtttgtgtcttttgtatctgtatctcatttcgccgatttcgttgggtggtgcaatctagaagtgcaatccgtttttacgtcgattgatattctgtgatcctgttttttttacatgtgatagacgaattagctgacggatgatgttagaattttgtgtaactgagatctcatgcaatcgattgctaatgatatgattagctggctgggcttatagtagaatctttatattaaaatttggaaatggaacagtttcttaattgatttttttgtatgatttcattgattgaatttgttgtaccagaaaa

SEQ ID NO: 101527 - DNA, 500 bp, Mimulus guttatus
  Intron number 1 from transcript mgv1a010485m (locus mgv1a0 10485m.g) derived from phytozome v7.0 (chr-ID scaffold_75; pos 566418 to 566917 reverse strand)
ccgccatctcagtcggtctcgctcttcaattacaggtttctctcactttttcttcagttctaatttgcaacgtttgttcaagtttgaggttcagttttcatgattattgtttttcttgttgtttttaaacacaatgacaatccaattcatacgaggttcaggttgtaattgtctcgctcacagtgtttctggtgaatttcgaacctgggttgattgatgcattttgatttttgcctttttagttttgtgttcgatctactttattaaatttctgttgataaataaaaataaaagtaaagaaaaagattaaccctgagagaagaaatgttacagtatatttcctcgtttgataaactgcgtcgtgtcgtcgtgtttctagttataatgctggtgaaaatcaagtctaagtttgaagagtgctgtattaatttgacgtataatcgtttattttgttttgtggtgaagggttttgatcgaggttttgtaaagtgcgaagcaat

SEQ ID NO: 101528 - DNA, 994 bp, Mimulus guttatus
  Intron number 1 from transcript mgv1a002524m (locus mgv1a0 02524m.g) derived from phytozome v7.0 (chr-ID scaffold_7; pos 1979753 to 1980746)
ctggtgggcgacataggtaatgattttatttttcttgaggtttttttagttgttgttttacggagtgagttgacttggactaggatgtttacctgttgagcatgggtgagtttgatcattatttagatgacatgagatgacatgttaatttcttggtctgggtttggttttctgttagttagtttgttcctttacaattagaagagaatatgaagaatctgggcaagaatgagaaattagcacattttgaagagttgtaggtttgaaagagggttaaattggttggttaagttcctctaatttgttgaaaaacattgttttgaaatttaaggtgttttaatatacaatttaactatgtgggtttaagagcatcctgcagaaagagatatgtagcaaaacatataagcttagtttaatcaccattgcgttattgtttttgtgtgctaaatataggatatgatactattcattattttcatgctctatatttgtgcttcgtacattcacttgaaaaagaagggtccatgttagcagatatagtcggcatatggatgattaggatgaccactcgaatacttcggttaaagtgaaaatgcaactatattattgtttgaagttcttcaattgacaaaacatgcgcgcttgatactcattttggttcctgtatttatcttattagttttcatttttcaactatctagagtagaagttgtcacatgcctttgaaacttagcttagtttgcatatctgaagagccattctaaattgaagcgatatacatttactggaatatacttatttaagtttaatgagaagtgcctttttttctgacattatatacaatgcaggttttagatcattgttagttcaaagaccttgcaattacgctgccatgctattactaatcttttttagagttcgttcagaaaaaaaacagatttgcttacttgtgtgtactttgttgttataggcgaacgcttggtggaagaaaatt

SEQ ID NO: 101529 - DNA, 675 bp, Mimulus guttatus
  Intron number 1 from transcript mgv1a006961m (locus mgv1a0 06961m.g) derived from phytozome v7.0 (chr-ID scaffold_15; pos 1013254 to 1013928)
ctctgccaaagtgttcttcgaggagtgttttggtaaagtttttattctctctgtttgattagatcgtttctacatggattttttggtatctctggtcctcgatggatttcattatttgttttgaatgattggtgtttggattgtgttttatgctgatctgaatgtttgtgatggaagaaatgtcatcctgattttaattgtcatcgaattgatatcaatgaacacagatctgagatctgagatcaatttttttgtgttttgattatgaaatttctgaattaatctgatgcgagatttgcatcaattttataatgtgagctaagggttggcgtcagcccaatttgtctatcttaatttcataatttgtctatgtttagtttgtgaaaacatttttgaatgcagacatatattgacagctgattttgtgatggagaaatattaagaatgcttgcatttttgtaaatgtacatgcttatgaaggttatctgtttttcgtaattgattatgatggaagctttataaatttggaaaatgcaaattgaatatgtgacgattgttgcagtattgatataaatataattttcttaagataaaacatgataactgagttattttattttatgcaatcgatgaagtaatacttgtttccgttgattgttttgtactgatctaaag

SEQ ID NO: 101530 - DNA, 1042 bp, Mimulus guttatus
  Intron number 1 from transcript mgv1a023665m (locus mgv1a0 23665m.g) derived from phytozome v7.0 (chr-ID scaffold_13; pos 1776027 to 1777068)
gtcgcttccccggatcacgttccaaagaattgcttgtaaactcttgatcatgtataactccaatatcgataatagaaggcccaacaagttcttgttcatcaacgagagaagaactaccaacattagatgatgacgattctttaagatcacgtttaaaatatgaatcgatcgtattatgttttgttcgcttgggtggaggctttgacatcggaacaatagtcaatagaacctacaattcaaagaatcaaaatattttaccatttagaatataaaaatcaaaataacccctaaagcccgaacataagatttcaaacatgtgatagtcatgaaattgataaattcaaatatcaaacaaccctaaaataaattccaataaacccatcaaatgtaaatgtcaaagaacccttaaacatgtatcataaaacataataagtaatcacatactttttataaaacaaaatatatatttaaaaccctaacattaacatacatctcaaaaagagtaaaagaaaaatacataagagagaagatgaaaattaatattacttgataaaaagaggatgaatttgaactttgaatgttttttgtttcccttgagaaagagagagaatggagactttgagagtgagaagaggatatttagaactctctgtttgttgacgagagagaattctatatttgtactcttgtaaagaagaaaataatttttgtctaatatattgacttttataattttttattatatttaattctctgaaaaagagaaagaggaaaaaacaaatctttttttctataacaccgtattacatttggcggtgagcaaattttcaaaagaaatacaaaaagtctggtggggccaagactctacttcttaaaaaaagaaaaaagcattaaaaaattagtaggattttttttttgaggggcggctgccccccccgccccatctttcatccgccactgcacacaccctctctcgatttcgacactgatcaaagtttattggacaggttttattacgaggacgagttactcgaaagtgaga

SEQ ID NO: 101531 - DNA, 996 bp, Mimulus guttatus
  Intron number 1 from transcript mgv1a014529m (locus mgv1a0 14529m.g) derived from phytozome v7.0 (chr-ID scaffold_71; pos 1181945 to 1182940)
atcaagaacctgttttttctggtaaattttcgtgtgattttattcatatgaagttgcagagtgtgtttgattttaaattcgaaagtgggattttttaattagttcaaaatatgaactgattttttttttttttttactattgcaagattattcatttgggtattttgttttggtcctagttattggattcattgttttaagaatcttgaatgctcattggctcatagagttctaaaataagcttaaagtagtgcttagctggcagctacaggattaatcagggtggaaatcggacgaaatggattaaagggctttttcggaagtaaaaatgtaggttacaattttttttccgaaaaaatcggaatgcaaaaattcattccgatttctgaatcggcggaatttcgtagatttcgaaaattacattagtttataatctcttgttccaaatttagatataatttctctggtaaatttggtacaattttcttcatattaagttgcaccgggtgtttgattttaaatttaaaagtgggatttttaattaggtcaaaatatgaactgatttaatttggggttttttttcttatcttagttattggatttattgatgattaatctgggatatgtacttttattttcaagaatcttgaatgctcattggctcatagatagttctaaaacaagtttaaagtattgctgagctggcaaaaattcattccgattgtttgttatgattttgagtctcgtcgcaaattgattttgcttcttagttcgaagagtaaatctggaaatcaacggattattcttccatttgcgaattgaagttgtagactaagtcgaatttaatcaaacaaaaaaaagatgttgtaatttgtctctcaattcttttggttcataaagtcgttatacatgattctgttcacactgctaacggaatattccttaatttcgaatgtaaaaggaccatcctcttcggctcgtgcgcaactcaatctc

SEQ ID NO: 101532 - DNA, 685 bp, Mimulus guttatus
  Intron number 1 from transcript mgv11b023134m (locus mgv11 b023134m.g) derived from phytozome v7.0 (chr-ID scaffold_2 82; pos 259824 to 260508 reverse strand)
tccatttgagcgagtgtgtttgtgcaggtttgttgatttgtattaatgtcctaggattgtagtttgcgttttcatgatcctttttgcgaatgcagttttgcgtgagtaattttgtgcatgattgtgtacttttacttatgtgcgtatcttttgtagcgagtgtttttgtgcacgtttcttgatgtgcatttgtgtcctcgaactgtagcgggtattttcatgatcgctgttggaatcaaattttgaccatgttcgagtccgaatttggaaatttgacattaggcaggaattgtagccagctcaaatagctttctaatgccgccagaaccagtcgatttggagtccggatgagaaagttatgctcgacttcgtggacgctaccgaagatgttgagggatcctctcttctatttggattttattttcctaattgtaactcttttcttactctttgatcatttttgcttcatggacacctaattatcaatttgtacctatagaatactaaatccaccaattaaaaaagaaatataaattaatccataaaaaaatccacgtaaacgtaaacgttgagtgttatttctacactccactatatcttttgtatcttgtgattttgctgttgtttggttatgcgtattaaagtcctcgtgttgtacttcgtgtttataagaactttgttggga

SEQ ID NO: 101533 - DNA, 440 bp, Mimulus guttatus
  Intron number 1 from transcript mgv1a007652m (locus mgv1a0 07652m.g) derived from phytozome v7.0 (chr-ID scaffold_66; pos 823865 to 824304)
cggcgacgcgcgtgaggtaaacattccatcttctcccccattttttgtttatgtatgaactgaaaaagacttgatttttattttcacttttctgggtattgatcctctgttgcagattcacgattctgggttgccttttccatgttgtgggtttattgtttttttattttttaattaatgggagtagccgagtagatcgaattttccattctgtggttttttcgtaaataagatttgagatcctctgatttaattttgtgttaggtcctttttgtttttcttttgattgttcagtccttcttctgcatttgattgtgctgctgctaaaattcagttgaattaaattatctaatagttaatcacaaaaacatcctttgtgcatctattaatttgctgctgcgttcttgaaaaaatcgcaggattcgagtcgaacattgagc

SEQ ID NO: 101534 - DNA, 966 bp, Mimulus guttatus
  Intron number 2 from transcript mgv1a019525m (locus mgv1a0 19525m.g) derived from phytozome v7.0 (chr-ID scaffold_131 ; pos 636181 to 637146 reverse strand)
gaggcgcactatccgaggtttggcagttagggttttgtgttcatcttccttttttttattctaattttgtatgatatatttgtcattatagtctgtttgattagtgcgtaagttttgtgaataatcaagctcgaacaaatgcttgagttttaatgccttacgccagagagagagggggagagagaaagagagagagagagaggaatgtatcatgtatgatctgattttatataataggatttgtaattaaagttgtgtgcaccttaaaggcttaaacatcactgtttgcgtataaaataattttagttttttttttttttttctttctggtgaatgacaatctgtaaacgtaggtactgctcgcaggaataatatttcatagcatccgttttccgtaaaacgtttgaatgtcatatcttcactagttatccatcctccatgtattgttattgattagatgactggaatgccgactgatcaaactgtctaactagttgaaacactcaactgtattgcattttgttgtggactccctgaatttcctcaagggaatgtatttattaccagatagctggtaaaattgataatttcgatcgtataggtacaatttgtatatgcattggttattcgcctatcaaaaaaaaaaaaaaacaaaaaatagtttaccaagcactgaaaaaaaatggcctataagaaaattattttggcaatatttagatcctttgatagatttaatttctcacactgaaatcatatggataaaatatccgaacatgttgctcgttgtcaaaataattttcttataggccattttttttcagtgcttggtaaactattttttcatcaataatgttatcttgtgttgtccgattcttggttttatgctcggttatagttgattcttgaatttgatgttctgtggtcttttaagattcatcaacggtcggcagacaggatcctaaaatt

SEQ ID NO: 101535 - DNA, 782 bp, Mimulus guttatus
  Intron number 1 from transcript mgv1a010498m (locus mgv1a0 10498m.g) derived from phytozome v7.0 (chr-ID scaffold_26; pos 1033650 to 1034431 reverse strand)
tcgtctctcctcactcgaactcgattcactaccaggttcgctttacacatgcttattttcgacattattatcggtgtaaactgattaggtttcatacgttatctgagttttttttcgatttcaatttgtaaaaattgcggttgtttagttgttttcgtcttcaattggttgcaaaaatttgctattctgaatgtggattatgttttatgattgtagtatgctgcttatgaatagcaatataagtgaagaaattaaactatctggaagaatcaattagtttatgattatctaaccataagacgagcgaacagataacactacggcgctccgggattagcacaagcggttaatagatcttaacgtgtgttgtttttgaaaatttaacattctggacatgctgattgactttcattatctgtaaaatatacttttctgtcgtcttaaggtggtgtttgcaaatgattatttaaaagcagaagttagtgattgtgatttaagttagttttaagtgcttatttctaaaagttgggggtgtttgcaaatatttcggaaaatgaactaaaattgaaaaagcagggttatgggtgcttttaaaaaaatagcttaaagcagattattttaagagaagcaaaagcaaaagttaattttgcaaacatctaaaaacagattatgaggaaaaaaaaccgcataatcactttcaaaaagcatttgcaaacaccacctaagtattatttgttctggattcgtgaagtgtaatttgaattttatgaattagcagaaac

SEQ ID NO: 101536 - DNA, 519 bp, Mimulus guttatus
  Intron number 1 from transcript mgv1a003839m (locus mgv1a0 03839m.g) derived from phytozome v7.0 (chr-ID scaffold_22; pos 641721 to 642239 reverse strand)
tacccgatcggtcttctcacagtagcggaagacaggtaattttcagttcaattgctgagtcaaccctacttaatgggtaaattacgaaaatgcccatgaatgtaggctaaataacgaaaagtactcgtgcctatctttaataatcaaaatcccctgaaattaaccgttgatcgagtttctttaacagaaaatgtgtacatactatattataccttctgttaaatatgtgagaaataaaaaaaatatctgaaattgtgtaaagtctattttctggaataaaaaaaaaattcttgaaaatttacactgtaaatggttggtgtaatatgaagaaaaaaaaaagatacggaaacaaacctagagggatattaagaaattacgaataggtagggtgtttttcgctatttagtctaagtttagggggattttcgtaatttatccttaattaatttatttattgatttattattatattattattatgcaggaagaaatttcaagcccgaattcgccgttttccag

SEQ ID NO: 101537 - DNA, 488 bp, Mimulus guttatus
  Intron number 1 from transcript mgv1a004032m (locus mgv1a0 04032m.g) derived from phytozome v7.0 (chr-ID scaffold_1; pos 902961 to 903448 reverse strand)
aaattgatattagttagtgtacttttctgttctgatgttgatatatccgtgtttgtttcattttacgattttgagatattctgttcttgctattatgctatatgatgggtactgatcctccatccgttttgcatattatctccgtacattttcgtttactggatttcgaatttctatattatatccattgttattatgctatatgtagtagtgctactattgtgttttcttcttcggtgaacgacctcatgaaaatggggctaacatgagttttggcttgcaattacattgtaaagctgcattaccaccacaactaagaatgaaaccaaagctgttatgccaaagcaattattcatgtcgaaaacgcacacatgttttttgtaacctcgtttgttattactccaaaataatctaggaacgcgttgattggtatttatcttaatttgctttattttttcatcatccaggtaatagtcaagaaaagatcg

SEQ ID NO: 101538 - DNA, 675 bp, Mimulus guttatus
  Intron number 1 from transcript mgv1a017596m (locus mgv1a0 17596m.g) derived from phytozome v7.0 (chr-ID scaffold_115 ; pos 86511 to 87185 reverse strand)
gcctgccgctccaactctgtgttctttcgtttcaggttcgttcatcttcgataatatgtttatatcgtcagtatatttagatcattatgccgttatttcgttcgttcgttcgttcgttcgttcgttctaatagatgctgaattattttattttgatttcagtttatgttccctttatgtttgttttttttgattttactgtcttacactgtgcagtcttatggttaatttcatgaatgtaatgttttatagggcagaattatgttgattttaattattgaaaatattattttcggtatttgtgaggttaataatcaagaatcaaactctgtgttgtagtatgtggatcagtggatgtataaactcaattgtttacaactgatttttcatcatcgaatatactgctacttactctgtctatgtttccgagtctttgtctgcatagtttgttagtatatatgttatctgctaatgctgaggtagtttattgtgctttctagacaagcttttcttagctgtttcattagtctcttggttaattttgttttttgttgggtgttctctaataattttgagcttaagtctcaatgtgctttctccatagacattgcacaatattgctaccagttaagcttgatttcctgagagtttttttttttgttttggttggtgcaga

SEQ ID NO: 101539 - DNA, 741 bp, Mimulus guttatus
  Intron number 3 from transcript mgv1a021061m (locus mgv1a0 21061m.g) derived from phytozome v7.0 (chr-ID scaffold_164 ; pos 314987 to 315727 reverse strand)
cttgtggaacgcacttcaacgcattccaggaagtaagtttcaactatcatattttcgaaacttcattttatttaattgaaataacttctttcgttcgtcaaattgttaattcgtgatcccgtgcgtgtataatgcaacaaattcgtatatgctaaccttttcaaaacaattctaaaaagcaattttagatgtttctctctcttctaggctctagacacgatttgactgttatattgcttcgttttcaaattcttcttttataaactaatctttttccaagaccgttaaacattctttgactaacaaaatataaagaaacattattttcattttcgaattcttccgtgacgatctttgtgttaatacgttggggcttaattggggaaatacagtttttgtccctcaagtttgcactaatttcacatttggtccctcatattccagtaatttaacacttttggtcattttcgtcaatttaccgttagtccgtcatgtaaagcagtgatggacatacgcttgattccgttgttttaacgagaaattaacatagaacactcaaattgttgaacttttgaaacataggtgaccaaatgtgtctattgtgaatatgagagaccaaatgtgaaatcggtgcaatcttgaaagatgaaaactgtattttttgcgggcttaattttaatttatatttttttatttttggacgcagtgcttgaacagcaactcgggtgagattagcaagtg

SEQ ID NO: 101540 - DNA, 1036 bp, Mimulus guttatus
  Intron number 1 from transcript mgv1a014418m (locus mgv1a0 14418m.g) derived from phytozome v7.0 (chr-ID scaffold_243 ; pos 8693 to 9728)
ccagcgtcgccgagtgccccagtaacttcttcttcttcttcttcttcttcttctttcactgtgtgtttatcttggtgtactagtgtgtgtgtttgcatgcataatactgatggtgacgtgtctgctgtgtgtgtgtgtgtggttacttctgcattttttacctaacgaaacaaatgtacattgcatgtgtgtgatggttgggctatttggagggggtattatttaatataattattctgtatgtctgataattttaatgcagaatcatgggcttaaaatcaaattaaattaaattagttaattgagctcgagttccacttagatttttatttttttttattttttttataaaatgtttatatatacaagaaagaaacactgccgcaacctacaaaacccctaatgatatatctgtgaattttgaaaattaattattattattattttttcatttccgattttaatttccagcatttttcgactttcatagtaaatttggatttgcaaactgcctagcaaaatcataatcccgtcggatagttttttttcttctttcttttagtaatctctttggaaatcaatatcttttttttttacacactctgatgtggaattttttttttttaattatcggaagagtaaagcaaaatatctctagtttacacacatcaatatggagttttctttaattgttttgccctacttaatttatttaattttttaatgttattttggcaatttaaattagacaactaattattttaatatagtgtaatatatttttttatacaattcaattatctatatttagtttgtcttccttttttcaatgctaccagtgcattcggtagtatataataaaaataaaactactactctagttcgattcgtgttcggctagctttagaaatctacttcataatttcgagagctccgtaaattagttcattaattcccttacatttgtgtttttaatttaatgaaattaattttatttaatgagcagagctgctacacttaccaccaaactcctccg

SEQ ID NO: 101541 - DNA, 954 bp, Mimulus guttatus
  Intron number 1 from transcript mgv1a010366m (locus mgv1a0 10366m.g) derived from phytozome v7.0 (chr-ID scaffold_60; pos 47753 to 48706)
ttaaggtacagaaatttaaacccagctacttaatttggtttaatttagtaattaattatgcatgcaaaatattatatttataaaaccctttttttcatataaaaaatattaattttcaagtagtatgtacaatgaaaatgtggagcagatttgaagaagagagctttatagaaatgaaaaggactgaactaaaaattctgaaaatttcatttaagagcttataaaatttaaggatgaatttgtaattttcaattttttttttgaattttaagggtattttttacttttcatgtcaagaacacacctccaaccgcacaatccgcaaatgcaccacacgaaaagctgttagagggtttttttggttttgactaattttcatagggcggtcgttgctattttttgtaacacaagggtttatttgcaattagagattatacaggagttcttgtaaaagaaaaaagaaaaacccatttttttttatgtatgtttagaattttgaaaattagaatgaaaaaaaaatattccaaaatcgaaaattttcaggccggaatcggaatcctatttctattatgcccctataatataaaatacataataatagtgatattataacaaattttcagggacattttaaattaattgatttactttcggaaattaaagtccgatcggagaacgtaaccttgtatattccagttctgatccaaaaaaaatttggaaaaatcggaagcagaattacaatcttgttaaacggcccttcgaatccgattggaatggttttgtttctgctaatgttattcctttttcttgtttttgtgactttgggagtccgtttgtagactattttattcctcttttctgaaaaaatgttaatttttcgaaaaaaaaatgttaatttttggaatgaattttgttgaagcgtttcttgccttcggagtttggtgtggatccagc

SEQ ID NO: 101542 - DNA, 963 bp, Mimulus guttatus
  Intron number 1 from transcript mgv1a012042m (locus mgv1a0 12042m.g) derived from phytozome v7.0 (chr-ID scaffold_125 ; pos 426772 to 427734)
tgggtaagtgtgtaaatattaaaaatataggggtgcatctataatttctaaaatatattatatttaacttgtatacttgttgttaattacatatttgtatctacaaattatatataatttacaagtttcagtccaaattaccattccataaattacattcggaccatataaatttattttattatggaattagtatctatagaaaatattaaatcacctttataagtgaaaaagagacataatatttaagtttttttttaaaccgtatgcatttcttagtttttatgtaaaatgaatttttgattttcctttgggtggaaacacgttttcattttttcactgttaccataaacgtgcccgaaaattttaaatatttatgaatacgaccccaaaacgtttctgacaggtgtcatggagtttcgattcccgaaatgattccagacgtggaaacgcatgtgagtagaagtttttgtacatcgtaggttaccgtttatggatcgagttcgggttaaacagattttgggttaaaacggaaccggttgcatgtcagtttttttaacaaaatgtgtagcaatgtgcaaagtaccaagtaatatgtaattgggggttcaaagtactcattttttttcaatttatgggtgcaaaagtgtcaaaagtatgtaattcaatggtgcaaagtgtcaattacacataataataataataataataataataataataataataataataataataataataataataataataataataataataataataattaataaaaatgaaaagaaaaaccagcaatcaaaatattgggccggaaaaaggccgagataggcttttaacatattgggccaatacaacaatccatctgaaaggtcaagcatgagatatataatccaacacattcacatcaacaaattagggttaggttttctctttcacactttggtcgggacc

SEQ ID NO: 101543 - DNA, 527 bp, Mimulus guttatus
  Intron number 3 from transcript mgv1a014326m (locus mgv1a0 14326m.g) derived from phytozome v7.0 (chr-ID scaffold_117 ; pos 486029 to 486555)
tatttcacctcttactgcttagcttctatctattggtaatttcgctttctttcttctttcttctttcttcattttttttttcttttttcttccgatgttttatgttttctttcctaagatgatatgtctatctatacacacacaaacacattatatatgggtggtgtatttgttaattgttgcttagcgagaatctacaatctcagcttttgtacacaaaattattattactctattcgagccaaaatattcgcactgaatcatccgttttggcctttgtgtggttaatgcaaacttggattcctaagtatgtggcgcagagaaaaaaacacaattccattttgggatcgtatccgaatcttcaccggctatgatttgattacagacatctaggaaatataattttactccacatgcttgtttctgcctcggcccggcccggcccggcatttttattagcatttaacactttttgggatttttcatttgcaggtgattccagcctctagatctcagtcgttattcca

SEQ ID NO: 101544 - DNA, 714 bp, Mimulus guttatus
  Intron number 1 from transcript mgv1a024845m (locus mgv1a0 24845m.g) derived from phytozome v7.0 (chr-ID scaffold_11; pos 1557587 to 1558300)
gaatcacatcgttctccgttatctcctcgaatcaggttcttcgtctacttgtttctctgtgtctctatatgcgtgtatctctgctgacttagagagtaaaaatcactcgttattctgaataatgtgtacgctttttgtgtgatgttgaatttttgagttcccttttcgttttgtgaaattgaaattgatggaaaaatctccgtaatcttgggttttcttgttgagtaatgcaaattagtgatttatttggggcttttggctgatttttcatttgaattgtaactgatattgttttggggggaaaattgtccagttctttggaattcaatcggaggtgctgttattcggaatctagcggaaacttgttttgaaatcactcgttattctgaataatgtatataaattttcatcctgttcgattttttacttccggttttcatttgcgaaatacaaattgctggaagatctttgtaatcgttgttgatttatctgggacctttttgatgttcttcatttgaattgtaattgatattgttttggggggaaattctcctttgaaatacaactagaggtgttttcgcgtgttttgccgtagtgttgatgctataatttgtatatggattcgctggagtatttgtatgtgcttattgagtgaactttcttgattgttgttttgtaggttttgtgcacgcggctttcaatttgagttacgag

SEQ ID NO: 101545 - DNA, 571 bp, Mimulus guttatus
  Intron number 1 from transcript mgv1a020831m (locus mgv1a0 20831m.g) derived from phytozome v7.0 (chr-ID scaffold_40; pos 639122 to 639692 reverse strand)
acctcgacgaacaacagctccctattaattactatgttgccgttgtctttattttttttgttgtgtgtctgaatcttttgaaatccgatgattgattcatcggaaactgatttgatttcttcgcaaaatattatgatcgctgttagttactgattgtatctttgcccgttggatttggttgatggtttgattgtaaataaggcattttttggatggtgtgatgtggtatgtaagtattatgcacataattttgataagaaaaactaaatagacgaattgagtaaaaaataaaaatggttggttatgatatgttgaaatgtattatcttagtagtttactgatttttatttaaaattgaatcatttacgttacgatatgctaatgatctttcgttgctcgtctggaatgacttgttcgcttcttaacttaattttgtagaaaaaaaatgcagcgaaagaaatcatatcagtatttcgggtacactggtttgtttctcgtatttcttatcttacttttttgtttctgtgttgaaacagtgttcatttgtcgagcatctgaattacaaagtagt

SEQ ID NO: 101546 - DNA, 692 bp, Mimulus guttatus
  Intron number 1 from transcript mgv1a014906m (locus mgv1a0 13931m.g) derived from phytozome v7.0 (chr-ID scaffold_58; pos 720245 to 720936 reverse strand)
tacgataaattcgacaccacctatcaggttctctctctctctctctctctctctctctctctctctctctctctctctctctctctctatatatatatatatatatatatatatatgtatatacatatatatcaccgtcgtttcttcttttacaaattaattttgctgaattttgttaccaatttctgtatctgaataacatttgtagtctccgtgcaattttccggcattttttttggtcagtctaatgatcacggccgacgatggagcctaataattaagtttgtagtgacgatcaaaattgatattttttttcaataaaagttcggaattagatgacatttgaatataatttcgtcgtcttctcaaaacgtgcacattcagaattctcgaacgcttgatttcttctggacatgtttttttgacttgtagattatgacgtgaatgagaagatcttttcgactgattttttcggtgatttcatttcattttcgccttttcatttttggttgagaaaccaaattgtacttatctgatgcaatgaaggatccacatttgaagtatttgatatattttgcaatacaaacaataaataaaataatttataaattgtttattatttaagatttttttttttaattgtactttggtatgcaggcgaccataggtatcgatttcttgtcaaagactat

SEQ ID NO: 101547 - DNA, 408 bp, Mimulus guttatus
  Intron number 2 from transcript mgv1a023822m (locus mgv1a0 23822m.g) derived from phytozome v7.0 (chr-ID scaffold_387 ; pos 21326 to 21733)
ctagagatcaaggtatttttctttccagtaatgtttgaattcaaaaaattattgttttaaatttataatttaattttatatgccatcttatatctatgtaaaaaaataattatttgtttatagtgcgagttcatgaagagtctcaagtgcagcatatgggcaattcttcaggtgaggagactagagttgttattgaaggtactgttaaataaatatgttatgttttttttttcatttactgtttttacttttattatgcttattatattattttagattcagtagcataaactgttagtaaagtagatgtcgtaactagtaatgggattatgtttgttattgttcattaaggattagcgaatgaaaaaaaaaggtcgcggtcttactagaggattaaatacacggaag

SEQ ID NO: 101548 - DNA, 572 bp, Mimulus guttatus
  Intron number 6 from transcript mgv1a013293m (locus mgv1a0 13293m.g) derived from phytozome v7.0 (chr-ID scaffold_38; pos 1272797 to 1273368 reverse strand)
ttaacaggtaatgtaaggaaacatgaagagtagcaaataataatccgcaagggctgttgttgtatgcatcgtattaaggtccaaaggccaaacaatggccttaggaaacccttcttatatccaaatgaatttagttatttattgaacgaatgaatgcattttgagctatcttgatgttaaatcatgaattcagaaagaaaaaaaaaatgaaatatttgaatggaagcagaacaaaactagcatgaaccttgagaaagttttttcttttgtatgtgagtagttaacagatgaaacaagctttgctccccttcttcaaccccgaatttgaataatagtactacatggcaactttcagactttagaggatgattacctagttcttgcagtatgttgtttatttataaaattttaatgtagttcgaacacgagttgagtatagcatatcttacccttcatgttgcattttgttttactcaaagattgtgttagttttgcgtgctattgcttcatatagatcaggactattgagcgataatatttttgatgttacgagttgataattgcaggctgag

SEQ ID NO: 101549 - DNA, 732 bp, Mimulus guttatus
  Intron number 1 from transcript mgv1a013293m (locus mgv1a0 13293m.g) derived from phytozome v7.0 (chr-ID scaffold_38; pos 1274121 to 1274852 reverse strand)
gttggggtggttcaggagattggagtgaaattgaggtatgctttatttattagctgacagctatcctcgaaatggattatctttttgttttgttttttttcagtttgttgtgtatgcttcatgttttctcgttttatttaatttactccgccaaagtatttgaagtcattagtttactcttggtgcatgtattttttaatatacggtctttttacttttaaggcctcattgaagaaagaaattgactatgtacagtttttgaatgtcaaagatatgggttagttctcaagcgtaaacaaattgttcgattaacaaatgcatattttacagggagcatgggtattgaggccaaaaaactccaagtcaacagcgatcgtgcattttattggtgggggctgccccacagcttacttaccgattattcctagaacgccttgctgataagtgagttgttttactgacaaaatagtttgaaccttaaatccaatcatcacttacatgtgcaaacaccatcacactattgtctgccatgaagtatatcacgacgtgcctttctgaaataatttaatttacgggtgtaacctagtttttaatttgatactgtgtgtaacttgcttggtctgcactttgtggcgcaggggtatattagtaattgccacaccttatgcgagtggttttgatcacttcctcattgcagtttaaattcgagaggtgtcttaggtatctccaaga

SEQ ID NO: 101550 - DNA, 272 bp, Mimulus guttatus
  Intron number 1 from transcript mgv1a011979m (locus mgv1a0 11958m.g) derived from phytozome v7.0 (chr-ID scaffold_121 ; pos 90848 to 91119)
actcatatccttcgttaactattctcttcaactttttttggtttatgcataattagtatgaataattttatttttcagatctttaacttttaattcaaaatccatgttttgattttcccttttctttgtgaaattaatttcttctcgtagaacccaattgaatttcgtgcgtgtgtgtgtgttttcttgctctgttgtgtgcatatgtattctatgtatttcttaaccagaattaacgtggaaggcagataaagggctattgctcgcaccac

SEQ ID NO: 101551 - DNA, 856 bp, Mimulus guttatus
  Intron number 1 from transcript mgv1a015566m (locus mgv1a0 15566m.g) derived from phytozome v7.0 (chr-ID scaffold_271 ; pos 90799 to 91654 reverse strand)
cgtcggatcacagatcttctggaagtacacccgtaacaccctacactcccactttatatgcatgactagataaaataccacttttttttacaaggagaaatacgagggtcaaagaagaaaaaaaaagtatcttcaggctatgaaattaaattatttattggtgggaagaactaatccaaatcttgtttatttatgcacttatctatttatttatttatttatttatttattattgtatatgtcattattgactataactattctatattaattacctaaaggagatatagactacgcgcgtacaatttacttacatttgatttataattagtgttgtctcaaaaaaaaaaaaaaaagatttataattagtgattcacaaatcacaccaatttgttcaagatttaaatttgatgatgtattttaacctagaagtagtctacataaaatattgtagactaaaagatatatctatctaatatattaatgggtttaaatcaagatatgttgactgatgtgggagttagatgttataccagattattaattacaccgtgtgattgtttatcgtagtagataggattacgtaaccactcactaagtacacgacgacatatggggtgtatgtatgattttgcagatttacggttaataatcaaccggtatagcatctaacgacaggatggatgacggcatattttgtttaaaacccgcgagtttaggatactaattaaatgataaacttggttattgaactcattagttaattaattaatctcttaaatccttatatccaaataacacgatctttaaatcattatcagagggtaaaaaggaggtggcgaaaaatataattgaa

SEQ ID NO: 101552 - DNA, 604 bp, Mimulus guttatus
  Intron number 1 from transcript mgv1a020427m (locus mgv1a0 20427m.g) derived from phytozome v7.0 (chr-ID scaffold_158 ; pos 262885 to 263488)
gaaattctagaaaccaaccaccagttggtgccgatgtgattttgccttattttaaggggtaatattgtcttttcaagttttctgttaatggtgttaatagaagctaacttaatcaaaccttaaaggggtaatgtgcccaatttgatactacaagggggtcatgtgccaaatagtgaaaccacaagggggttaagtgctatttaccctttttttttatataatttatatatagttaagaacttaaagatattaaatgcaaatattatttaatttagctttaatatctacggtgccaaaaagaaacaatcgcaatttgctaaacataaataatggcatatttcctttataaataccccaattactcccctagattttgcattgccttattattccttccttctctcccctgtttctctctctctcattctctctctaaacatagagagagagaaagaaagccaaattgtacggatccagttccctaattaccagagagaagagagagagagccgaggggagaggggcaaaattaaataaaattaaataaggaaatggcattgaatttcaagccttcgtttggcttatttgccacagttgcgccttg

SEQ ID NO: 101553 - DNA, 525 bp, Mimulus guttatus
  Intron number 1 from transcript mgv1a016720m (locus mgv1a0 16720m.g) derived from phytozome v7.0 (chr-ID scaffold_7; pos 3319528 to 3320052)
gaggtgataatatctcacggtaagtacccttttctgtataacgttgttcttcaggattattgattcattcgcttgtttcgtacttttgtttttcctgcgctactaatcacgttgaacaaataattgattaattgttggattgctactttaattttcattccaagaaattgggtataaagtctcgatttttatcgacgcaggcgtttgttaaaccctaatttgaattcaatttcagttacttcaatgcaatttgggaatctttactcgttcctcttctttttgttgtgggttattgggagttggaactcaattcgatttttatttagttttagcatgatatcaattgacctaatttttgccccaatttctgtcgcatgacaatttatgtcaaatttaagttattaaaccctaatttaagttcaattttcagttgctataaaaatatatctactgagaatctttattcattcctcttcttttttaattgcaggttctttcggagttggaagttactatactaccctg

SEQ ID NO: 101554 - DNA, 713 bp, Mimulus guttatus
  Intron number 2 from transcript mgv1a016720m (locus mgv1a0 16720m.g) derived from phytozome v7.0 (chr-ID scaffold_7; pos 3320062 to 3320774)
cagatctgcaatcgtattttccgactcccgcggtattgtatcgttacccttgaattgattatagcattagttgatttgataatagaatatacggcggcacgagtaatgaaacctacatatataaagtaacacaaattaatgtaatcttgaaatgaagatttcgtttcttgcttgtaattcttggcggtacattagctcatgccttcttataagtagcttctttttcgagatcttcttcctctattccttacgatcgattgattatcaatcaaagcatcggcaaagtttttcaatgaaagattcgaagatagagtttgaaataattggtttaatggaatttctttaaatgaatcgagtataagaaccgaagtgcattccactaaaatttcccggttcttgaacttttcgtagtggtagcctcctagccttatgagtacatgctcgtcttccgatacccgcaaatttttaatacccaaaacgtcctccatgttactgcgttatggattaattaaatcttaaggtgttaaaaatgttgctggaaataatactaaactacgttgaactccacgagaatttgtggatagaatatgtagaagaatcgagatatatgctttttttttttttttttttagcgagatatatttcgcgtacagcttaattaaccaagtcgtgtttcttgctaggcgtcgagatttgtcgccaacttgattctg

SEQ ID NO: 101555 - DNA, 454 bp, Mimulus guttatus
  Intron number 2 from transcript mgv1a006786m (locus mgv1a0 06786m.g) derived from phytozome v7.0 (chr-ID scaffold_2; pos 838814 to 839267)
gctgttgccacggaaactgactcgactttcttcaggtaacgtaaatatttaaattcctaagtgtgctgtataggggttcaaattaacttgctgaatgctttttatttgttgtgtataatgaatgctgagaggaatctggtattgcgaagagagtttttatgttgagaattagggagcaacctagcaagaaatctctgccttatttataatatattatttttatgtggagcatgtgtcgtttctttcaatttgttttcatgcacttattcaaaggagttttgatgtggagcatgcatcgtttctttcaatttgttttcatgcacttaatctaaaagaggacacatttttttccagaagctcgtttttagttgctagctttcatttgtcatttttaataattgagtacttatgttcttttttcagtatttcttcttcggacttggtttcaaagtgg

SEQ ID NO: 101556 - DNA, 933 bp, Mimulus guttatus
  Intron number 1 from transcript mgv1a009156m (locus mgv1a0 09156m.g) derived from phytozome v7.0 (chr-ID scaffold_24; pos 1420187 to 1421119 reverse strand)
gaccccgcccagaaggaattccaagcgtccaaagtgtaattctcttcatctatgatatatataattctgctttgaattttgttgctgcgattaagaggtttcttaattggaattttatgaatagggtttagctgtttgttagaggctttaatcttctgagagcagcttaattaaaatgatggaagttgtttaatgctaatttctggattagccgctgctgtatagcaaattttcctagggtttttggtaaattttgatgaagagtggttgctgctgttttttttttctgtgggtgttcatatggaattttaaatgaggtaaatgacttgcattagtgtctcgatttttcgattttgtaagtaagaagatcacataaatcagaggcctatctgaaatttgatttttgttataacttaatcctttcaatcgaattctgtatttggagttgcatgactgtaattttgactgataattaaagctatatatatataaattcaacagcatgcgttagttcatgaattatgtagcaccaactatcaattttgtgccgcttttgtggtgaatttgatttatagtagaaaatgaagtattaagcatagaggattatggaatctagatttatcgtagttgaggtaataaattttatttattaaagaagggaaatgaagttatgtaatatactggctaaagtcgtttaactctactttcgttatcgaataatatattccaatattttttcaaatctccaatcagttaattcttaaagagagtgtgattttgatgtgcgctgcaagattatatgtgatttttcaaatccccaatcagttagttccgtaatgttatattataacgctgttatatgaaatattgatcagagtttgttattaaattgcggtcttcagattcaagattttcgcaacaagaacttccggc

SEQ ID NO: 101557 - DNA, 399 bp, Mimulus guttatus
  Intron number 1 from transcript mgv1a005302m (locus mgv1a0 05302m.g) derived from phytozome v7.0 (chr-ID scaffold_1; pos 4391912 to 4392310)
tgctctgacactattccagtttattgattcaaaaggtgcgccatttcttctcttccttctccgtttcatattccgattacacaatctaattcatacatgtatacttatatatatatatatatgcctacgatttatcgagaaatcttttcgtgttcctttacttgaatttgttttgtctcactctaatccaattcctatttttttcctggtgaatatgatttttatattcatagtttgttgaaatggactgaagatttatgattgagagattgtatattctcatattaattttgattttcatgtaattttttttgtgtgatcgaaaatataaatattccgttgcatgattatgcgttatatgaaatggtgttgtgcatcgattttcaagtgtagtgaata

SEQ ID NO: 101558 - DNA, 821 bp, Mimulus guttatus
  Intron number 1 from transcript mgv1a024980m (locus mgv1a0 24980m.g) derived from phytozome v7.0 (chr-ID scaffold_2; pos 4344585 to 4345405)
gcaagacgcctccggatttgattggtatgataaatacatatatctatatatacacacacacacacactacactagtatatatatgtgtatttgtgtgtaattaattgtttagttcaacgttaattatgttcttaaaatctttcttgttcagaaatttcgaacatgtgtatatcagaagttcttgtgcttttctatctgtgtgtgtgtctgtatgtacacatactatatataatatatataatatatggatttatgaagctgacttttgaaatttatgatggtgagaaacttttattagttgctacgttgtcattgacttttgcagcataaatccagttgtttttgtcatatatatattcttcttattcttcttctctctctctctctctctctctctctctctctctctctatatatatatatatatatatatatatatatatatatatatatatatatatatatatatatatatatatatatatatatatatgagatttgagtattagtagctgatggaagtttgttttgtcaatttatttcttcattaagcatatacaactttttttattaaacaataataaaaggtttaataggagtgtcattaaaccttaatcagcacatttaatggcaaaaccgggcccgtcttcattcgggcccataacttgaaaattctatcgattatttttataaaaaaaataatcgaaaagatttcgaaaaaatatgatattccaactgtttgatattattcacaagttagtattgaaaattgcattaatattgcagctgaagaattaggaataaaagagttaataccagcc

SEQ ID NO: 101559 - DNA, 610 bp, Mimulus guttatus
  Intron number 1 from transcript mgv1a018692m (locus mgv1a0 18692m.g) derived from phytozome v7.0 (chr-ID scaffold_71; pos 543269 to 543878)
ttttactgtctttcttttccttattattcccaaaggtacctttatttccttcatagaatctatcaaatttctatgtattatattccaaggattgtaataactaatcaacttacattacgttatatataattttaatgaattttattgataataactcacacttattaaatttaatttttccttaatttcattaatagtcaaaaaataataattattttgtctttttttccccctaaatattagttaaaaatatagggtgctgccagtttatgagatgctacacttggtgtaacgcatcgggtggttatgaatcatagatctataaaataaccatccactaagcacacatacacatgggtgtgtgcgttttattatgtgtagatcaatggttcaagatcacacgatgtatttcaacgggtgtagcatctacaaaaccagacgcagccacagagaccttgtgatttttatgttcatgcattctctcaaattctagaccttagaactacattaatttgttgttattgttattattcttatttttcttctcaattactgtgttgttaattatgcatatattttgtttgttcgaaggtttaagccaagatccgtc

SEQ ID NO: 101560 - DNA, 680 bp, Mimulus guttatus
  Intron number 2 from transcript mgv1a006383m (locus mgv1a0 06383m.g) derived from phytozome v7.0 (chr-ID scaffold_44; pos 844309 to 844988 reverse strand)
gctggtaatttcgtataactgggattttttttctttacaagtggcatgtatactctctctctctgaaagggtagataaatttgcatccaattagccctctaaggccttgtttggctggtaagataaaccatgatcaattaaatagttaggtactatttgatgtttgataagtatagcaacgtctcgggccggggccaggccgggctgggccctacccacgattatgaaaatatgagctttttatctttgcttattggtgggggtttgtgtattggacctccccttgtccaattatacaactgggttctcataagattgcataatcttattttgactaatcttttcttgcaaaccaaacgagtcctaaatgaccaaacattatggatgtcgatgtttcgagattctccttgtgtctgaaaatccgtttgtgctctgttaagttttaagttacatattttcttgaaaaaaatgggtctcaaacatccgaaggctgatatgctgttaagtataattggatgattacgacttacctttatttaagcaaatatatttgtttaccatccgttgaaaattctggagaaattactatttttaatgcagaaaagataatcaaattggctcaccatttgaggtcttcatttgcaggcagaagtcaattatttaggtcaacttcgacactc

SEQ ID NO: 101561 - DNA, 748 bp, Mimulus guttatus
  Intron number 1 from transcript mgv1a006307m (locus mgv1a0 06307m.g) derived from phytozome v7.0 (chr-ID scaffold_85; pos 533648 to 534395 reverse strand)
agggttttctgcgaaggctcctttctctctctgtggtaaatctcttctcctccccctcctctcaaattcgctttgcatgttcatagattcaatcttacgcttgtatgttcttgttccgatgggaatttagtcctttgtttgtctttgttgattaatttatgtcgattttgttttgatttgaaaatttagatttaatctttaggaatccgatctgagcatctgatgcgatttttcatgcctcgatttgttttttatttgaaaattttaattttgaccgaaattagatattcctggttttcaaaggattgaagataaaataatagaaggctgtgaataaggttgcagattatctgatctaagcttttgtgaaacaattttgtttaataaatagcatccaagattctgtttttatttttagttctatttacgttctacggtgtcgataacgatttgaggaactgaaacatgttttgtttattgtttttggaaattgacttttcactgcttacagattttgaatttgttaatctgtatgactttgtagatctgtatgatttgtgtttaccgtgtttgtaattcattcaagggatatatgcatgcacagatgaatttttataatcaattttttgtcgataaaaaataatatctgctcattcaaaacagtattctgggtaggctgatatagagagttttattgtttgaagactgatgtattttgattgaaaattgcagttcgtagcctttcacc

SEQ ID NO: 101562 - DNA, 479 bp, Mimulus guttatus
  Intron number 1 from transcript mgv1a003432m (locus mgv1a0 03432m.g) derived from phytozome v7.0 (chr-ID scaffold_1; pos 3900700 to 3901178)
tggcaatcgcagccgcaaactgcttgttctccggcgtcaccttcgccaccacctaccgcctgttctccacttcgcataaactcaattatttgtctagtgttcgtaaaccctccgatgaccaaaatcaaattccgattaaagtaaaatcgaagaaatccccgtgcaaatcggccattcaggtatataaaacccttggatttcgtttaatttggctcaatatattaattccttttgaatgaggagtaaattcagaatacgttaaacattgcggagtatattggtcgaagaaaaagataattgtatggaagaatcgtgttctacgaatctgttcgactcttttgcttgaactcttctatacacatttatggtagaatatatatgggtgaagttcatcggtgtagtataagtgtataacaaaccccaatactactgtaatatatgtacacgaaggtcctttatatcctgtaactgaatccagg

SEQ ID NO: 101563 - DNA, 649 bp, Mimulus guttatus
  Intron number 1 from transcript mgv1a021150m (locus mgv1a0 21150m.g) derived from phytozome v7.0 (chr-ID scaffold_607 ; pos 5991 to 6639)
tcacgaaatcggaagaggcttttgccgccgccaaggtattgtgatgattatttcattaacagatcgacaaaaaatatatttcgtgttctccaaccttacgcagtaaacccttggaagtgcatttcgttgctcttttgcttgttttcgattcagtagatttttttattgaaattgcctctggcagttaagttgtgtaagtataattgttgaaatttgaagatgtttcattccgattactgcgagggtgggaattgcagctcacatggtgcaatattgggataggggttttgatcagtggatgtgttgtattttcttattgtagtttgttattggatgatataggtggtgagatcatagttgaaaatgcaggaaatgcagatgttttgtaggtgaacaacaggctaatttgtgatttcagtgcatttaattataaataattgcgatttggctaattcgtctcactcaatttaggtgcgatttgtagcatcgtcttgttgattagctttttgttatttcttctgaaagatgtcttctacttgtctattgagttatttgttatatctctcttattgcctttgaaattaatgtgatagaaaagttgtacatgtactgaaatcaaaatgtgttctgcttttgtttataggaactg

SEQ ID NO: 101564 - DNA, 693 bp, Mimulus guttatus
  Intron number 1 from transcript mgv1a017472m (locus mgv1a0 17472m.g) derived from phytozome v7.0 (chr-ID scaffold_104 ; pos 930107 to 930799)
aagtggctcgaagaagaatcctcttccgctgccaagtacgcaaattatccctcttttctttctcatttgctatcgtttcagctatatccactgatcaactacctctagggtagaatcagctgatcagaatatgcatttcttatctatttatatttgtttaatcaaggtgagcgagatcaatttcatgggagaaactttgtatggattttattttctggattttaatgtttgacaatgattcaatgaaatgctgattgaaattgccgaacaaacaaactgatgttaggtttacaggacgaaactgtataaattggaaagttgagaattcgtttttgtttacattttaagcaattcttcatggtggaagaaccaatacctctttcaaactaattaactcttatgaaatattgtttgatatcgaggatttgtagttttagaattgtattcggagaatttccattcaaatatgaattgatttaagtactgattctattccacctcgtataaagaaaagaagttagtctgcatgagggatactatgaaattcttgtttgatcgaagaaatcacagaaaacaaatcttacatggatccaattccaaacactacacactactagcttcttcctttttaagttttaaatgtaagttgagtaagtagtgtatgattctaatgtttgatgttattgcagagaa

SEQ ID NO: 101565 - DNA, 310 bp, Mimulus guttatus
  Intron number 4 from transcript mgv1a014642m (locus mgv1a0 14010m.g) derived from phytozome v7.0 (chr-ID scaffold_2; pos 3544587 to 3544896)
ggggcgatctgcaccgtggaaacacacactagaaggtaggttctcaaatttctccctcttttgattaaaagatatatgaaggtaatattcgaagtggtttcgtttcgttttggaacttttcacgtgcatctaagaagcggtgcccgttttctccatgcgtataaattgctgaataaattggttgaagagtgatctcattaatacaaaaaaaaattaattgaaatgtaaaaagtagaatatcttaattgcctttccttactacataatatgtggatggatatttgaagttttgttactactgcaggtccag

SEQ ID NO: 101566 - DNA, 783 bp, Mimulus guttatus
  Intron number 1 from transcript mgv1a012165m (locus mgv1a0 12165m.g) derived from phytozome v7.0 (chr-ID scaffold_121 ; pos 549384 to 550166 reverse strand)
cttattttcagcttcctctcccccattccaggtattttcagtttcttctaccttattttttgtttttcttaggttaaattatcgatttgattcgattttgtattgaatcgttgtcatgaatttatcgccacatctgggcataattaattttgttttgagtaggttgtggggtgaatttttgtcttgatttcagagttcaatttcgtagaaaaatcgagtttaattcggtcagagtggtggaaatgtactaaagttttaatgcaaaaaataaaaagtatgggttttttttttttgataattaaaaaaaaaaaaaaaagtataggttgactgtaattactatgaatttgtgtaaattgttcttattttacctactgtttggattaatttattcaaaactggggttcgcttttcttattttaatgaattaaatttccccaagattcaattttattttattgttcaatccacacaaagaccaattttttttttttttttttttttttgtcgccaatgagttataaatgtggatgtaaaccgtatataatttcgtaggactactacaagacgtgcattatgggtaaaattttcagttttcgttctcgagtggaatgtaaagattggctgtattttatcccatattacgcaatggctatagagaaaatgtatatctagacgcacacgtattttcaaaaactgttgtagtagtagtagtagtagaagtattgtgtcatgattttgtggtgagtttgcagatcggtataacaccgccctcgtttgccgcag

SEQ ID NO: 101567 - DNA, 774 bp, Mimulus guttatus
  Intron number 3 from transcript mgv1a003661m (locus mgv1a0 03661m.g) derived from phytozome v7.0 (chr-ID scaffold_101 ; pos 937122 to 937895 reverse strand)
tcattgtaagttttctctgttttgctatgaactgctatgaacctgctatatatatgttaaagggtaaattacggcaatccttgaggtagggttaaattacgaaaaaatccctcctgtttgagtaattacaaccacccctaaactatgaatcttcttgcacgtccatcattgcggttgtcaaatttagtggaatcttttagattatatggaatattcttcagtttgtacccgttttaccctgtttgagctcctccacattttgaaacaagatgatcataaaatgcgtctcttggcttgatattttgtaaatattagattatgctgcatcagaaactgtatttttgtacaaaacgagtacaaactagagaatattccacggaatctagaaatttctattgaatttgacaccataagggtggacgtgtaagaagattcatagttgaggggttgttgtaattacccagacatgagatttttttttcgtaatttgacattgcctcagggtagtacccatatattaaatgaacaagttagctgaggaatttcatccagtttgcttacttgtttgatttgagttgcatgaatttgaataatcttgaatgaaactcgaaaggatatcgtttttgttgtcactcccgcagtcattgttttaatgaaaccactcttattcgagaaatccttgttacatgagatgtaatatgaaacacttgtaagtttctcatcgaaacaaaattcgagaaacgaatctgaatatttgcaatattatttcaggga

SEQ ID NO: 101568 - DNA, 406 bp, Mimulus guttatus
  Intron number 1 from transcript mgv1a004828m (locus mgv1a0 04828m.g) derived from phytozome v7.0 (chr-ID scaffold_4; pos 1728334 to 1728739)
tttgttcgtcattcttgctttctgcgctgatttaggtattttttttcttctctgttttccttccgattatttgtttcccctgaacgcgcttctgattacttacttttgatttactcttgaaatgctggcatatcaattttgcatcttcttcgaatttcagttaattagggcatatagcttcttttctattcgatttttaatatttcctgttcttaatttggtttgaaatatacatttggcttttatgcagtagtctgtcagcctttgcctttgtatttcattggtagttctgtgtgattaaactcgtttagaaacaattacctgcggcatggggaatgaaatttgttaattgtgctcccatctttatgcagatacttttgattgtattacagtagtaatttgttaa

SEQ ID NO: 101569 - DNA, 978 bp, Mimulus guttatus
  Intron number 1 from transcript mgv1a016170m (locus mgv1a0 16170m.g) derived from phytozome v7.0 (chr-ID scaffold_291 ; pos 71587 to 72564)
aaccatccaccaatcttagttggtgccctggtaatacacttatcactccaccctataatcatatatatctctttgttcttgtttgtctgatattatattggtttttttttttttggtagattctgagttgttatattttctggaatttaattgttgtattaatcttttgtaatgggtttggttctttctcggtaaaatttaatagaaaaatatttttaaaaaaaaaagaatcttgagaattttgtggttgtgttcttgatttttattttttttcactaaggattagtttttttaatttttattgtttttttgacaaaattgtgttgtgggttttggatggaatataagtcttaatctgacatgattttcaattgaaaaaaaaaaaaaggaatcttgagaatttttgtggttgtgttcttgattttggttgcactaaggattagtttttatttatttattattatttatttgacaaaattgtgttgtgggttttgcatgggatgtaagtcctaatctgacatgatcttcaattgaaaaaataaaaacaaaaaaaataagtgggggataaaatatgattttaaattagtgggggatttaattttgaaaaaaattaattttgagaacatcaaatttgatttaatcatgatgcttaattgcttatagtagattttgttattctaattccaattttctcttgaatatagtgtgataatatgttcacttttatgcaatctaaacatcactaatgaagaaagacactagaaatagtttaatgtgaatcatttatcatcgttttcttgtctattttttttttggatttcgttatcggtcataaaaattaaattacattgaggggcttacacgaaatccaaactatttgagatactttcgactttttcgcaaattttctatttcgttgatgtcgtttttttttctacttaagattgtgtgagagctgagccagtgatatacaagaag

SEQ ID NO: 101570 - DNA, 604 bp, Mimulus guttatus
  Intron number 1 from transcript mgv1a002813m (locus mgv1a0 02072m.g) derived from phytozome v7.0 (chr-ID scaffold_36; pos 987134 to 987737 reverse strand)
agtatcacctttgaggctgatcacaatcttgataggtttgttcttctattctttcaacacttgatttgatttgtcagagtgctgaactgcttgttaaattttaaattgaaatgcataatttctcctaaccaaggcagcaatgccagtttctcatcagtagccagtgtttaactctataaaaatgtttctggatctgttgcaagtatttatgttttgttccacaactcagaaaataaatcttactccaataaatttgatctgttctcatgttttctaaaattaatgaggttgcacccattttcttttgaacatttttattgtagattttacatcaataatgtggaattccagtcaaatacatattttcctgtagtacatgagtttatacaatttggatgattcatctccttttccacatttgaaagtgaatagctctccaattgacaataatttagaagcaccaaagccaaatctactgtctttggatatactattttggtctgcttggcgtgcatgatatttcctatccttttgtgactcttgattgattggctttatctgatcaacaggaaaaatattgtcttcggtaaacttgtggagggag

SEQ ID NO: 101571 - DNA, 569 bp, Mimulus guttatus
  Intron number 1 from transcript mgv1a018346m (locus mgv1a0 18346m.g) derived from phytozome v7.0 (chr-ID scaffold_46; pos 1288922 to 1289490)
ctttgcttctctcaacagtgttctcctcggttgtaaaactaactgtttcttccctttttttttttctcacattttcttcttacatattacaaggaagattgatcctatgttttttttttccttttaacctttttgtttgtattaagacaacaataaattgaaatgggagaagtcaaactctaattcatgttaaatatcaagattcaaaacaaggtttggtgccttttgataccaccattgatgctaatcctagtacagtagaaacatcgataaactaataatctcgcttaaatattattttttagaggtttcactgtataattatatttacgaagtagaagtcgaattctataataatgcgtaaaatgtgtaaattattttgttagaggattcacttgaaaactgggagtttcaattagttcctttagataccgactcatcctcacaattccaaaaataatttctaccgttcgatttgctcgtcgttcttaactgatgcaaaaagttgaaatttttaagtttactttcaatttcttttttagttttaatttttaatttttttttggtag

SEQ ID NO: 101572 - DNA, 698 bp, Mimulus guttatus
  Intron number 3 from transcript mgv1a006134m (locus mgv1a0 06134m.g) derived from phytozome v7.0 (chr-ID scaffold_2; pos 1006430 to 1007127)
atatactaggtatgtatactgattttttttttacatttttgtccttataagtttatctcgattcaaatttggtcatcattgttctcaaaagaaaacatatttagtccctcaagtctcaaaagtttaatacttttgattattttcgtcaatttttcattaataccgacgaactctaacacgtgcccgccagtaacttagctaacggactaacgataaataacataaatgactaattattttaaattgttaaaatatgagggactgaatctattttcctttgggagctcacgagctttagtgaagctctcccatgggagacatattggagtgagatttctttatttcacaaaatatattggtcaaatattagcttttaatgtttcctaattgcatatgaatatttgccaaattctagctaccatttcaactttggatccaaacgaatcacgtaggacagaatattgtgtaaatgcaatttaaaaaataataacaagaagaatattgtgtggacacaattaatcttgggcaattattttatttatataaataccccacaaatatgggaaaatcaaactaaacccctccacaactttgtgacacgaaaccaaataataattaatggcgtttgtgctggactcaaagtagttatgtctttttcttttttgtttaatttttatttatttattttcaggcccaaa

SEQ ID NO: 101573 - DNA, 670 bp, Mimulus guttatus
  Intron number 1 from transcript mgv1a013778m (locus mgv1a0 12659m.g) derived from phytozome v7.0 (chr-ID scaffold_125 ; pos 215542 to 216211 reverse strand)
ggcttttactcggtaatcgccacctaaatttttgcccaaactttaaattattcgctaaacttaattatacaattcctaaattttcgccatacattatgttgaacaagtttggggataaatgcattgtgtgatgctaatttgatttatgttgtttacaaatatttttgcccttctgctgaactttataatctgggatttttcattcgatgctttgattaatttttttttttttgtgaaacatttagtatttattttctgttcagttgcttctaatttattctttttgttaagaaacttcagctgatgttgttttcatgtctggtaatattgatcagtttaaccaaaaaatagtaaattgatacatgaccttagttttaggaaagaataactatagaattgctcgattttgtccgtaatgctttgttattataaactgaatgcattgatagcttcttgtaattcagaaatgttatacataaatttgatagatcacttaagcatctcagtaaaagattctagagaagcctattgccacattttttcagtggttaaggtatcggtacagaatcttctctgtttgatcggaggtgttcgtatgctcggtacaataataaaaaaaattggtcttttttcagacacggagaaattctacactgaagtgcaggagata

SEQ ID NO: 101574 - DNA, 735 bp, Mimulus guttatus
  Intron number 2 from transcript mgv1a005084m (locus mgv1a0 05084m.g) derived from phytozome v7.0 (chr-ID scaffold_274 ; pos 46949 to 47683 reverse strand)
cgggtgtcaagttacccagtgaagatcgtgatcaagttagtagttacatagctttatgtcatttatgctttattctaattcttgagctattgtacataaacagagctaggatttctttattaactgcacttgtgtcattctcaatactcgtatatttgttgcctaagttaatcttcctgctcatatatgctagttttgcttcatttgcatgacaaccacataaattgtcctctcacatgttctgccgttgttcttgtatgggttgtctattgatcgtgaattagaagaaaaaaaatgtcacttagtaatcaaactagaagaaaagtaatgtttagtaaacatatacgatgttgtcgaatagaagctgatcttttctgtaaatgaattggatttaacagaaacagaaactctgaaaataagatacataactaaagagaagaaaaaagtgtgcagaatccatgtgcagatcaatttatttgattgattctggttaagaataagaccgaaaataaataaattataaccctgagggaaaaaagaccaaaagagcatgaacttgcaattattctgttggtcttgtggcatcttaaataatgctaactgaacctgagttttgagagatgaaatatttatcgtactattttgtaaaagtgttttctgcatgaaattttgcctctaaagtattattatatatacataggagctttcagacaagcacggatcccacaccaatca

SEQ ID NO: 101575 - DNA, 632 bp, Mimulus guttatus
  Intron number 1 from transcript mgv1a012277m (locus mgv1a0 12288m.g) derived from phytozome v7.0 (chr-ID scaffold_104 ; pos 784118 to 784749)
cgatcgagctaaaggtacgattttctctctatgaagttttcattcttttgatttctgtaattcggtcgggttttctatgctttcgtttgcgattatccgatttgatttatccccttttaagttaacgatttgatttgattcatcgttaattcttttgttattttggaaattagcgaccgttacgatgatttctattatctctaattgcaacatggcagctcgattggttgactttgatgaggatttgatgaactctgtatgttcttgcttgatccttatcatcgtgatttgtgtatgggttcatttccctgttcagaactgtatgctgttggattttcaaatttgcaatttcagaaaggtgcttctgtgtgattggtttatttgaatattttattttcatgaagaacagagtctccagttgttaatccagtacaaaaatgtatacatgtaggctttagtgcctgttgcttgataagaaactcgagatatgacacttcgtatagaacttcatgtgatcaatttcgattttgaatgctaatttggggataccataatttacgaaactcaatttctgttttcttttctggattaacggagctaataaaaatctttagtaggattaccgaggctgc

SEQ ID NO: 101576 - DNA, 1029 bp, Mimulus guttatus
  Intron number 3 from transcript mgv1a025767m (locus mgv1a0 25767m.g) derived from phytozome v7.0 (chr-ID scaffold_38; pos 1654332 to 1655360)
gggagaaggcatccattcaatcaagattggaagatgtaatggaagatttattgcctcggatacatcatggtttttaacaatctctctctctctcacacacacacacactttgaatatattgaaagtagttgacgattgattgtacgaaggacacgtgtcaaatacattcataataaggaagcttgtttacttctttgctcatgtatttctttctttttttaattacgtactacgaattcagagtcattaattatttcaaagtaaactccgaggacaagaaaaaattaacctcaagtattaatcatgttgaaaaaattatttgaacataatgtatatatattcatagtaagtaattttataaaaaatcacatgtgggacaattttggtatctttataagtttcaatgggcatagttggaacaatagaattctgaacttcgaaggttagatctattgaatttattgtcaaaattttgaggtttaacgatttcttttaatattttttaaaataattaaaagtcaagtaattttaataccaaaaaaaaaaatagtagtattagaagaacaagaaacaccgcacacaaatttcaatcctaaatcaacaaggtaagtacatatattcgttctagtaaataaggaaaataaataattaaggcgtgcccaacatggaagtattgtgacacatgcaaaatcctaccatatatatatttgcatatatggtaaattaccaattaataactattttatttcctaattagttcaggtttctatctctgaatcatctatataaacaccttcaacttctatcataataaatcacgaaaaagaataaagaagagagaaaaaaactataatcaatcacacccctgaaggattattaatccaacaatcataaacaccatgacaagaaatccgaagaacaaggagagaaacactaaagctgtttcgagtatgttcgatagcattccccatgaattggtttccgaagttttaagccgagttgtatcgtcttccatcaaggacatcttca

SEQ ID NO: 101577 - DNA, 588 bp, Mimulus guttatus
  Intron number 1 from transcript mgv1a005035m (locus mgv1a0 05035m.g) derived from phytozome v7.0 (chr-ID scaffold_66; pos 63824 to 64411 reverse strand)
tcctgtaaggctcctctaccttctccggcgtactggtatttcaattttttccgttctcttctgctcgattttctaatttcttctgattaactgtgcttcttttcatcttctacgtcttcttcgtcttattctgtatacagcttcattcattttgcacgagatccatattatgcaaacatcctcaatttttttaggttcatttcctcttgtttttgtcagaatcaggaattgtatgtcgaaattttcattgggcggttatttttttctcgatccttttttctgcccaaagttcgtagccctagttttcagtttttttcttatgtattgtatataaattcgaatgaatagcttgattctgaaattccaaataatccagaaaattggtaaattgatgagttcatctaatattcggattcttttggagttcgattatttgtttgactcgttcatttattttagtggaaatgcggcttgtggtatctatattcatagactaatatttccttcattttagtgagatcttgttgctatcgcatatctgtctgaaattaattaattggatgcgatcaacaggtaactgaaactgaa

SEQ ID NO: 101578 - DNA, 724 bp, Mimulus guttatus
  Intron number 2 from transcript mgv1a014495m (locus mgv1a0 14495m.g) derived from phytozome v7.0 (chr-ID scaffold_60; pos 667926 to 668649)
aggattgtcggcggcgatcaccgcctcaaggtattatttcattacctttgatttttttttttagggattatttgtttgaatttatgtttgattgtggatttgtgatcggattcatttggttggtgttcttgctttggtttttttgtaaattgtgtttttgtggatttgagatgttgatcctagaaagcttgtggaattgttagtggttgaagaatcgaaatcgggatggctacgtttcgttttctaattttgaataattgaaattgagaatcttttttttgtgtgtgtgtgtgaatgtgtcatgcatcgaaagtttaattttcatcacttggtggagttttatgaactaactcaatgtaaacaggggtgttgtttatcgattttcgattttttttccgcacatgtagataaataacttcgaaaaacaagatttgaattcagcattttgtatgatgcaaaagcacgagtgttacgacgaactgaaaatgaatctgtttgatttgcctccacagtgcaaacttgcgcacttttgattggtctttccagttagttaaactcaaattacggtttcatgattcttaattaagtgcaaccttagcaatattgtccttttcttttatacatcttttcatatattaaccacaagagaaactgtatttagatcttataatctttgtcgttgcctgcagaactactcttcaataatcaccgttcatccagagac

SEQ ID NO: 101579 - DNA, 979 bp, Mimulus guttatus
  Intron number 1 from transcript mgv1a006596m (locus mgv1a0 06596m.g) derived from phytozome v7.0 (chr-ID scaffold_26; pos 935335 to 936313 reverse strand)
ctgaactgtcattttctcctcttatttacatacaggttggtaatttatttatttaatttttatttatttttctaagtttatgataaggttgagaatttgttataaatagtataaattttaatctgttctatttttttctacctaccttaaaagaaactaaaaataattgggtttaacactatatgtgtgaatttataggaatatttttgtgttaacatctcttaaataaccaatacaaaaagtgatatttttattttatttttattttatttttgtatttttatattttatttttttatttgataaatatttatatataaaatatgggtaaattacaaccaacccctgaggtatgtcaaattacgaaacccccctcatatttatgtaattaaaaatacactcaactatgaatcttcttacacagtgtcaatttcaatagaatctttagatttcgtggaatgttcgctagttcgtattcgttctgtgcaaaaatgcagttactaatgcaccacagatatttacaagtccatagacacatcttatgatcatcatgtttcaaaatgtgaagtgcgaatggggtaaaacaggtacaaactggagaatactccatataatataggagattcaactaaatttgacactacaatagtggacgtaaaaagactcatagtagaagatgatgattgtaatacccaaacatgatatggtccttttgtaatttgacattagtttagggggtgaccgtaatttaagagataaaatatttatacttcacaattcacatagtggggttgttgagttggtctaagcttttaaacacttgattgagacaccaacctcgttaacagaacttgttcatttatataaaaaattactcctatcattaaatatatttaaattttaatataaaatattttgatattttgaaatatttaaaatatttagtatttgaatttttgttgcagctgactaaattcaa

SEQ ID NO: 101580 - DNA, 963 bp, Mimulus guttatus
  Intron number 2 from transcript mgv1a014151m (locus mgv1a0 14151m.g) derived from phytozome v7.0 (chr-ID scaffold_8; pos 2492764 to 2493726 reverse strand)
ctcccattgcaaaggaaccctcaaggtttgcaccacttcttcttacttttttttgtgcacacattgtgtttgtataaatgctctctctgcattgatcttgattgacttgatttttcgcattttcgttgtttggtgtttgaagaacttatgacttatccgatctagattttttggtctttgtttgtgtgtgtgtgtgttttcaacgtttcgtatttgaatttttcgattgcgtattttgactgattggattagtgggtggtgtgattgagtataatgactttgatcggtggagattacatatttattaactgattaaatttgaattctactccaaaatatcgaatgctgatttagatgatttagtgccaactatgaaatattactatttcgataaattagtttgaagcgttatttttcatatttatgagattggagagcttgattcttgcaattctttcttgttgattttttgtattagaagactttttttgtgtagtttgttcttgatcgtggccgcatacacacaaatgcagacatatgtgtgtgtgtgtgtgtgtgtgtgtgtgtataatatatatataaatgcttaatgctcttcgttaaccaattggatcaacttgatattggcatatgaaggaagttttttcatgtagagggtatttttaaagaattttattttacacagagattaataacacgacaatctagtgagcccttgtagtaaacaaaagttttaagatagataatataggacaattatgaaataaaattatgttaattcgtgtgcatctatttttgatacatattcaagcttttgatgctaaaatcaatttaaaaaaatacgtgaggcatatacgcaatactatatagtttaacttcagtgcttgtaattcatgtatacataattatattcataagggtcgccacattgttgtttttccacagctgagcaattactcatca

SEQ ID NO: 101581 - DNA, 641 bp, Mimulus guttatus
  Intron number 1 from transcript mgv1a008297m (locus mgv1a0 08297m.g) derived from phytozome v7.0 (chr-ID scaffold_1; pos 207833 to 208473)
tttttcttcccaagattccaatcctccccccaaaggtattttctttctttttaatataatccaagaaactgaaatggtgctttgatttaatgtgggattactaattttagtatctgattggtgtgtgctgcttgcttaatcatgtttaatttcttataattaagtgccattttatttgtaatcaaaatagttgaatgtttgttgaattcctgataaaacaagaaagttaggctgtgttgaaatttatagacgggattttggttttacgcctcgacattctcgattgggttgtgtgttttcgagttttttttttcgttttgctaatccttatctaaattagtcagaatttataacattatgactattcatcactgttttcggttagtgaagagtgttgttcttcgatgatttcgtgtagacttgttgaatgaccatctcaaccaaaagcttaagcttttagtgaaatgtatcatttaatattaatatctccaataagaattgatcgaagtgacggaaaacgagatttagtaacttcgatctttccatctaattgaatatattcactcggagagctcaatatatatgaggccgaaaaaatgcttggatcgaaaattataacgagctttacgtatgtaaaacag

SEQ ID NO: 101582 - DNA, 977 bp, Mimulus guttatus
  Intron number 1 from transcript mgv1a011737m (locus mgv1a0 11737m.g) derived from phytozome v7.0 (chr-ID scaffold_111 ; pos 833 to 1809)
aggattttttcgacgctcatatcactcccttgcaggtaattaattatttttaattaattaattataggggtttgcttgatttgatattatatggtcttcatctttcatatgatttttggtctctagttacattttagtagatttgtttctaggtgaaaatggttttcctaagttaattaaaccaagaggagaaatattttgcaagctattatacaatagtataggtttactcagtgcacctgtatggttgactgcgagtttcttcattgaaaagaaaaaaaaaacatattaaataaaaggtaatgttctataaattgtcatcaatgtaataatagagtaatcatataattaatttagttactattcgcccggtcacattctgggtttatttcgtgctgcatcggatgaaatacaagagtatcaccccattatcaccatacattcacaatttatttttatttattttttattttttatttttatataataatgaataaaagaatagtatatacatccatattagtatgttcattaattatcaaatccaacatcttacaaaattaaggagtcctctttctcaagatttgttttttgacaagattctttgagtagtggtcatgccatgcaattagcaaaacaaatatttttatttatttttatttttattcatttattattattaatctttaatttatttattatagcatataatagatttacacaaagcatctgcataactacagagattctcaaaaacatgtgcttactttacaattttcagcttttcctgattaatgcatgctgtataaacaagtattaaattcattactctttttattttatacaagtactaaagaaaacattcaataaataaatatcttcctatatatatatatatatatatatatatatatatatatatatatatatatataattgagaaaatgttttgatcatgatctatatgtacagtcagg

SEQ ID NO: 101583 - DNA, 993 bp, Mimulus guttatus
  Intron number 1 from transcript mgv11b018137m (locus mgv11 b018137m.g) derived from phytozome v7.0 (chr-ID scaffold_7 0; pos 254608 to 255600 reverse strand)
aactgccgcaatctgatatccccaagctcttccaggtaatctctttccaccatcctcttcaacaagtctggaaatcttcgtcaattatctggaaaatgttttgtttgagggatttgttctggattatttgataattctatttatggattataatccgtattactttgaacggattattgatattctttagtgaaatgctgaatcagtaccaaaattgatttggattggtgaattaaaaactgttaattgaagttattgggattttgattttgcatatttctgttttcttaggaaggccaagcattcgatttgaattagtgatcgtttccgaccgcctggtttcgtttttccgaatcagtaccaaaaattgatcaaattggacagctcttacacttaaggtacactattgcactcttaggcctcgtttggttggggctattagccatgattaactaaataattggactttgttaactgttcggtatccgcaataacttgccgggtcgacccgcaaatattatgttatcatgccttctaggcatgtttttttattggatcatcaagggtccaataatataattgagttttattagattatttaatcttattatcttgactaatcttatcttggcaaccaaacgaggccttatagatatgtcataagtcggcacaaatatatgtttttcccgttgcttattgaaggtttcttaacaaatcattagcgattaaatatttcagaaaaaaaaagaacatgaaacttattgcatgtttttgaaattttcgactttcttcctcttatttgttcctcagtgtcttatttgtttcgttttttttttctttttcttctgctgtggttcaattgttattggctatttagttaacacatgaattgcagagttatgtttagctttttgtttgtttatatgtgaattcatattgtccaaagtcttggtatctgctaatgcttttccactatttaccgtatttatagct

SEQ ID NO: 101584 - DNA, 1036 bp, Mimulus guttatus
  Intron number 3 from transcript mgv11b022951m (locus mgv11 b022951m.g) derived from phytozome v7.0 (chr-ID scaffold_8 6; pos 622724 to 623759)
cactttctaaagatacgtcaacaaggtatttctggtcctttatatatatatatatatatatatatatatatatatatatatatatatgttaattttagtaattaatttcattattcaaccacaattttagttgttagttcattaatcaactatttcgttagtcgattgattcctgacagagaaaaagtattacaaaaaaattaaaaaaaaaataataataaaaagttaattttttatttaaattaaaaaagatatcaaaaaattaaaaattaaaaacaaaaattaattaaaaaaaggggaggaacaaaactggggatgtgtgcagttggaaaaaaagatagtggattattgaggaacggaaaggagcctgggtttacattaaagagtgaaatatgggttggacatatccgtattaatgaatatttttggacgttctcaaagtgccccatttaataaaggcaaaaatcagcttgggaattaccgaaaaaatcctcatgttaaataaatcaacaaggaccctccaatgaaaatcagccaaatcaaaatagatcgttgacagcttatcgtggacaccgcgcgcagagtgggctaccgggggtgactttttgacccgaaagaccaaaataccgtttatattataattttaaaaaattatagatacaacccaaaatgaagtttttgaaattttcaattaaatttttcaaattttcagaagcgccctctctctaaattaactcaaaattggaacatcaatctcaatttttaattcaatctttaatacaacatcttctcatcatcgaaaaatgtctatctcgatttctatttccaaaacggctggggtcacctccaaccaaaacctgaattcctcaaccaaccacgaaaaccctcggtttctttagtgaaattttaaaagaacccatggcagcgaggtgctgttggagtttggaagcgggcatgaagaagaagatctggtccagccaatttgtttctcttgttcaaaggtttgcagcacgaagtagatctaggtgggtggctc

SEQ ID NO: 101585 - DNA, 658 bp, Mimulus guttatus
  Intron number 1 from transcript mgv1a011912m (locus mgv1a0 11912m.g) derived from phytozome v7.0 (chr-ID scaffold_122 ; pos 417054 to 417711)
cctctgattttcagccaccttctctaatttctctggtatgtttcgctccgaccactcttttttttttctttttttttttttaattaaatttttttaggattagattttatttagatcctctgtgtttctcgtttgctactgctactttttttttttctatatattttacatcggtaatccgactgtgtgaattgctgtgtttttattctttgaattctcgcgctgtaataaatcctctattattggtcatttggttggataatttcttagatttaatatttatttatgttaatatttatttattttaataattatttattttaataattttttattttaataatttttcttcaagtattagatgtgtgcctttttttttgtaatgacaaattattttatttctgtatgtagtttggttttgttgagatgattttcagctagtgtgtgtgtgtgtgtgtgtgtgtgtgtgtgtgtgtgtgtgatttgcagaacttttaaatagaagaaataagttcttttactagtttaatccaaaattttaactacggttatttattataattattattgattttccgatttttcgattctgtattgttagtgttgatttcgtaattaatttgaaaaatatggaacaattctgaaggaatatactttg

SEQ ID NO: 101586 - DNA, 522 bp, Mimulus guttatus
  Intron number 1 from transcript mgv1a018441m (locus mgv1a0 18441m.g) derived from phytozome v7.0 (chr-ID scaffold_2; pos 856590 to 857111)
tcttgtaactggtgccactggctttcttgccaagagtacaatttctttctctctctctcgctcttaacaaaaaaatcttttgagtgaccatctatttttcatatagttaggtaaaaaatgttgtcactatgtttgtcgctaatgctctatagtgacaataaataaggattaagtgacgataaaaagagctattaattagtgacgacaaaaaaaatactatcacctaatatatatatgcaatatatgacaacttttgcatgcatttgtcacaattgggatgtcgctaatgcaacttctcagtatcgctaatgcaactttttctcgtagtggatttctctcttctcaaaacggacacacacacactctgttaattaacatatacacatacgtatattatgtatgtacgtatatgtatgtacatatgtactaggttaatacatcttatagctggtgattatatatttacaatgtttgatttttattacagtatttattgagaagatacttagggaacaaccaaaa

SEQ ID NO: 101587 - DNA, 701 bp, Mimulus guttatus
  Intron number 1 from transcript mgv1a019278m (locus mgv1a0 19278m.g) derived from phytozome v7.0 (chr-ID scaffold_6; pos 77565 to 78265)
gtggtatgggcttggggggcaattctgtcattgcataagcaaaaatgaagaaaaaaatcactcaagcagcgagtgtgcacacgatctactcggaagggtttttttgcctttgacctttttatgtaggggggtttttgctagttttttttttattataggggcttttttggcagataaggattacacaggggtattttttgcacattactcatatatacatgcatcatgccttgtgtgtgttttagtcctttctgttgtacttctttttttttttttttgataattatttctgttgtacttcacaaacaccatatttaatttttaaggcctgcttttgttttcacactctattgagtcttttttctgctttcagtaaggtaaccattttcaagccttttttttttcttctctctctctctctctctctctctctctctctctctatgtataatgtatgtgttttgtccctgtattcgatcattctctttagaattcgaagcgaccgtcatctatttttcagtgattgctctgcgaatttgtttgagaaatgttacattccccgtataataataattaatcccttctcttgaaatgtattaattttgtgtcaactgttttttgaagggatacaatttaatcgaacgagaaatgtttgttgcgcataagtccggtttggaactagcacttcaaagggagctagc

SEQ ID NO: 101588 - DNA, 594 bp, Mimulus guttatus
  Intron number 3 from transcript mgv1a014699m (locus mgv1a0 14695m.g) derived from phytozome v7.0 (chr-ID scaffold_27; pos 1244396 to 1244989 reverse strand)
cccctgtggtttataatcaatctataggagccctggttagtaaactttgaccttgtatggatttgcgattctctattgacaccattcgaatctgttaatatgttcgagatgagcaacgtaggctattgataatcgtaaatatgattaaagttgaggaggcccattgtttttagtcggcaatcttgtgggtcgtgtcgaattttgcctgtatcaaataaattgaaaagaatttctaggtgcatgaggcctcacgcagtcacgcttcttttaatgttggacaatagatttaattgagttcattacagtaagagttgtggattgcaaaagtgggtctccactaaatattatgcttaggctatcaaaacggaaacaaatgctggaaaaagtgtaagaatgaaatatttgacattaaagtatcaagtcatctgattaaaaccaaaaacaaataagttgaaaaactaagaagaattagaacttttggagcaccaaccacccaattgtgaggatattatatatttccctttgcttttctgtctttgggttctcaacgtgattaaacttaaaacctgtgtatatctttgtggattcagaaac

SEQ ID NO: 101589 - DNA, 711 bp, Mimulus guttatus
  Intron number 1 from transcript mgv1a014699m (locus mgv1a0 14695m.g) derived from phytozome v7.0 (chr-ID scaffold_27; pos 1245227 to 1245937 reverse strand)
tcgtcggcgttacgtttgcgtgaactccggctccggtgagttcaggtgtactttgtctgtttatatgaatttgttttaattgttgttttttttttcaatttttgtaaccgaatatattactcgagtaagcatttattggattctgattttgtcgaggaattcgaaacgagattgagtacgttttagtttcgaatattgaatttaagtttgctgatatgaggtgatgtgaatttaacagtttgatttgtgttggaaatgtttgatagtagaaaatctatgaataaactgtttccatttgaaactccgagtgttgttgttgatgagttgcaaacagctcccagtttgaacttgggagggttttctggaagttatcgcattatttcgtttcgatctggtttgaagtaggagatttgtttattcgatgtgcttgtgtttttgctgtctttgcaaactaagattacttgaatccagtttttcctttcatttcatgttcatgttaatttgtgaaggaccaacggtatgttcggttgtggtttgtaattgttaacggcaagatgatttttgaacctggcttaataatgtgccggtttgatttggatagctaagtgtctaatcagtatgaattcttcatcaccgtgctcattgaaccttgttttctttttttttttttttttttttttcccgtatgaaggtttcacaggttgaaggatt

SEQ ID NO: 101590 - DNA, 710 bp, Mimulus guttatus
  Intron number 2 from transcript mgv1a016415m (locus mgv1a0 16415m.g) derived from phytozome v7.0 (chr-ID scaffold_30; pos 1712515 to 1713224 reverse strand)
aaggggagcccggtgctgttattcgtggcaagaaggtaaataaattttgcaaaaaaataaaatatcccgtaattcggatttaaattttccagcattgcatccgatatacaaaacttcaactcgggaaaactataattctttgaatcttgccttgttggatcgacgcatattggagatattaatattaaatgatacatttcactaacaacttaagcttttgttgagatggtcattcaacaggcagacttgattttatgccgcactccaatcttgttatgaattgtcgaatttctcaaatacttcaaatttaatatctcacgtgctcttttttttttaatgaattatttgataagtcgaagttttttttttttttttttcttatggatgctggaaactgcaggaaattccatatcatgattaaaattacgcacaattagctttatgcccgtttttatactaatttacagcgaaaaaaacatcgaatatttaacgtgttttatatccatttttttaagaacgattgacatagtgaagaaattccaacatttttacaagtacaggaaaatccatatatttaaatgtttacaactacacataataagctatcttcttgttcgcaacatttttaaaaggtaaatttcaacattgttttcctttttattattatttttgcaggggtccggaggaataactattaagaaaacgggcca

SEQ ID NO: 101591 - DNA, 813 bp, Mimulus guttatus
  Intron number 2 from transcript mgv1a011315m (locus mgv1a0 11315m.g) derived from phytozome v7.0 (chr-ID scaffold_108 ; pos 472821 to 473633 reverse strand)
ctcgtatagcttctgcgacaagacgaccaagccaggtttcacactcgtcactttacataattcataataattgctttggtttacattgctttcgtagttgtggttgatttgtactgcaaaagattacaacttggaccgatagatttttgtacacaattttgcgtttgtcgattactaatgattctttgatccgaatggtgcttgctaatgattctttgatccgagagttatttaattttggttttcgttttcatttcgtgtatatgtaacaaagtttatttttaccacctggggtggaattggaaccaaagtttccgaattccgccggtcccgatccgaaaatttccgattttgtacaatccttttcattctgaaattcagaacttccaattttcgattgatctgaattttttggatcagaattggaatatattgggattctgatttcggatccgattttaattttcgaaaaataattccaaaaaatcccaatttttttcccccagaaaactacacttataatgtcaacattattatgtattttatattataggctcataaaaaatggaatatccgatttctgccgattccgatccaaaaatcttctattttctccattttttagaacggagttggaattaatttttcacttccaaaaaaaatttgaaagttttccaaaattcctaaatccaatccgaaatgtccgattcccgcccctgtttccaccacatgttttttttcttctagctaactaatcattgtaccgttttcaggctccagctaagtactttttatcggctgcaggttatagga

SEQ ID NO: 101592 - DNA, 715 bp, Mimulus guttatus
  Intron number 1 from transcript mgv1a003167m (locus mgv1a0 03167m.g) derived from phytozome v7.0 (chr-ID scaffold_17; pos 418384 to 419098)
gtttagtttacatttttggtgtaagtattttttttttatatattatttattatttattgtataatattttttttttttttttggaattaggtagtgttgttctatttttagtttttggtggtggtgtgagcatatgtagttaaatttgcttgtgttgtttttggttgagttggttagaacttttgtttctgtctttatgtgtacttgttgatgtttaaatgtttaatttggtgaagagggctacttcactttcttgaatgagggttttttttatttattgttttgtcctttttatagtcctgaaaatcttgaaaattccttttcttttacaagaaattatttgatttttctttcttttttttttttttttttttttttttgtttttctcgtgcatttggtcatgagagagagagagagagagagagagagagagagagagatttggttggccaactatgtaattctttattttcttgaaggaaagaaaaaaaaaattctcaaggagtaactaaagttatgtagattgaatttttggaattatgctttaggctttggagaattaaatcattgtggatattattgcaccacctccaaacacattgtataagggagtacattaccgtataaatcgaagcatgtcaaggaaattaaaaaaattcgcgatcgtatagtcgatcggtttatttatctatgtacttattcttggattaaggg

SEQ ID NO: 101593 - DNA, 531 bp, Mimulus guttatus
  Intron number 2 from transcript mgv1a014710m (locus mgv1a0 14706m.g) derived from phytozome v7.0 (chr-ID scaffold_6; pos 3677437 to 3677967 reverse strand)
ttggattcttcgtattcaccggcattccttcttctgtaagtttgcctcaattctcttatatgcgaattcaattttgaataacgataatgaaaacgaagaaaaggataaatgtctatattcacaaaggtcttcaagttcatcatcttccttaaacgattcataatctttaaggcctcgtttggttgccaagataagattaaataatgtactgaaatgcaattgtattattggaccttggaaaatccaataaaaaacatgcctagaggaaccaggataacattatatttttgcgactcgacctgacaagttattggcataccaaatatcaaataaagtctagttattcagttaatcatgactaatctcccttaccaaacgaggcctaaattgattcatgatgttgctatgttttttcgtattaattatatattaaggtctgatatgcctgatgctgttaatcgaaaactgttaacttttgcaaaataatcgaatacaggcatttctttggtacaaatctgttcaagttgctaa

SEQ ID NO: 101594 - DNA, 827 bp, Mimulus guttatus
  Intron number 2 from transcript mgv1a009012m (locus mgv1a0 09012m.g) derived from phytozome v7.0 (chr-ID scaffold_11; pos 1056519 to 1057345 reverse strand)
tttcttcgagtgtttccttcaattaatcgaagacggtatgattatttttttttttctgaaattgtttgtgtttcccaattttttttttttttttttttttgatttgtcgttttgaatgtgagattaggtttttcaaagacagagaaagatctcgtcgttttgattcaccgtaacgaaaagattatacggattttttttaatttttaaattttgatttttttaattttatttaccttttttggatctggaaaattcttcagtactaaaccaggtctgtcttgcattccaagttgatttcgatttagagagagaaagagaagagagagaaacaaaaatcttttcataatcaaccctatgtttcgtcgccatcatcatcatctattcatctcctccaacttttccatttatttttttttaattttaatttttaattaattttattcttctgaacttaccttaaataaaacggtgacttgattttaagaatgagtttattgactttccatgtcggctttaacagctctcctctttaattgcttcagaacccttctcttcaatcggtgaaccaaactgtattaaatagtactaattattttatttttttcatttaaatctcttacgcatgtgcatctctatattcttcgatataattaaatcctttttcaagatttcagtgtaacgttaaaaaaaaaaagtcacagaggcgcattgatgaaaattttatgtgtgtttgactgaatataataataataataataataataataataataataatggtgttgtcttcttcagttgaagaagctttaaagaagaagacgaagaaa

SEQ ID NO: 101595 - DNA, 440 bp, Mimulus guttatus
  Intron number 1 from transcript mgv1a020589m (locus mgv1a0 20589m.g) derived from phytozome v7.0 (chr-ID scaffold_149 ; pos 50504 to 50943 reverse strand)
tgagggcaaaagcttccgtgtcggtgacaccatcagtatgtgttgcttcaatatttttttcctattgcattataattctactttacttattccaattataataccctttcaaaatcgaaagctaaaaaaatttatgataaattacgtgcatccccttgaggtaaggtaaattaccaaaaaaaaaaaaaccttttgtttgggtaattacaaccatttctcaattatgaatcttcttacacgttcagtgtgttaaatttagtggaatcttctagattcatagttgagggatggttgtaattaccaaaacatgaggggttttttcgcaatttcaccttacctcagcggctaaaaaaaaactctatggaatttgttgttttataattctctcaaaacctaatattagttatggttttttaatatttgcttttgttgcagcgttc

SEQ ID NO: 101596 - DNA, 538 bp, Mimulus guttatus
  Intron number 1 from transcript mgv1a006034m (locus mgv1a0 06034m.g) derived from phytozome v7.0 (chr-ID scaffold_2; pos 2290236 to 2290773)
ctttgcctcatctctctattaaagatacccccattgtcagtctctctctctctacgtttcctttctctctctacatttccttccatttttggatcatttgctgtttacggtcaatctgtcacaattaatttttcctgcactgtattctccaattgttccttcaattttctcgataggattaatcattcaatttcacgattactgcatacaaagaatgtgaattaaagagagcggaaaaaaaggaaaataaagaaaggataataaaaaaaattgatgtgtgcgtggattgtgactgatgaccgcatcttcttttggttggtaaatagtcagtgtgtttcataaattctcccaaaaataggagaatggtggataactgaattgaataattcaatagatagatattgctgcacatggtggtggtcctcgtaccgccattaatgctcttttatttcaatatttttttttgattttgtttttttcccaactggttttgatttatgcaggaatcttcgtcagcacagtacatactgcagcaata

SEQ ID NO: 101597 - DNA, 720 bp, Mimulus guttatus
  Intron number 1 from transcript mgv1a008608m (locus mgv1a0 08608m.g) derived from phytozome v7.0 (chr-ID scaffold_60; pos 211913 to 212632)
cgactctgataagaaattgagaaggaaattccgaggtaacatcgtacattcatgattttttatcttttctttgagaatttcagacaagaattactcgtaaaacatgttttgccttccgatctaaaacgatttcagagcaattttttcatgccaccggaaaacataaagttttgagctttctgattacacacgaagaacagttgtatccgtgatgaatgtagatataaattttgctaagcgtcgaatttttttttgtgtgttatttttctgcaatgatcacatataaatttgggtaaattacgaaaacccctgaacttgggctaaataatgaaaaacaaccccacttatccgtaataaccaaaattccctctgattacttgttgattgagttgttgattgagttttttaacagaaaatgtctacagtctattataacttatattaaataggtgagaaataaaataaaatatctgaaattgtgtaaagtctatttcttggaataaaataaaatccgggaaaagttggtgtaagacggaaacaaacctcagggagtttttggtaattacaaataggtgggggtgtttttagttatttagcctaagttcaagggtttcgtaatttaccttataaatttagtggataaataaattagtttgaattttcaggtttacaattttgtactagtgtaactttactgagggacttgtatttcatatgcag

SEQ ID NO: 101598 - DNA, 489 bp, Mimulus guttatus
  Intron number 1 from transcript mgv1a013175m (locus mgv1a0 13175m.g) derived from phytozome v7.0 (chr-ID scaffold_122 ; pos 610329 to 610817)
taataaattcgtaatttcattgccactgtttataggtatgcccttctctatcaatcttgtttattttttttatttttaattttgtttttgtgggttatgattgtttaattgtttatcaaaatatgctaatttatgtcattttatttttgtttggtttctttacttggaatcaaagtccactccttttgttgcttcccagctcaattttgtattgggctatcactaattcttcacttcaagattttttttatctgggatttagattaattttttttttttttttttgtttttttggtcaaattaaaagattccccctttttcgggtttgattttgtctcgaaagcatgatgaataattatgtatgtatggtgaattgtgattttatggctaatttgtttctgattaattagtgtctttttttttttttttttttttttcttgatgtatgtactaggttgtttgggaagattaaggtgaagtgagataaga

SEQ ID NO: 101599 - DNA, 768 bp, Mimulus guttatus
  Intron number 2 from transcript mgv1a011212m (locus mgv1a0 11212m.g) derived from phytozome v7.0 (chr-ID scaffold_8; pos 822384 to 823151 reverse strand)
cccagaattttttaaaaatccaaaatttgctataagtgagtcgagatttccgatttctatcacttcttatattaccaaatgatgatgtgttattggatcgggggtctctttttggtaatgtaccggaatctatggctaaatagcgaatggaaaaaaaaattaggagtttaggtttctagcaattgaaatttgtccatggcgagttctttgctatactaagaataaactgcctcatctagaacttacctcaataatttgccatataatacccacagctttttgttggttaagctcccatgcagattttattcgttctgttccatatgctgcttagatgttgctttattggatatcaaagtagtcacatacaaaagcatatgaaatactattatatcttatatctcaagaagaattacttggttaatattatgatcttcaattcttcatgcatttagaaggtgaggcataaatttgtgaaacgacttcggaaaaaagatgttgctttatctcgggatgcatgataagactgatagactcttacattcattttgcccggtctttatgacctgcccccagcttgtatgtgctggcatactatttgacttgctactttggttgcaacattagaaaattcaagcctgtgcaaggcaggctagtaatggttgtgtgattctaattctttttaacgtctctgttttaatttgtgctaccaaatactaaaacatgaccacaggtgacacatatcagcagacagacagagactttttg

SEQ ID NO: 101600 - DNA, 593 bp, Mimulus guttatus
  Intron number 1 from transcript mgv1a002850m (locus mgv1a0 02850m.g) derived from phytozome v7.0 (chr-ID scaffold_2; pos 3195759 to 3196351 reverse strand)
gaaggtttgtgtcttctactccagtcagtctcactgatattttgtttatgttttcttttgatggaatttattatttgttcatagattttgactttttcctgcttagtatggtttgaggtttttaagctggaaatgcagcttataagctcaattttgtataattgattatgactacttttggctgtactttgaaaagtccagttttaggtattttactggaaattttgaaggagtagtgattaatttaattatgggtttattaagttatgcacactgttaaatggtgctattaagtatgaatcttgattttgagtttagggctatgattattcttgatatcgggtaaaagaaaaatccgtaggaagaacgacgaaaccattttgttatgaattagagtgatattcgatcaagtattatagatttctgctgtactcgaatacgggtttattctatataacctactttggttcgaattttgaattattatgtcttcgtaatttgagttgttttgatgttggtgctattgaaagacgaatggctttatcgacgtttacggatttgaatttggcggtggttttgttttgaaataggtg

SEQ ID NO: 101601 - DNA, 809 bp, Mimulus guttatus
  Intron number 1 from transcript mgv1a026601m (locus mgv1a0 26601m.g) derived from phytozome v7.0 (chr-ID scaffold_235 ; pos 23025 to 23833 reverse strand)
aggttagtttttagtgtagggtttattgcaaacagtacccttgtgttatattgaattactaaaaaactattgcgtgttattttattggcaaaatcttcctacgatttaattttttgggcatattgcacatcaccccttaaaaatttctagttttcgcactttactccctcaaatttttaagaagtgaatgtcctccttcaaaattattcttgttcacatagccccgatagcaaaattttgatggattattcatcagcatttgagtatttttgttgcacattacccctttatatgttatatttgttatatttgttgcacgttaccccttaaaaacattagcttttttttttcccctttaaaatgttatttttgttgcacaatgcccaccaaaaataggcttttgggtcaatgtgcaaccaaaataatattttgaagggggattatctggtttttgaatctttaggggggaatgtacgaaattggaaaatttgtaggggatgaagtgcattttgttctaattgtttttagcaattagtaacttgtttattggcaaaaacttccttcgatttaactttttttagcaattagtaacctgtttaggtggttgtataaaaaaaattgaatcataggggtggttttggcaataaaataatatatatgaggtagtttgttagcaatgtgatataacaaaggggtagtaactgcaataaacccgtttagtgtatgtcttgaattttcttaaggatctttaatttgttgaatgctataatgtatatttgatttttaatattccttgtttgccttaggtt

SEQ ID NO: 101602 - DNA, 437 bp, Mimulus guttatus
  Intron number 1 from transcript mgv1a002877m (locus mgv1a0 02892m.g) derived from phytozome v7.0 (chr-ID scaffold_18; pos 1373972 to 1374408 reverse strand)
ccctcccctcccacgctcctcctgccacgtgtcatgtaggtcccacgcagtccaaacaatacctacacaaatttgacaaattctcccccttttatctcttcttctctctctaaatcgccgtcgctctaattatccggcgatataaatacgtatttatattattctgtttttgttttttttttcttttctaatttaattttatcttactggtggtatctttttctgcaattataaccgtcgatcaaagctctgatctctgccactacttttttcgaggtttttattatactccaaaacaaggtttttgagtattcagttgtcgatctagaaaaatcacatagggtttttttcttcctgattttgattaatttactgaaataaagtttttttttggggtttcagtaattgcagagttggtgagtgttttgattgattgg

SEQ ID NO: 101603 - DNA, 1008 bp, Mimulus guttatus
  Intron number 1 from transcript mgv1a006145m (locus mgv1a0 06145m.g) derived from phytozome v7.0 (chr-ID scaffold_42; pos 19695 to 20702)
gagaagaagagagtcggcggctaggttttaggccataggccatgtagaagaaaaagaaaaagatagagaaccaccggggagggagaaaattcgggtggtgttcatagaaaagatagaaaaagaaagatattaagagtaccaccaccggggagggaggtgaagaagaatggcggctaggttaaaaaacctggtgctctgataccatataggaacaatagaatatgagaaatagagaaataataatacgtaatagaaaccaccattgtgttataggttgatttacgtggaatatatatagagaaataatgcaaggtaatagagtttgactaggtaattaaatcctaactaatctaagtaactcaatcatactagaatcctaatattacaagagttctataatataattctctctaataattacaaccacctctgaggtgtgatcaaattaggaaaaattctctcttgtttggataattatatctatccctcaactatgaatcttcttacacctctacccttacggtatcaaattcaacataatcatctagatatcgtggaatgtgctctaatttgtactcgttttgtgtaaaaatacagtttctaatgcaccacaatctgatatatacaagtcaagaagcatattttataattatcttatttcaaaatgtggagcataaaacataaaacatgtacaaaaacgataatattccatataatcaataagatttcactaaatttaaaaccacaaggaatattataatcaagaagatttcactaaattcaaaacagcaaactgaacgttaatggaggttattgtaattacccaaacagaagggtagttttccgtaattttaccaaacctcagtcacggttgcaacctacccaaccaatacataaatcagtctcaagtctcaactgaaaattagtgacgaactcagccatggaacaacaagcttccaaaaccaccgatcagcccacctttcctctgcaagtggattccgaccacaa

SEQ ID NO: 101604 - DNA, 759 bp, Mimulus guttatus
  Intron number 1 from transcript mgv1a023859m (locus mgv1a0 23859m.g) derived from phytozome v7.0 (chr-ID scaffold_104 ; pos 559294 to 560052)
cttccgaattgagtgtcgtttctgaaaaagggcaggtggttttttcatttttgccaattttagtacattttttcactaatcaagatttgatttttatgttcagttatatgctaaattgatgattagtttattaattttgttatgatttttttaacatttatttaagggttttgaatttgagttgctttttgattccatgaaagttattcttttcggatttttgcaattttagtaccttttcactaatcaagatttgatttttatgttcagttatgctaaaatgattattagtttattaatattgttataattttttgacatttatttaagggttttgaatttgaattcctttttgattctgtgcatattctgtcggatttttgattcaaattctttacatgtgtgatctcttgaaagttatggaaatatataggaataaatatacgatttatttaatctattaaagttatcgactttaaagatactcgacattttattatttaagtatttaagtcgcctccgtttgtggcacatgaagtatcaaaatgtggttttcgaaactatgacagtgtaaatttctgaaccaaatcgaaagagtttgattttcttcatacgtgtaaaaatgagaattttaaatatgtagtttacaagttaatctcttgtgttaaaagcttactaccatatcatttatgttaatttttaatgatgtgatgaaattggacaggtggcgtgcagagattatccccacccgaggcacag

SEQ ID NO: 101605 - DNA, 696 bp, Mimulus guttatus
  Intron number 2 from transcript mgv1a014632m (locus mgv1a0 14632m.g) derived from phytozome v7.0 (chr-ID scaffold_7; pos 603043 to 603738 reverse strand)
tcaattttagtttctcacagcctccgcccagagaggtacgtacccttgctactttatgccctcgttgttttaattcttttttgaatattttaatttgttgtattggattttaattacgttgatgattgcctgctacgctgctgtgtgtatattagagactgacattttgattattcgttttgttcgaaatgtggagtaatataacatcgctaggaagtaaatttctttgatttgtatgtttctaaggtgttgtttgggaattacggttgggtttagtagacgatgtaattaagccttgtctaaagtttggcatttagctttcaaggaaactgacaaaaaacggggcctcgaatattaatcaagaaggatactcggtctaagctagacccttattattacacggctctatgaaggtataatcactaagttggtaagtcccaaacataagataatcgcatattacattatggacaaacaatgtaaaccctaaccaaattaacattcccaaacgaggcctaatggtgtttgtttcttctttagtctataatacttcgatacctattttagaggcgtgttaacattcaaatgaaaattttgaaatttcgtgtgaatatgtgtcgttaacgcaagctaacatatttcacaacgaaattggcatcaggtgctattggagttagctaggagcagaaataaagt

SEQ ID NO: 101606 - DNA, 406 bp, Mimulus guttatus
  Intron number 1 from transcript mgv1a014632m (locus mgv1a0 14632m.g) derived from phytozome v7.0 (chr-ID scaffold_7; pos 603968 to 604373 reverse strand)
ggtggacggcttcaatttcgtctctccggtataaggtaggtgtccgagcatttatttattttttatttttatttttgaaattctcagtcggttcactgatactccagattacaaattggaattctgagctgcagtagtgaaatttctgaattaatccttttcactttcgattagatgtatccagtttatgatttctatgaagaactaattttgacctagtatttaattaggtttaattttgggggtttgtcagaattcagaagtaattgaaaaaaaaaacaaatgtctcctgcttgattttgcatgctcactcatgagataattactgaaaatatcttaaagtgttagtgaaattctctatattaatcttttctgttttgatacataagagataggatcgactcaa

SEQ ID NO: 101607 - DNA, 910 bp, Mimulus guttatus
  Intron number 1 from transcript mgv1a004585m (locus mgv1a0 04585m.g) derived from phytozome v7.0 (chr-ID scaffold_63; pos 745379 to 746288 reverse strand)
caacgccgtctccgaaggtataaaatgaagtctggttacctttcgttgtttttttttttttagtttttatgtggagttgttatttattgaagtttatgccgttcttctatatatacatatatatataatttttttctgtttgaagaaatttttaagcttgacttgttgattttgtttagaaagagatgttctttgtgcattacgaattgtaccgtcagtctggtgacgtaaagaatgggtttttagggtctggtgggttcttcttcagttaattatgaagttggaatacttggaactaatcaaaattaatggttaaacgaatgagaaaatgtggggcaaatagatattatattttctttagtcattgaaacgaatttagctttgcagaagcactctaatgtgaataatacgagccgtggtttacattcgatgtagaaagtggtactttctttgctcggagtttgaaagttccggcacattgtcaaggattttattaaaaaatgatggtacaaaaagatagaaaaaaattgctttggatattcgtcctgtttctttgggggtcgactagatgttcaggctagtatggtagaaaataatgtggaaaacgtttgcacgtttgtcttgcattcgttaattattagaaagtgaaattttgcaagttgtttaccatgtattttgtccatcttttttgcctgtggtcttcatatatatatatatatatatatatatatatatatatatatatatatatatataatatttatcggtgtatatagatatctacttatgacatctctgtgaatgtttgtgtgtttatgtatgtatttttattaccatatcgatgcaactatcgctcatggtatatgtaatgacatcgattgcctaatggtgaattttggattaaggtcaa

SEQ ID NO: 101608 - DNA, 953 bp, Mimulus guttatus
  Intron number 3 from transcript mgv1a006161m (locus mgv1a0 06161m.g) derived from phytozome v7.0 (chr-ID scaffold_60; pos 726395 to 727347 reverse strand)
catacgattccgtgaactcgctgccgacgtattgggtaggggtttttcttctctcataatatatagtttattactaattacctaattttcaggcattaattaatgatgttatgttttctagtctttgttaatgaggttgcagtttttctgtcactgtttttgttagaagtgagtaatttttatgtgtttttgactttgttttgctttagtttaatgaaagaaatggctcttccgcaacttgcattcacatccatctcgacaactgttcgtacttttcgatgcgttagagagagagagagagagagagagagagagagagagagagagagagagagagagagagagagagagagagagagagagagagagagagagagagagagagagagagagagagagagagagagagagagagagagagggattaggtcactgataattagaaaacgaaaaccatattattgtgtagtattaggccccgtttggttgccaagataagccatgattaactaaatagttggactcaacttgatgtttggtatcctcaataaattgccgggtcgacccgcgaaaattatgttatcatggcttatcttgccttttagggtacttttctttttgttggacgtcgagaggtccgataaaataattgggtttcattacattatttaatcttatcttggctaatcttatcttggcaaccaaacgaggccttagtggttcagatgatttttccatgcaatgtgttgtcacggataatgttttttcggtgttttaatatcgcgtcggagcacacaattggtatgaataggatgtatggatcttttatactagctacctgtaaatcgctacagcagattttccgattaatagacccctttcaactcgtacttttttttcatgtaaactgaattttgagttgactttatgcattgacttgtaataggttctgg

SEQ ID NO: 101609 - DNA, 950 bp, Mimulus guttatus
  Intron number 1 from transcript mgv1a007470m (locus mgv1a0 07484m.g) derived from phytozome v7.0 (chr-ID scaffold_18; pos 642370 to 643319 reverse strand)
aacgacacgatcgccatttttctctctctataagggtaaaaccgtcctcgtatcttgcactttctctctctggaatttcctaattttctcctcctttttatgtttttatcctttgcctaatcaattttcttcttcgccaatttctaatcttcacttttcatttagttaggaattaattcttcagattcatagaaatgtttgatttttttctgattttttttttaatatagttcatcaaagaacgatgattaaccgtccgatcataggagattttgagattttgttatggccgtttgatctttgagctgcgaaatgagctctgcgaaaagacggaaaacgaatctagttataaataattatgaagatgattatctattggatttccgagatctcgtttttgttatttatttaattatttattattatagtgaagtatgcatatcgatttaagaaagtggagttttttttttttcagtttttattctggttagattttgtgtttgtttcgtttttagatctgaaattaaagaaaataaaacttgaagaagtgactgagaatctgaaatagaaatacctgtatgattttactgtagtcagtaattgagtgctttactctctgtcagtatgaattcggaagttttttcaagtggaagctgctgcgctgtatagttttgtcaattctttaaagctaagtattcagttgtttactattatttaactgcacagagtgcgacctgtttcgagtttttaatatttcaagtttccaattaattttttaattttaaatttagtgatatctgcttgattatttatagagctggttggtttcttccttagcatggaaaaaaggaggaatatgtgtatttattgtcattaattgatatactaactaatgatttaattttgcatttttgctagttagtggctcagttttttgggtatttgaaaca

SEQ ID NO: 101610 - DNA, 532 bp, Mimulus guttatus
  Intron number 1 from transcript mgv1a017598m (locus mgv1a0 17598m.g) derived from phytozome v7.0 (chr-ID scaffold_108 ; pos 132656 to 133187 reverse strand)
aaagccatcgtcaacaccaccgcgctctgtaacgggtaaatattgtagattgtttgtacaatttgatttttttctatctcgcggaagaaatacactctagctattgcgaattattgcatgctgatctgttttccactctgcaatttttcggattcttcttaattcttatggttttggttgagtaattaagtaaatttcaattcaattgctgaaaatgttggtttctcttaattccagaattttgattaaccatttggtctggggattttggggtttaatcgacaatggcggttgaatccaatagtattgttgtttattagaaaattgactcaagaagataatccctaaattcacactttcattcattcattccttatgcagagtatatattttgattagattattttccttatagtttgggatgatgtgtttccatttgtataccgggatattggtgtcttcatcgagtccggggaaagctatcccgatgttatttaatcaactaatttgaaatgagtttttggcagaatat

SEQ ID NO: 101611 - DNA, 703 bp, Mimulus guttatus
  Intron number 1 from transcript mgv1a002860m (locus mgv1a0 02860m.g) derived from phytozome v7.0 (chr-ID scaffold_11; pos 146606 to 147308)
ttaaaaaaaaaaaaaaaagagggaaaaacgaaaaggtacgcggttttattctagggtttctttaatgccccctcaattaaatgcagcattcaataaccggcttttctgtgtctatgaattgtggatcatctgttttgttaattgtttgtctgttgatgcagcattctccttcatttagaggaacagagattccgttctgatttttgatttttgttgtgttgatcctgtgattggtgtttgattgatttataatttgtttttttttgcaaagtcttctgggagattttcaaattggtaattggcttttcctgtaacgcttaattaatttggttatgattccgattatgttttggaaattttgtttctatgttttcgtttttccgccgattggattcgaagaggtcgtaaagtgcttgtgtttgtgattgactgctttatgatgggaaatgttatttaggttgagtgtaggtaaattcggaaagctttcgttttttcccattttgttgggaatttatctacattcgatagagattattaacaataaccagatcaagatctctttttgtttttttcatggatgcttttgtgtacagaccaggaacaaagtattattaatgatcatctagcatatattgggtttatgtagtgcaatcacatctccttattcgtatgcatcttctgtttgtaggattctacgttttcc

SEQ ID NO: 101612 - DNA, 1035 bp, Mimulus guttatus
  Intron number 1 from transcript mgv1a008732m (locus mgv1a0 08732m.g) derived from phytozome v7.0 (chr-ID scaffold_161 ; pos 177568 to 178602)
gtcgctaggtcgagcttgtcacacgttagcccggtgtagtttacgtctctcgtataatttgcaaattattatatgagagcgtaaatttacccaatgcacctatataactagctgcggggttacttcgttacaaaaaaggaaaaaaaaagattgaaaaaggaaatggtagtgtgacagtatcttctaaattattgtaaggtggtgtttgcaaaagcttatttaaaagtagaagttagtgattgtgagttaggttgagattaaggtggtgtttgcagaagcgtataaaaattaggatgtttttttctcaagtaatttattattaggtgtatgcaaaactgacttttgtttttgcttctcttaaaataagctgttttaagctataattttaaaaacacacatgtacatgttttttctatttaaattgattttccaattttttgcaaacacccccaacttttagaattaaacacttaatatcaacttaactcacaattactaacttatgcttttaaataagcttttgcaaacaccacctaagtgtctatttccaaaagttggagtgcttgcaaattagctaaaaatcaactaaaatagaaaaacaggtacacgagtacttttaaaattatagtttaaagcagcttattttaagagaaacaaaagcaaaaatttattttgcaaacatctaaaaacaaattatatgtgagaaaaaactcataatctatttttaaaaggttttacaaaaaacacttaaatgttccatgacattttgtgctctagattgcattgactagtgggtaacacgattttacgtcaaaatcgtaaatttagttaaaagcgtaaaacaaataaaaacgcgctatatattgggtaaacaagtaaataacaagacgactctagttgagaatttgagattcttccccgttgaagtatacagcgtagaaatcaaaatcaacagtccaatttcattttcattttcgtttttttttctttttttctttctcggagagggttagtatcggcggtttagaggtgaag

SEQ ID NO: 101613 - DNA, 588 bp, Mimulus guttatus
  Intron number 1 from transcript mgv1a026310m (locus mgv1a0 26310m.g) derived from phytozome v7.0 (chr-ID scaffold_159 ; pos 95282 to 95869)
agttaacaagagagaatatcaaggcttttatcctggtaattaatctataaatttattgttctgtttttttttttttgaagagaactcatatattcaaatggttacatttaggagtagaaatcgaacggattggatcggaattagcactttcggaaaaattccatttttttggaagtgaaagaatccgaaaatttcgaaatcaaaagttcggaaattggaacgaataaacttgtaccaaaatcagaaattttcggatcggaatcggtggaatttgaaaatttccaattattggtcacctaaagtataaaatgcataataataaaaataaaaatgatattatacgtgtaatttttggacaaaaagcgaattttttggaaattgaagtccgatagaatattccatttcggatccaaaaaaattggaaataatctaaatcggaatgaaaaatattgttccaaaatccaaaagaaatcggatcaaatcatcaaaatcgtcgtaaatcggaaatttcgttccaattttcaccccgagtttgtatttattgatggtgcaggacttatttattgctggaacagacacatcagcaat

SEQ ID NO: 101614 - DNA, 910 bp, Mimulus guttatus
  Intron number 1 from transcript mgv1a010500m (locus mgv1a0 10500m.g) derived from phytozome v7.0 (chr-ID scaffold_92; pos 88690 to 89599)
ctcgccgttaagaaatcccaaaccgacaccctctggtagtttttaatttttttttatttgtttcccttatttgaagtttccttttcagcagtaactattccttggattgaattaaatttgagaatgttgaagaatttcggttagaacacaaattgggattaatagcattctgcaatttcgaagtttttttccttttgttgtgtttgcggataattgactcattaaccgcttgttcgaatttagaaatttcgccattttttgctacttacgtttatatatctatcgcgcaaccgaaatcgccaatggtggacgattctgttttctgttatttatctagttagttatactgtgagatattatttagtccaaattaaacacatgtattcagttagttttctactaccacgagattctaatagtatcacgagctccgatgagaggtcctttatctgcaaaggaaaggaaccttttgttattttaagccggatatatagtcacaataacaacaaattgcgttttcgactccagttttaagacttttataaactaaattctgaaaaaaaaaaaacgaattgaaaagcttaagaaacaaacgatttgaaaagcttaacaaacgaatactgaggcatttcgatatcccagtatgataataggaagacttcttgtgtgacgttttcttgatctccccaggtgtgctgacgtggctacacattttattatggtttaattgaagttcgaaaaataattttatgctcatctgcaagcgatagatttgtatctaagttgatattatattttacgttgcttggatatttttagcattttttgagctaattgcttaatttgtgagacatgtgaataaagcacgctccccgattgatatttttcaggattaatttgactttctggg

SEQ ID NO: 101615 - DNA, 510 bp, Mimulus guttatus
  Intron number 1 from transcript mgv1a023252m (locus mgv1a0 23252m.g) derived from phytozome v7.0 (chr-ID scaffold_329 ; pos 60246 to 60755 reverse strand)
gtccattttacttgaacgacacattgggtatgtaattaagctctatatctattttatatatatctatatggacctatatataactattggaatattcattctctcaagttccatttatgcacgcgttagtgcaattttggaggattaaggtggtgtttgcaaaaggttttaaaaacaatttatgagctttgtttagctcattatctatcttttaggcatttggaaaatcaaaattcttcagcttttgtttctcttaagataaattgttctaagttaatttttaaaaaaacacccttaaactagcattttctatttaaatagatttttcagtatttttgcaaacttttagaaataattacttaatactcacttaactgataattaataagtacttatgttttctaataagcttttgcaaacaccacctaaatcatcatagcactcacacacatgtgcgtgtgtgtatacctaaactttatcggatgaattgatcatatgcagtgtttaagt

SEQ ID NO: 101616 - DNA, 872 bp, Mimulus guttatus
  Intron number 1 from transcript mgv1a006618m (locus mgv1a0 06618m.g) derived from phytozome v7.0 (chr-ID scaffold_4; pos 2167314 to 2168185)
aaaaagtccgattaggctacaccgatcagcttcatgtaagtggctctggtgatctttctctttctttaattaatttcttccatgtttaatttgtctgaacttcgactgggattattgctttactcatgtttgcaccaggattttatttgcattcaacacccttatattatatcgaattgctattttgatgcatttatttaatacacaactaaaccccaagtgattcatttttagaaaaggtcgaaataggtatggaatttccgaattctgtcgattatgatccgatcttttttttttcgattttggaaggaaatttgcattttcaatttctgatatttttttaatagaaattggagtacatattaaattccaattttcgatacaattttttatttctgaaattcacacttgcaatataaatattatcacatattaaattccaattattgatcaatttttattttcaaaaattgtacacttgcaatataaatattatcacatattttatatcatatttgactaaagaaatggaatttacgaattctgcatattcagatgcgaaagcatccgatttcggaacaagtttcttaattccaatttccaacttttccaaaaaaaaaagaaagaaaaaatgaacgaaattggaattattttttcacttccgaaaaaaaatgatttttttctcgacaatgtcaattctgatctgatccgtccgatctccacccctaatttttaggggtaattatgccaacatttataactcaatgggtttcttttaacaattagagtaaacaaaagggtggttaatgcaactaaccctcaaaatctttttgtagtaattcatcttttttttttgttttttgcagaaatca

SEQ ID NO: 101617 - DNA, 785 bp, Mimulus guttatus
  Intron number 1 from transcript mgv1a014164m (locus mgv1a0 14164m.g) derived from phytozome v7.0 (chr-ID scaffold_66; pos 597363 to 598147)
ccatcaacgcattaggtaacaatagtttttttagcaaattctatttatgtgactgaaatctccgactgattcatatttgcttcgtttgttcttcactgtgtgtacctgtatgaataatgtacaattagggctttgtctgagttcgggtatgaattttttatttgggtgaaactttctgtcttgtttgtgattcattatcccatgaaattagatctattttctgaatactcttacacgtttgtatatcgacaattgttgatgcacagtatgtatctatacttgcaaaattatcgaattacacaatcgtggaattcactatcgaaattatcgaactacacagtatggattgtgagcttgcttcttaaaatatcgagaaatatatgcttcttttgagctatgatgagttgaaaaaaggcgaggaaattcgttaaaatattaacaggtatgtctaacttattatacagcaagagaaaacttgtcaaaaacaatcgattagtaagaattacgaagtcgtcagctaccaaatctatagcttttcaagttcaacgaatattagaaaatacaaaatccacataagtagcttacaatgagttggccaattagaaaattttgctcgtatttgttattgaaggtcgatatttagttataggaaggaaaaaagatcgtatgatattcttgaaagagatacatgtcatttttctacgtattagatataataagtctatattgtttactcagcttttgtcaatttgcgtttacttcaggtctgaagtaaactcatcaag

SEQ ID NO: 101618 - DNA, 496 bp, Mimulus guttatus
  Intron number 2 from transcript mgv1a022401m (locus mgv1a0 22401m.g) derived from phytozome v7.0 (chr-ID scaffold_558 ; pos 41542 to 42037 reverse strand)
tggttccgaaaatatatctcccgatacagaaactggtatatatatatatatatatatatatatatatatatgtatatatatatatttgcttcaatagtttcttttttcttctgaaatgttatatgccggtttgacttcgaacgtaattttgacctttttctagtccgattttggcaaaattcaaaacaccgaaactgtagtcttttgagttagctttatctagattgggtgacaaagttatgcataaatgagtttcattttgaattttaattcatgcatatctttctcacacggcatccaatattggtgattctacttggtttagaaagctcactcaagatactacaaattccaagttttaagttttgcggaattcagcctaaaaaatggtcaaaatcatgttcgaagtcgaaaaacggcattattaaaactgaaactacattttatcacatccctttttattattaaaataaaatttatactctggttattttag

SEQ ID NO: 101619 - DNA, 757 bp, Mimulus guttatus
  Intron number 1 from transcript mgv1a016601m (locus mgv1a0 16601m.g) derived from phytozome v7.0 (chr-ID scaffold_16; pos 1085780 to 1086536)
gacatttttctatctggtaaccttttaattcaccttatttacattctttgcccttttttataatgaaacattaaattcacgccttttgtattaagttgtttaatcagtttcctttttgtcaaataatctggtatattataaccgccagtctctttaattgtatctatttgacaccatcacgataacattttctgaaaataaatttaacttaacatgtatctgtttgatccctccagattgatataggcttagtatagtgtcgaatagttgtcaaaaatcaattcaatctggtgtgtttgagtaacgtacatgttgttagctgttcgttcaatcagtcacttcacagttggattatggaaaacgggacgcttattttaatgaattccttttgattttttatgaatgcattattcaggtttggacaatgaatggcttttcgtgctgtatgaatatttcaatgttttatgtatatgtgtaaaagtcgggggctttttaagcttactatatgcagctagctggtattatttatattacaaattatgcattgtaagttagaaactcttcgtatgtaaatgttcgttacataaatggatggtgtagattgtgtacttcgatttttttcaatatcttggacaaaaggtttagccttcatgtcattatcgtaaatcttgttgtagactactactctttacgtcttttatggtattatgttctttattacactgaatccttcgggttttttttttcaggcttgtgg

SEQ ID NO: 101620 - DNA, 583 bp, Mimulus guttatus
  Intron number 1 from transcript mgv1a025268m (locus mgv1a0 25268m.g) derived from phytozome v7.0 (chr-ID scaffold_24; pos 1464244 to 1464826)
gtgggaatgagattatcgaaaatatgggaggatgcttaattcgcaattgagatcgatttcgtagcttatataggatattatagtttttgattttcgtcgtttcgtcatatgattatagagttgaatccaatcgtagcagaatggaaggcatttggaggattgcgttgcatattttagaatttgaatacaaaatggttcagaacagagtcttgcgtttaacgattgtatatatgtatggactatggatacaatttaccgttttttttttgtctatttatatgcagatgaatcacacactttcagaagacattgcatgtgggcccggcaaaatgaactttgcccccaaaacgtcgaccacatcgaagaaatccgaactcgcaaaaagaagaacgaatcccggctcagtctctccgttcgaagctctttctttagataataatccaacctcgaatctcaattcctcaaatccatgcccattgcccactcctagaccattcccaaaccccgattatatcgctacaacgacactcagttcttcacccgcaaagacaaccaatcacagctggacaagtggcggaactaa

SEQ ID NO: 101621 - DNA, 673 bp, Mimulus guttatus
  Intron number 1 from transcript mgv1a010370m (locus mgv1a0 10370m.g) derived from phytozome v7.0 (chr-ID scaffold_44; pos 1178327 to 1178999)
gcaccagctttgattttaagaagattctatctactgtgagtaaaccaatttgttttacctcttctcttctcttctttttgctagttgggtcttgcttaaaaattgaacctttctagaatggtgttaactggtaactgcttgttttggagtttgattcgtagctggaactagttcaatcttagttttttttttttttatggaatgatttgggttgttgtgatactgataatttggggaattagatttggtatacatgaaaaggatgtcttgaattcatcaacctagtaatgttgtaacattgctaaattggcttcagaagattttttcagtattgtgaaacttcaaattaagagtccaagcccaagttcttgaaattggaatattataatcccattttaacacttgggttaatttattttttagtgattgatgactggactagctactagttgacaactttcgaaatgtcaaatgcagccatcgtatattcgaaatgctgccattgtattaactcgaagtttctacttattgcaactacaaaatgtagtcgcattattctaattagagatgcctttagtttggtggtgatatagtattccgtttcttgattgtgaagtgaaaaatagaatgtggatcctaaataattaaagttttatcgctcttgcaggaaaaa

SEQ ID NO: 101622 - DNA, 755 bp, Mimulus guttatus
  Intron number 1 from transcript mgv1a012965m (locus mgv1a0 12965m.g) derived from phytozome v7.0 (chr-ID scaffold_8; pos 1753399 to 1754153)
catctgatcgggtatgaaattctctaccaatcgaattttagttttcgtcgcctttaattgtttttacttttgcaattttttatcgttaattggattagttcgtttgccgcttttggttgatgagcatattgttgtgtgtggatatgaatctgctgatatagggtatttttaagtccattctatgattgttttctccttcattgctttgaaaaaaataggattttggtgatttatgtggttcgattttcgatttagagaatttgggattttaggtgctgctgatacctgtcaggggttagatcctcagataatttctgttggcttcttgtgcattctgttggactatgtattacgggtgcatctgattccaaaaaaggcatatccatcggaatttatgactttataagtaatttgattcataattgctataaggaagtaccattaagggtgtgtgtgtgtgtgttgtaggcaattttttttagaaggaacgtgcatcaaatcctccatggttggaggggtagaatttgtgtgcatgaagaattatttgtatcctagagtgttcgtatctgtctttactgatatgcttttgaaatggttgcgtggttggtttcttatgtttccgtgtccttgaaatattctgtttctaaaatatttgtcattagcccttgtttgtgtttatgtttattcatttgaatttttagaactgatctgcaagaaaatttcgtttcagatcaataaaaggggtgaaagtgtgg

SEQ ID NO: 101623 - DNA, 419 bp, Mimulus guttatus
  Intron number 3 from transcript mgv1a011820m (locus mgv1a0 11820m.g) derived from phytozome v7.0 (chr-ID scaffold_102 ; pos 255575 to 255993)
tcataataccgaagcaggagtcaacttcggacacggtattttattatttaatcttaagtttctatctgagctgcattttccgaatggaggaaaattgaaatgcttctactgctattataattttgcattatttcactctccattcttttggaagttaagatttttatgaaacatggtccctttgaaatgggacaatttatttctgatgtattttgcgtacttcatattgagaaatatcctgaccacaaaatatcatactttgcagtgcagaaatgcacgctgattttttattttaattttattgcgttatcatatcattgcaacttttcttcctgatcaaaatggcaaatataagctcaaagttattgttttatttatgtttagtgccagacactcaacgaagaagagatttttgaggt

SEQ ID NO: 101624 - DNA, 621 bp, Mimulus guttatus
  Intron number 1 from transcript mgv1a002761m (locus mgv1a0 02761m.g) derived from phytozome v7.0 (chr-ID scaffold_102 ; pos 295416 to 296036)
actccaagaaaattggccgtttgcgtgcaaaggttcgaccttttttatattttattttagtgtctttgttcccttacatttatgatgattgtttgtttgtatgtttttcttttattgaatttgttaatatttggagttggtttattgactggtaatcgtttctatgaactgtgttcggaagttgtactgtgggttctggcacttgtaccgcaagaatgtatgtttttaactgttttcatgaataatttgatactgaaaaaaataaaatcaactccgaccaatgtttgagaaatgacgaatttggagaaaattaggtcacaactcaccacctccacaagtgcaatgtgtttgtagcaatgctttatatgaggtgcaatgtggaatgcgtcgtattaatttcttctgaaagacgacgaatatctgtgattacaaggagtacttataactagaatttgagttttaatcaatatctgtatgcaacttaatttgagtactttattgggatgtggagtgattcaaagttgcactatagtttgatttgtttcgtttgtgtcacggttgatttttctttctcgttttttttcaggaactaactgaagaaagaaaaaagaagaggaagaa

SEQ ID NO: 101625 - DNA, 695 bp, Mimulus guttatus
  Intron number 1 from transcript mgv1a020566m (locus mgv1a0 20566m.g) derived from phytozome v7.0 (chr-ID scaffold_58; pos 804644 to 805338)
tgggcccgtaaatcttctccctccatttttactatcttttttgatgggattattatttatgggttaattaattaattgcaaaattaccccttatgttatatatatttttagctcctaattaatcgggtttattgcattcaacaccgttttatttgttgtatttaatttgttcaaaaaatttgcaattaacccaaggttgtattcatattaatttgcatatactaatacaccgggagcaaaactctatttatttagcaaaatattaaaatatcgaactattaatttaatatattttctcctgagttggacatgaaaaaactattatttattaatttatcgaggttctagtgtaattattgttcattattcctcttctttttgaagttttctaatatggtacatttaggagtggaaattggatggatcagatcggagatcgaaattaggctaaaacaaattccaattacattccaaaaaaaatagaagaagaaaaaaaatggaatctcgtatatattccaattcggattaaagtaattttgtaattcgaaatgaaaaatattgttccaaaatcagaaaatttcgaatcggaatcagcagaaatcggaaatgtttgattccttatgaaaaaacagtcggtggaaaatatttgatatataagtatatttgaaacgtggaatgttgtttgtaggtactcg

SEQ ID NO: 101626 - DNA, 841 bp, Mimulus guttatus
  Intron number 1 from transcript mgv1a009191m (locus mgv1a0 09191m.g) derived from phytozome v7.0 (chr-ID scaffold_159 ; pos 322338 to 323178 reverse strand)
cggaaaaaaattccaattaaaggtgaaaaattcaggtatgtggcgatggcgattaccctattcgtgcgcaataattatttattttttgtatctgactttctcatttatttgatttcaatatccgattcttgtttgattgagtgctggcgttattttttctcaatttcgaatcgggattgcagaatttattgaattggtatcagtaatgcctccatttgttgttgttttcattggtttgtcatgaagaaagagttttcttagctcaaaagtcataaatttaattaggattttcttaacctaaagtggagacttctgcaagtgtgctattgggctattattgacttagaaatgatggcaatttatgggtggattctatctgattttaggttctgataaatgatatttccgattgagctacagttacttttgattaccggttgttgagcaatataatcaagatagcataccttagatgagattaggcatgcatttggtagatatttagataattggatgtattgtatgcatatgttttcttgattgattgcaaaagaagttgtgcggcgtgctaattttgtattcgtccgatattgtgaattttttcgaacttatatttaggttgcgggcctgcggtgcatcttcttgtaaaacgagagattgggttattcctagcttttagaatcggtggataactgtgtataagtttcagcacgagcttcttttatcttaattccgaagcgatcatggttatctaaatacaattacgttaggctttagaatgtatattacttgtaattcaggaagtataatcattttcttgatgcaggttaaaaaatcaaag

SEQ ID NO: 101627 - DNA, 425 bp, Mimulus guttatus
  Intron number 1 from transcript mgv1a012001m (locus mgv1a0 12001m.g) derived from phytozome v7.0 (chr-ID scaffold_37; pos 193661 to 194085)
caatcggctgattcgtcgtcgttgagtaaatcaatgtgaggttttttttttttcttagaatcgttaaacaatgtgcctcgtttacgactgttttcttcgtttatttggttttcttgatgttttcttgaataagcagacatccatttgttaaagattatttgttgttatcacttcaaaataccaataagaacacagtacgaaataaaagcatatcgtttcgttgtagaccctgttaaaattctacttcgtgttgaacaagccgtgcaatggtaggtatcgacatcggcagaaaacagaaaataatgctacttatgcaaaagttgtgagcttaattttttttacctattgttttgatccaggctaattaagattctcgaaaacattaaccgttgatttctttttcaggcttagggaatttggtcctg

SEQ ID NO: 101628 - DNA, 621 bp, Mimulus guttatus
  Intron number 1 from transcript mgv1a000764m (locus mgv1a0 00764m.g) derived from phytozome v7.0 (chr-ID scaffold_117 ; pos 789317 to 789937 reverse strand)
tgggatctaatttacccagacaagtgcttgcgcaggtcaattttttttcttcctcctcctaatcccttagcataatttttggatctatttctttatgattgtaattccatgaatcaatttaaggaatccgctgaattagtgaattttgagcttttacatgtttagatatttttttttgaagtttgaaatgtgtttgcttagtattgaagaaaatgtatgagggttttagtaagactggtgtgaagttaatagaattactgatttttgaagttagagatggtgaaatgtatgataccatttgctctaatgataattgtgatcaagaaacttgtagctatcttacatagattttaccgagacatggaatgaatgccgttgattgttagaaccatgatctttacttataattaaactattcgaaatgattttcgactccttgtcacgaaacgaggcattgtgtttatttatctcttttctgctctggatggaaataacgatcgttattcttctcgatgagttcattcttctttgggcgagcttagtgtctgtgaaatgcagatattagttttgttgatgaaagtatagttcggatgtttattgaatgtttggtttgttgcagat

SEQ ID NO: 101629 - DNA, 374 bp, Mimulus guttatus
  Intron number 3 from transcript mgv1a010159m (locus mgv1a0 10159m.g) derived from phytozome v7.0 (chr-ID scaffold_18; pos 1588418 to 1588791 reverse strand)
catatcggtgttaccctgcatcttttatcgataaggtttgattcctttagcagatttaatcgacctgattattctcggttttctactgtgataatgtctgcaagatgtattttgcagcgtaaattgtaccacctgtttttattagtctatgaatgcgctttgaagaattaaagtagtcaatttattcttcttcttatttttgttacggtttattcttgcaatgctagaaataggtttctttcgtcaaaattgcacatctgatgcgtgtgttttttattgttagtctatatcgtactactcgaagttttgtcttctataatgcatggcattattctaattacttgttctctaaattttgtaggcacagatagaaa

SEQ ID NO: 101630 - DNA, 900 bp, Mimulus guttatus
  Intron number 2 from transcript mgv1a010159m (locus mgv1a0 10159m.g) derived from phytozome v7.0 (chr-ID scaffold_18; pos 1588822 to 1589721 reverse strand)
cgctttttgctgtcgtctgaattctagtaaatgtatgttctgattttttattcaatttttttttttcgacctgatcacttttttttttttttttcatgtaaactctgatgaaaagtcgcagctgtgttttctgtgaaaaattgagtcttttgttatatatgtcaagtgttgaattgcctgttccaatattcagagctgaaattaacttttcggatcgtaatcaaagtaaaaatgggtagcatcaatgtcaaaataatgtgtttattatgaactctgtatttgatgttctcgtggaggagctcttcgttttctttatgcatcactaacttggattgtgcttcaatatgtaagtggttaccggcatttgcagttggaaattcttaagcaacgtattaatagaactagacgagtttttaatgttggaaactattagactatctattaccatggtttagcaaacaggcagaagaaagaaagacggtgttttctgcaagtgttgtactgttaatcctgtaattatatgattggttgatgttgtttaagcttattgttgtatacatttttgccttagccggcaaactctgtttaatctgtgggaaccaatagagtaggttgttaagtgcataaaatttgtctcggttgaatggaaatgtcggcttggactaaattgtaatacttggggattggtgggaatctgaatttattttcctaactattttgctggatattttcaaactttctgtagcattcaggaaattgagaaaatatggagctgtcttcgtttattcttatggctttgtttcttcgcattgttacttgtcatcaattgtcttgtccttatccttacttattataaggtctgatctgatgatttctcttatgttcagtattttgacggct

SEQ ID NO: 101631 - DNA, 1004 bp, Mimulus guttatus
  Intron number 3 from transcript mgv1a017240m (locus mgv1a0 17240m.g) derived from phytozome v7.0 (chr-ID scaffold_9; pos 3214622 to 3215625 reverse strand)
caggtgattaatctctctctctctctctctctctctctctctctctctctctctctctcatgtttgtttatgtgtgtgtttgaattttattaatatctgttgttacttctgcatttctttagtaattgaacctaccctgcgattaattttgtaggtagtgacgaaaaaagagaacggcaattttatcccttaatcactacaaaattaggatatgattagtgttaaattagttatgtaattgtgaaattgcatctaataatagattttaacaattttaatagccaaccttatctaatacaattctaatagagttatcgacttctttctgcttcttgtctcgtttatagagttattgaaaatataactattttgctttgtgagctaatagcaaggtttagttttttttttttctctgacgagttgattttattttatgccttcggaaaaattgctgcacaatgattttgatgatcattgagatttgtctaattgggttaatttggacgcaggtctccatttttcgataaataatatggtcagcccataggcgcgctatataattttcttgatatattttgcagcgtttatgttagcatcaaaatatacgcaacaaagtgcattattaggtatatgcatttgataagaatttgcgttgtgtttgttaaatgtcgtatttgttttttttttttttttttttttttgaaaaatataaattcatttcaggaattcttctgtttgtcgtagtttcttgttcaataagcatgacacatcgtacgttttacatatatatcatttttccactgcaatatgtattcatcacttcctcggaaatcgctcgacactattcatcattctactaatcaagaacctattatggaactcgtattttctgtacgtgcttatgaaacccactgaaaactttgcccaacaacttttccgtcttgacgggatttttggagattttatgatctaaagaaataattacttttgtggtaatgcagaaa

SEQ ID NO: 101632 - DNA, 447 bp, Mimulus guttatus
  Intron number 1 from transcript mgv1a003488m (locus mgv1a0 03488m.g) derived from phytozome v7.0 (chr-ID scaffold_3; pos 4234367 to 4234813 reverse strand)
ctagaggtgaacaagcccttttcaccccaatccaggttactaaaaatacaatttcttgctttttgtacctatgttggtggtgtggtggggtctttgttttttttttttttttggttgcctattgatttcatagtcaactcctaatcctctattttgacttttgtattcccatttaaataatcttttctactttttaactcatcaaaatcatctgatgatcaaaattaattaaaatacagagtttgcaacaacacacaacatgcatgctatcttaatcatgaccctaacaacacttgttggattaattttaatctcattatttaaaagttaatcctgattctatttggattttcatctcactcttctacattgtatttaatttgacattttactttatatttgtgtgctgcagttgtctctatcagcttcaaagctacttgatcgtga

SEQ ID NO: 101633 - DNA, 900 bp, Mimulus guttatus
  Intron number 1 from transcript mgv1a010226m (locus mgv1a0 10226m.g) derived from phytozome v7.0 (chr-ID scaffold_90; pos 90303 to 91202)
aggaatagcagagaatatacagactgggtgattcggtaaatcattattctgggcctatctaggaaacctaattgagagtcgatctcggggacgagaggtgagttgctctctcagtagcgagagggcaaaggggagatttgcaagatatggtctaggatatctgagacaatcgtcctacatttaatgcccctctcctcaaatgtcaaaagatgtcagagaatatgcagtctagggaataagcagctcacaacactattcataaactgttcatcaaggggacaggtaagtttaatttaatagtcattagaagtgacatctaaaagaggagtggagtccgtgtttggaatccgttctcaagagctcttcctataaatagtaaggattaattcaactgaggattatcctgttttttatataattaaaaaacatataacctattcttcaaaatctcttaaaaccagaaatatactgacttgactgtcggagtgctaactccggcctcagtccggttttccttgtctgtgttcttatttgcagaatccagaagatccaccaacatattcggatccgggagatccatcagcttatttggttgaatcaataacgattctctccttttacaaccttggttatttgcggagaggggtatatcacattattgatgctcttatttccttatgtcatgttattcattgaatggatggcatccaattttcttgtttaaacatattgctcgttctacttgtcaaaaaataataaataaataaaaccaaacataatttaaataatgaatatggccttaatttacctaccgttgacataagcctcgacagttaggggccgactttatttattttgttaattctctatatattaatagagaacttacaaaatatccca

SEQ ID NO: 101634 - DNA, 618 bp, Mimulus guttatus
  Intron number 2 from transcript mgv1a016487m (locus mgv1a0 16487m.g) derived from phytozome v7.0 (chr-ID scaffold_24; pos 462710 to 463327)
gtctaaaagctatttcaagtcggaacatcctcttggtatgaaattcgtaacccgatccttcgatttaatcgtaattactttatttttatttttattttttcgagttttgatttcgttgaattgtgtttgtttgtatggtctgtatctgtatttggattttatgtctaatttatgagaaattggctcctctcttatttttttttattcgctttgtttcttgtgataatctgttgttaaaagaaataattttaatttttttttttatttttaatttcatgattaatttattgataatgcatgcattagttgttattagaaggtaatatgttggaaatcaagctgcaaaaagtttcaatgtttactcttgattatcgaagtgctcgttcctgttttcgtatggaagatatcgttttggtcgaattgttttggtcgaattgcgattattactattattacaatgcttgatttaaagtctgcaaatccgaataattattggaggagacagagcttgaacgttttcttctttcttttgtattttaagtgttaacaactacgctatttttttcattttaaattgctgcagagaggcgacaggcggaagctgctcgtattagggag

SEQ ID NO: 101635 - DNA, 895 bp, Mimulus guttatus
  Intron number 2 from transcript mgv1a008829m (locus mgv1a0 08829m.g) derived from phytozome v7.0 (chr-ID scaffold_261 ; pos 17701 to 18595 reverse strand)
tttggaggtttgttattcggttttatgtttctataaacaaattaaatgtggctggttattcatcttgtttaaaatggcaccatggtttcgtaacattagttgcgttagatgacgttggttaatgtgcatagtttatcatatcagatagaataataaatcgatatgtttggaaagaaggtggaataataatgtgatttgagttccatgaagcggtgttacgacttacgacgagtcgatttttttcataccataccaatttttgtgattcaaccagtcagtttcttcgtcattatatttgatttagacttggaatgaaataaataaataaataggagttgtttgatgaactgaaacagggaaagatgttttgttacagatcataagatccgagaaactgtgattagaatcattgtggaaaccagaaggcagttctgtaataaaatgattgatcaggataatctctcgtatctaatcgtaaaaactgcgatgcacaattgttctagtaaaaaggttgaggtggtaaggttgggcacgtgttatatgtccaccatttgacctagcgataattacataaactagtaggtgataacctctcttatgtacttacgcaaatgaagattttaggttttattcgttagcttctgataatgtatttgtgaatgggtataaaatcctggaattggctgctggttgtggttcaaactaagattttaggttttattattatttactatgaagtgagaagttatcgatttcatattccattacataacttctgcatgaaacattagcttcttaaaagatggaaagactactgcagatgcatgtgttgaaagagtcgtatgctttccctattgcagattttagagaaaggagagctacaagttgcagggaa

SEQ ID NO: 101636 - DNA, 512 bp, Mimulus guttatus
  Intron number 2 from transcript mgv1a001434m (locus mgv1a0 01434m.g) derived from phytozome v7.0 (chr-ID scaffold_60; pos 132683 to 133194)
ggatacctgctgaactcagtgctgcatctcttgaggtaatgaataatcgctagttaccaatgtttggaagcattttcatcttcttcccactcttccccaaaaataaatctgtagttgttaagcttctaaaaaacttccctcaaagcaatttcaaaacattatctcttctccaaacacgatttaactgctttttttcactaaaaaaaacaaacattactttatttttcaaattattcttctaaaatattttttcttcaacacctttagacaatgatttgactgctacatgttttgtgtctcatccctaaatataaacagatgtcactttcattctcaaaattttcccctaaaacatctctccccaaaacgaaatggaaataagccatgaaatgcttccaaaacagtatcacatacaatgatataattgaaagatgggcactcagtttacgtccttttattttgtgtgtgaatgttgcattgcaatttgcagctccgtgtacagaaaatcaagc

SEQ ID NO: 101637 - DNA, 430 bp, Mimulus guttatus
  Intron number 2 from transcript mgv1a011545m (locus mgv1a0 11545m.g) derived from phytozome v7.0 (chr-ID scaffold_11; pos 2032096 to 2032525)
caggttgaagtctggtttcagaacagaagagccaggtaattaataatttaatatcaattcttttaaatcttcatataaacgacgtcgtttgatgctcaaagtagccgttttctgtgatgaatatcgcgttttgacgccacgtcacgctatccaattttcttttctaaattattttcctccgcaatatatatatatatatatgactttattattcttttgatttttgaaaatcaaatcaaatccaatatatatttctagggcccaggtgttcgttaacctttagttactagccattattttgtggacacgtgttccgtttgtccgagtgaaaattatattatttaatttaatttaatttagaattttctgaaaataaatgattaaattttcatcaggacaaagctgaagcaaaccgaagtggactgtgaat

SEQ ID NO: 101638 - DNA, 623 bp, Mimulus guttatus
  Intron number 1 from transcript mgv1a010789m (locus mgv1a0 10789m.g) derived from phytozome v7.0 (chr-ID scaffold_104 ; pos 882608 to 883230)
gggaagaaacggccaagagaggcgtcttcgaccaggtttgaatttgttttttaatttttttaatttttcttaatggaattcaacgtcattctctatattaggctcctgagataaattaccatgttttcttctagtctataaatggcgattatgttgataaggattggtaattttgattttttctactgtggaaataatgactttgggaggcgatctaggtaggatttaggaatatgagttgactagcatttgataattttttaaccattttttttaattgtatttcatcacagttccatcagatcgttgaaagttaaaactagatccaacactccttacatatgactgtggataatttattctgtaatattttgattgacaattcatgcttgcagaactgattctgttgtttttaagggaatagtgcactgatctttgtagcttttgcttaataagtttccaagtttttccatcattagctgctgtggagattttaaagtttacttatataagtagcctttttcgaactttttgtgtattgtttcccatgtatttcctcttattttttattttatttttcgtatttagaaactaaataggaagattgtacacgttacggttgg

SEQ ID NO: 101639 - DNA, 831 bp, Mimulus guttatus
  Intron number 3 from transcript mgv1a015661m (locus mgv1a0 15661m.g) derived from phytozome v7.0 (chr-ID scaffold_17; pos 1909213 to 1910043 reverse strand)
gttcgcatcacaggtattgtttggttttttattatgcaatatttttatacttctgtttgagttactgcccattgctgcttaagttcattgcaccttattatattcaatatcacttgctaaatgttttggcgacatgatttatgaattatgtgttgtttcagataaaggtaaaaatatatgaaatttggttgggtgaaagactgggtgttatttgtgttctgccgataagaatagaaatctatattgttaacgacttggaaaaacctattcagtaaatttgtcactacccgcccgctgtttttggttttgtgattgaatgtaatgaaataggatattagattgcctcttctttcagctgcaagggatcgatttcctgatggctttgttctgggggcatatattatctcaaagcttaagataccccagtctcatttctaattgattctgggttcgctagctttgatatatctttaaccacacatcttctcaactgaaatttggtcattgaattttgtacatctcagttggttttgttaatatatgtgtaatcattaggagtttgaggcgtcttggaaagttgagttagatattttgaactcaagcttcagatgctgtgttagtaccttaatctgttctctcttatatttgaatttgtacttgaggtcatttatttgttcaggttacataatattctcaaatattactttaaaatgatcttttaatttcccttcgcgacatgtcagagaacttctttaatccctgttatttgaagtacacgtgtagtttgctgaatgattaatgagctattctgcattgggttgtttaggtggg

SEQ ID NO: 101640 - DNA, 644 bp, Mimulus guttatus
  Intron number 3 from transcript mgv1a012016m (locus mgv1a0 12016m.g) derived from phytozome v7.0 (chr-ID scaffold_54; pos 472609 to 473252 reverse strand)
ttcgaggtaccgtattttgtttcggattttttactaaaccttttaaattttattttcttgaaaatgtatttggatactagtttaaccccggtaagaaagtaaatcgtataacagcaaagaagtcggataaaattatcggtcaaaaataaggatatcggaaatggaatttttcattctcatttccgatatccgaatttctgactattaaaaatggacagagttggatcgggattatacgcaaaattacttctcgacccaatttcgattttcaaaataattccgatttgtttatgattacatttataatcataacgataatattacattatatatggaaaatatatatttctgaaaatttccaataattaaaaagagttacatgatttccaaaccttttcaactagtttccaaatccaaatgcaatttttatactttgaaaaattatatttcttttataaaaatgttaattttgatccgatccatccgatttctacacttaaagtaagaatttttatagtggtatgtacatgttaatgcatttaattgtattataatttgaaatttcacataagaggacattaattacaatttcttaatgcaatatatcaggattcctgacggacaagaaaagttaacgattatcg

SEQ ID NO: 101641 - DNA, 1044 bp, Mimulus guttatus
  Intron number 1 from transcript mgv1a010683m (locus mgv1a0 10683m.g) derived from phytozome v7.0 (chr-ID scaffold_8; pos 355499 to 356542 reverse strand)
ccgcacagaacaaaataaataaataaataaataaggtattcctctaatcttgctgcttcttacattaattcctcatttttcgcatgtgggttttcattttttgttttggtttttctaatgttggcgagtggatcttgaatcttgaattcctcaattggggatttgtttttcttggaaattaaattaattaaagggtttgtctcgtctgtctgtgtttgattttgtttgcagggtaatttcctctgtgtttcattttcttgattttttttgttttaattggatggtagtaaatggaattttctcaaaatttaatgcatctcttgtctgaagattcgccgccgatcttttttattcgctcatgaattttgcacaaacgtgatttaatctgatttgtgtttatgctagagaaagatttgtgtttggtttggttctgcatttgttttgtaaaaacaaaatcatgcatgatttgaattcattgaattacaacgattgcttgtttttgaccctcgtcgagtcgcgtatacggacaatttttcggttttaaaccctcacagcatatacggacaattttcggttttaaacgagaaaatcaagaaagtgtttgcatatccttcttctccgccaatcaggcgaagaatgcttctgtcttaatatcatatatcgttgttttatttccctttttcggttgtatattttgtcgtatgttctgtctgaaataatcatcgattcactgaaatcacgggctttagaagaatcgactttattttcactaaattcttttcacattttacttataacatcattttatttggttctaaaaccagctaaattcggctagttatttggaggggtttactctaattgtcaaaaaactccccgtgttataaatattaccaaaacgccaaacgcagcattaagggggtttttcgccaatatttataacacaaggggttttttagcaataaacacttatctggagtatatagtgccggagtatatagtgccgatacttttcttgtttcttttgtaggctttgagtaagca

SEQ ID NO: 101642 - DNA, 831 bp, Mimulus guttatus
  Intron number 1 from transcript mgv1a016777m (locus mgv1a0 16777m.g) derived from phytozome v7.0 (chr-ID scaffold_13; pos 2115565 to 2116395)
gaaacaccaccacgaagttgcgagctccattgaaggtcatatcttttcgttagtgtttttcctttttaccccttcaaatctcttttacagaagatgacagtggtttaaaattgtttgtggaatatttttttgatgctgtggaagtttacataattagttagaaataattggtttttgatagggatcttttagatcttatgttgatcttaattaaattcttaatatttatgtgctcttttgatgagtgggcaaagttgtgaaattcctagtggataagatgttttgcgttgcattagtttaccggatcgcacaatattgatattgatacgaaattatatacatcataaatcatgtgtgagaaaaaggaattgggaggtggttctgtaacaatttttttccctaatcatttgggttagcactttctgtatggaggtgctttgtttggagttattactgactaaagattagaaaaataataaactcagccgcagaaaaagatcgtctgctatctgcaatcgtgttgcttaaaacagaatgtgaagtatatcggttgttgttatataatagagtgtctaaaacttctataagcttcttgatttttgaaaatcccacccgttgtgtaatataggaatgagctttatgaaattcttaatctattgacttgttcttgaattggatatatgcgacgtacttacatcaatgtggtgtaatggagtggcatatgtgtcatggaaacagaatttgctcaaaacaaattggtaggatatcgtatatttgttagtttcgtgtgctgatagtttaaccttatcacagactataaaaggaagatta

SEQ ID NO: 101643 - DNA, 665 bp, Mimulus guttatus
  Intron number 4 from transcript mgv1a015380m (locus mgv1a0 14084m.g) derived from phytozome v7.0 (chr-ID scaffold_26; pos 1567532 to 1568196 reverse strand)
gtgctttctcaagtgtgagtaattaattgtcccctcttttgttttattacgaaaatcttgtgagtacataggactggaaaaccatacgataaagtgcataaagttcgtgactatctacgtgctattaatacatgacatgatttttctcgtcaacaaattgaattgtttctagagtttatataagtaaagaatagataacacgaggtagagtatatgataaaaggtacgtatttttagaatttcagctgtcaatgtcaataatttggtacaacactgataacaaacagaaatagtcaaaacaaaatcagaaacgattttatttttagtactatttgtatctactttacatttacggtgatatctgtgtaatatgagtaacatggcatatttccttttttgtggtcataataacattataagaacttcacagaccagaaaccatggacatgttatatgacatacatcatgcactgtataaactatgttgtgatttgccatgtacaaattattcccatggaagagtgtttattcgtaagtaagggtaaaaatgtctttgaattaaaaaaactgacctttttgttctattataatattcgagttacgtaaatatgtaactgtgctattataattatttagtatttatattaaattttgttttctacagt

SEQ ID NO: 101644 - DNA, 360 bp, Mimulus guttatus
  Intron number 1 from transcript mgv1a014304m (locus mgv1a0 14304m.g) derived from phytozome v7.0 (chr-ID scaffold_13; pos 1216230 to 1216589 reverse strand)
atcagctcggctgaattcaacaggtagatttcatgggttcttcctacttttcttttctttctgtgtttcttgtttttgcatactctgtttcttgatttacaatttactattgttcattctgcttagtgggatttctatcttctttctctttgattttaatgctgtctgaagaatcacatacagacgaacatgttgtcggaagaatcagtgcctgtatattgtaattgttgttatattagggttgttgcaagtgtgaagaatcctcccctcatctgattaatttaactaggctctgatcaataattgcaattaattagcattgcttgcttgaacaggaaaagaaaaatccaaggcgaaccg

SEQ ID NO: 101645 - DNA, 872 bp, Mimulus guttatus
  Intron number 1 from transcript mgv1a011227m (locus mgv1a0 11227m.g) derived from phytozome v7.0 (chr-ID scaffold_159 ; pos 44733 to 45604 reverse strand)
agaaaagcttgtacgaggtataaattactctttttttcagagttcaatttcacatatgcggtaggttctgagaaattgcttcgaggtttccatttttctctattttgccctaggttttgtctgtggaaatttcgatatcagaatattctactgacatatgaagatttttaggagtttgagtctcagatgattagtgaattagttgacgcggattagaacatgatgtgaactaaatatacagtggaaatcactgctagacatgaatacatgttttaatctaatgcgacttttctcgacaagtatgtaaaactttgaaccttcaaagacactgtactcacattacgaagattgatatcagtattctagctgggatttgggagaagatgttcaccataggaattagacatattgtaagtataggcaaattcggaataaaaaggtcttctaaataaccaacaataaaagtgtcaattcttttatggagtccggcattcttgatatacgcatcactgccctttgagtttgttcctgaatcagtgtcccaatggagtttgttaacaatgttcatgcagactcgtttatttgtcatacatttaaaaaatccagagaaacactaccaatgcatgattaaaaactcacaggggtagttcatgctcacattctatcattacaatgtcaacactgatcaaatctgagtgattcataactgtgtacggagtaccaaagacaatatatgtgctttctcgtgtcgaagctgaaattctcatgtgaatttgagattcattttgtatatggtacgatccgcaaatagtgacttactgtgcttgtggtttttagattcttggcgtagacaaagctgcaactcagcaaga

SEQ ID NO: 101646 - DNA, 391 bp, Mimulus guttatus
  Intron number 1 from transcript mgv1a005755m (locus mgv1a0 05755m.g) derived from phytozome v7.0 (chr-ID scaffold_124 ; pos 397823 to 398213)
acggtcaatttttagttgccttcagaaagtaagtcaacggtgacggaatattctcttttcgccgtttttttttttttttttttttttcagcttagctcaatttggattgtgaagttgtgaactgatttttttttttttttctttgcttatttagtttattatagttggtgaaagtatcttaactatggttagtaatttttctattttctgtattcagctttaattttgtgttaacagctgaaatgggttctgtctatttactccgaattatccgcttttaagttcaaactcgaatttagcttttgttgtttcttgattttagctaattatgttgtttcttgattttaacttatgttgtttcttgatttgacattgggttctaatttgaagg

SEQ ID NO: 101647 - DNA, 711 bp, Mimulus guttatus
  Intron number 1 from transcript mgv1a021385m (locus mgv1a0 21385m.g) derived from phytozome v7.0 (chr-ID scaffold_36; pos 686537 to 687247 reverse strand)
ttagttcatttcttggtaagttttttttttgtgattaattttgtttgtttttttcggtttcggtttcggtttaaggatttttttttcttcgtatgctagatgttcttgataaattacatggaactattagaacatatttgatcatcttcatattattattattatgtgaaattaaaaaaaaattaatgtcttagaaaaatatttagtattacaaattaaaccatgatatatgtaaaataattagatattgttgtctgataattgttgattaattaatctgatagctaacttgtctgcacgttgctcaaaggttttgctgtatcagctaatccacagtcaaacacttaattaaaaaaataagtacattaaatattatttctcttgtttaattatgcattttgatgttttaaattgaaggcaaattacagccacctaaagtatgtccaaattacgtaaaatcccctcatgtttgtcttatacgccttatcttacaatgtaaaatttacctaatgaaagatgagttttttcataaaacaatacgtagttgaaggatagtattgtaattatccaaacaatagagggattttttttcgtaatttgagcttatctcagggtgtgactgtaatttacccttttaattataataattacaaaaagttcttgcaaataatttcttcttttgattatcttatgatcaggaaacaagaacct

SEQ ID NO: 101648 - DNA, 631 bp, Mimulus guttatus
  Intron number 1 from transcript mgv1a016243m (locus mgv1a0 16243m.g) derived from phytozome v7.0 (chr-ID scaffold_4; pos 76840 to 77470 reverse strand)
aaggttattatttgtataattcatctctttagtatgtgtgtttttgtttacttgatgttttctttttaatcaattatggcctttgattgtggttttattatacaagggtttgattatttcgttgtaaagccacaagctttatggttattgggttaggtgatttatgcatttatgtagttttagttttagatgaacgattcatgtttaatccctttttttttgtgtgtgtgtgtgtgtgtgtgtgtgtgtgtgtgtgtgtgtgagagagagagagagagagagttgttgaaaattgctttgagaaaatccaagagaaaatactgcaattttaagctttaatagcttcttctaaaaacagcaaagaagtggataaaatcgatacataatattggatcttaatgcaaatgttaatgcgtttttcaatgcttctttcatcgataataatcgattaaacatgtagttgcatcatcgagctcatggattatatataaagtcttgttatgtatctatgcctcatggatattttggatattaatgtcactgtgtttgtggtgttgaaattctcgtgcgttttcgattataattttctttttcagcacgaagatccgatcgggagtgggctagggaaagg

SEQ ID NO: 101649 - DNA, 1030 bp, Mimulus guttatus
  Intron number 2 from transcript mgv1a012893m (locus mgv1a0 10696m.g) derived from phytozome v7.0 (chr-ID scaffold_116 ; pos 478960 to 479989 reverse strand)
tcccgagagtgttctgtgcaggtgcagatttgaaggtaagacattccttcgattattggcccatgcccttgtatcgtgggcccatgctattgtatcgtgaattttacaagatatgaatagaagaagaattgcataactattgtacccgtttaaagaatatagttaatgttacctttcgatcccggagaattaatcttagtcctgagatgtatgttaaggcctcgtttggtcggggaaattagccatgattaactaaataatgggactttgtttgatgtttgatgtttggtatccctaataacttgctgggtcgacgcgcaaataatatgttatcatgccttatcttgccttttaggcatgttttttattggatcttccaagatccaataatacaatttggtttcattagattatttaattttgtcttggttaatcttatcttggcaaccaaacgaggcctaatagttttgttgtgccaaaagtgaacattctttaagttttatagattaaaacttgtgaaaaattcaaatgcaagatctgcaattcgtgatattatttccccccctttagaaagcaatcctacgtaaaacaataatgattttccgaagatacaaggactcgagctaaatgttgaaactcacagatagatacatggatataaaaaatgcaagtgatcttttgcatatcatcctactcgaggcctcctctgtataacttttttgcctgttcggtcttatactattaagttctatctgccaatatttcgtttcttgttgtctcacgaagttcacttatgtttcatcgctggtatttttcaaaatctgaacgagctataggctacagcctacattcttattaagacgttatcagataaatgtaacttatatttatatgcagttgccgtaatgtatttttactggagctttctgcattaatttccgtaatgtatatcagatgtcaatttaagagttattataaacttgcccggtgacgcatcttttggaataatgactcgtaggaaaggataaca

SEQ ID NO: 101650 - DNA, 725 bp, Mimulus guttatus
  Intron number 1 from transcript mgv1a012893m (locus mgv1a0 10696m.g) derived from phytozome v7.0 (chr-ID scaffold_116 ; pos 480090 to 480814 reverse strand)
tgtcaaattgcaccaactcaccgattccgattctggtaattgtttacactttctgctgcactgtgatttcatcatttttatcgtttaatttattgttctagattcgtcgcctgttttgcgtttagggttttaatcttgtattgaattgagtcttcatgaaattgggaagtgaaacataaacataaatatttaatcaaatggcctacccgaaaaactttgtttgagcttacttttcgatttatcggagttgaattatttttttgcttgtaattaattagtcactggcgatcagctttctgtgcaatgagtttagctgtaattgcttcgttgcgtcgttataaattgcaatttcttagcttatcatgcggagttttaaccaatcggccatatattcgaagaaaattcttactgggacgaatttttaaattaaaatattaagcaattgatcgatagttatacttcaatgtgactaactctgttcggttggatactgaaaatttcactaacgctaactagcttaaatagaagttgcgtgaagtcaatgaagatgcagacaattgtgtgtgtgtgtgtgaaatatagctggatgagtttgaaatttaggtttttatttttattttcgggtttcttttggaatttcttgccatatgcttttgttttgctaccacttgaactatgtactacgtataggaattttggaggttactttggagcggcctgagacg

SEQ ID NO: 101651 - DNA, 900 bp, Mimulus guttatus
  Intron number 1 from transcript mgv1a019340m (locus mgv1a0 19340m.g) derived from phytozome v7.0 (chr-ID scaffold_2; pos 205429 to 206328 reverse strand)
attcaagagcgggcatctgctcatatcttcgaaaggttagtgtagctccttcgtagttgcgaagtagatattttcgtatcttcgagatttggatttgttgtacaatgtgctaatgtcgaatttcgtgcccgcatttgatgccctcttattattagtacattggttaatgtttgtgttccgaggcatcaacattacgttgttgtgctgttagggtttgatgcagctgcattttaatggatgtgtgtggtatataatattgctaatgtataagtttgtttcgataaaaaaacaaacttggatgactgtacgtagtattaggtcactgtagtatgttatgatggtcaattcagctttacatgtcgatatgaaaaccgggatctcagaatcagattcaagggaagtatgattggagtttttgttgactgttaatatccaattcactaacttctgaggctcgaagtttatgcaaatgaaggaacttggttattttatgagatcgtttttgagttcgtttttttccctcaagtaggaaattagggtaaaaacccgatctatccttcgatacacttccttgcctaaaacctttatttaaggatctcgaaccctagattagttcgtctttgcagtagctgttggattatgcagttacaatgttgcataactaaaaatgtgcctttattaatagaatacttttctattgttaagacaggtaaacgagttaatttaagtgtgcgcttatgttcgtgtgctacactagataaatgaatagtttcctcctcttcattgaaacaaatgtaaatattatgcattttttttgtggttgcttttgtcgtttgtgttatgtatcctttattatcttgaacttcttgcaggattagggtggaaatcttggaagaagcg

SEQ ID NO: 101652 - DNA, 1052 bp, Mimulus guttatus
  Intron number 1 from transcript mgv1a006664m (locus mgv1a0 06664m.g) derived from phytozome v7.0 (chr-ID scaffold_561 ; pos 9515 to 10566 reverse strand)
tcaatcacgaacacatcaagggcgttctcctcgttgtaagtatactagctgatttcgattaacttttcgaaaacatcaaggtaacttttataatatgtgataaagggcaaatagcacttatccccctatggctacaagcttttgcagatgaccctcttatgcttttaatatcagcatataaccccctcgtggttgataggggtaacttccatcggtttgtttgtcaaaattaaccgctagtgtcaaacgtcaaagcaattttttttttggtagatggcctccttgtgctttcattttccctttcatttttgcaaatgaaccccttgaagtttgacagacgtagttaagtttgacggaaaaattaacgaaagctaccattataaaccacaagggggttatatgctgatattacgagcacaggggtctcatctggaaaagtttgtaaccaatgggggttaagtgctatttatcctataataaactcacaattaatcacaagcgtatatatgtggatgtgtgcagggtgtatagaagatatacatgtgtatgatgatgaacttcaccagctgtacgcttgaattgaattatcttaagagcgtaaatcggaatggaatttttgaattccaccgattctgattcgaatattattttcgatgctggaacaacatgcttcatttctgattttcgatttttcatattagattcttattttaaattccaaaagcaattatgaagattccgattttttgttttattattttaaatgtatgttataatatcattgctattatgtattctatatatagtgaccgaaaaaatgagaattctcaattccaccgattccagtccgaaaaattgcggattttttcctcgaacgtaactgaaatttgtccgaaagtgatagttctaatatgattcgtccgatttttgccccttgtaatcaaacctttcaaatgtatatatcttcttagcctcagtatatcgttctaattgaaaaaaaacattgtatatttccaggatatattttctgccggaacggatacttccgccac

SEQ ID NO: 101653 - DNA, 945 bp, Mimulus guttatus
  Intron number 1 from transcript mgv1a002526m (locus mgv1a0 02526m.g) derived from phytozome v7.0 (chr-ID scaffold_228 ; pos 261129 to 262073)
gcgattccgctgtttcttccctaccttccttcaaggttgcttcttctctcaattctgtttcagatctaggttttcatgatttcttgtgattttttaggaattaattttttttccccgattggatgagtctgaatcagaaagttacttacttttgtatgcgtttatgtatatactaaatttgtttgactagttgtatctaaatccatcagattgtctgttagtctagttataataagcaccaatcactgttttttttttaaatttaaaaagttcagatatggcttatagagtcgtggcaagaagtttactatgttttgggaattttccctttttgtcaactaaagatagctaattgatgcttgtatatatatgttcatatgtctagaattgagcttctggtagatatagtatactgtattttcttcctttttatgcctttgagtcgcctactggaacggcggattatgtttcatgcttttaatttgtacaactgtggattatctaaaagacggtatttcatggaatagttgatgtgatttttccgttagataacgaggtttatgcttgcagcatttgaatgtggtactttaggtttcatctataataattattagtttggacctcgttctaccttgctctgtttcttgtgtctaaatatgtgatgattgaataagaatgcaatcacctcttattttttgtcattttgccggtacttgtagccatcttaggtagtgtaggaattaatatcatatatatggtagttcattcttgtagtgaccgatttcgattacttgtcattcagggaaaccttacgatatgatgttatatatcttgcattttgtgattattggtctgctggaaacctgatttttgctttcttaagacaagtgttcactctatttttttttaatttgtaatagaccggagagtctcgatttgagggcc

SEQ ID NO: 101654 - DNA, 879 bp, Mimulus guttatus
  Intron number 3 from transcript mgv1a014330m (locus mgv1a0 14330m.g) derived from phytozome v7.0 (chr-ID scaffold_868 ; pos 6259 to 7137)
cgtaaagctcctctcgcctcaaccaacatttctaggtactttttctatacatacatttgttccttttttttcgctatctcttcctcgcagtatcacatttgtttttggtaatgcactcaacaatttaagtgattaatgtcggatattgatctattttgatgtattagcactagactgcattttgcttcctataatatctttgtttcccagagttgctgcagagcttttgtcgagtcggctcgtcgagttcaagagccggctcagctcgtttaccacccctacctaaaactgtacatttacattttatgttttggtaaatctcacataaaaacaaatttagtgtttaagattcctgtattagtctttctactcgtccaaatagccgtgatagtaaatgaaactatagttaggaagtattcttcttaatctagtaactgtcgaaaagtaatctacagaagtcactcttctcctaaaatcaaaatttcttttaaagcttctctatttgaagctcaaaatcttctaggaaaaaaacaaaagctttttgacactatttgattgctcgaatataaatcaattcaacatacaaacaaacatgaatatactctttgagtaatttatagctaaaacagctgtgtaaggtatgtgaatataagttgcagaatttgtctcagggagagcagagagggaaaaaacacgagggtttcaagacttttcaatacgattactgacacttggcacttgcattaaataactgagatgaataaaaaagcttaacatgattacgctggcacttgattacttagttgcaagctgctctgctaatcctaagtttttttgtttcattactttttttttttatggcagctgggaatcgcaaag

SEQ ID NO: 101655 - DNA, 544 bp, Mimulus guttatus
  Intron number 2 from transcript mgv1a012996m (locus mgv1a0 12996m.g) derived from phytozome v7.0 (chr-ID scaffold_21; pos 526639 to 527182 reverse strand)
gtgggtggtggaaaaggtatatatatatttatacttgatcgatgaaattattttccgaaatttgatttagttttgaagtgcagttattagaatagtctcccacgccccaactcctcgtttatgattttttttttttgcagtcacgctgctaagatatttgtactgaatatgtatcatgatataaatttttttgatggggtacaaatggtttcagaatactcttactttatatttgtagtgaagtgtgtacgtatttcactgcattgttatgtataatataacctattatactgtcaactttgatgcggctgcgtctttttaaaaaaatgcaatatggcataagaaaattatgttctgaagaagaaaccgcctgtaatctgacacatactgcatattctattgaattgctgacattttcttaatgaatttttctgtttcttttgtaaccgtagcagcactcgaagatttatagaatgtaaaggaatattttttttcttcttaaaataccccgttcactgatcttatgactgtttttaagctgctg

SEQ ID NO: 101656 - DNA, 1007 bp, Mimulus guttatus
  Intron number 1 from transcript mgv1a012996m (locus mgv1a0 12996m.g) derived from phytozome v7.0 (chr-ID scaffold_21; pos 527309 to 528315 reverse strand)
aatcatttaatcgatcaatcgacgaggaaaaggtagggtttcttcgtttatttctgaaaagggggatcttgcacatacccttctgctttcaatcatttatatatgatcaagtgaagaaatattgccagtatagtgagtcgattgtgattagggtttctgaattgattagggatttcaaattcagtagtgcaatttggttgttcgtataaaataattgctagttatcaactattttgtgttttttttttcctttttcttttttacccccctctatttaatgttgctgcttttgtcacacatgaaatttgtgaaagttgattagattaacttttaatagtaaaaaaatattaatattaacacaactctaaattttatctagaagctttgttactttgattgtataaagattatagttttttttttcttttgcaattatgtacataaatgtgtaatgcgagactaaaacaaggtgttaaagatatgttttctgatcatagcgtaaagtgatttattttaattttaagaaaactaaaaacaataattgcatttaaaaacaatgaaaaagtgaattgtgagggggaaagaggaaaacacataattaatttttttcgaaaacgacacctaagttataaaacaataacttttggaggttttcaattggtctaataattaattgtttttgcttttgacaaagaatagaagagacaaatcgttaggaatgaagctttgtgcgacgccgtaactttcctcgaggatgattggttggttgtcgtagcagacatacttttcaatttcaactgttgaaattaataatttaacaatagtaaaaaagagaaacaatcaattattctttggcaattcaatcctttgtattgtcgtgcagttaattgtgctatgatttagattaggattgcggtttctcgtcgtggtattcttttttataaattttagggctgatcttttttcttttcttttttggctcttaatggtttgtgggaaatgcagaa

SEQ ID NO: 101657 - DNA, 492 bp, Mimulus guttatus
  Intron number 1 from transcript mgv1a010895m (locus mgv1a0 10895m.g) derived from phytozome v7.0 (chr-ID scaffold_75; pos 1109506 to 1109997 reverse strand)
cccgctgccgaggaggttcagcaatccgccgatatgtgagttttttcctgtgtaaacccccaaattaccttctctctctctacaattttgttcatttgattttatttcaattttcttctgtttcgtgtagattcatatgggtcctctctgtttaattcatatgccgttaatctgcttgtccaattttttgataaattaggtcttgaggggttttaagatggttttgaggaggttctgaaaaattggtgtttctttgcttcaattgctctttaacctaattatcccccttttgacatttatggctttttttcattacttgcttctttttgggagattattgttgattagttggggggagttgtgtatctcgtttatgtatgtatttggtaatcaagaagaaacgaaacgattattgggacatagaatgctgatatttttgctgaaataggatttaatttcctgatattgtgtatatgctatgctttcggcaga

SEQ ID NO: 101658 - DNA, 157 bp, Mimulus guttatus
  Intron number 2 from transcript mgv1a016300m (locus mgv1a0 16300m.g) derived from phytozome v7.0 (chr-ID scaffold_245 ; pos 59940 to 60096)
ctattcagcttggcgaaaacgagcttgtcctcaaggtaggttttcgttaatcttctctttttgtaagtttgattccgtcggctttatgttttttcaatgagttttattctggatgatttttttttttttttttatttgaaggaacttgatttgttga

SEQ ID NO: 101659 - DNA, 567 bp, Mimulus guttatus
  Intron number 3 from transcript mgv1a016300m (locus mgv1a0 16300m.g) derived from phytozome v7.0 (chr-ID scaffold_245 ; pos 60171 to 60737)
gttcgcaagcggattgattacatctctgccgaattgtatgctctctttaatttattgatgtttgtcagtcgtaagaattttgtgtgcttgatgattgaactaggaattatgattagttgttgagtaaatgctacttactttacttatttaaatttagacaaaatcgactgttgatttcggttcttatcgtcgagtttgggatgtcgagcaaatcaaggtggtagaaagaaattggcgacagaaaaaaaactattgactgatgaaaggaagttgtacagataatatgaacatgggagaacaagagttgacgtattttaatggcaattctttttttgaagtattagacatcataataatcgataagaaaaacgacaaaaaaaaaaagacaggatcttttctgtgtggcaagaaagtgagtttgtctctgtttttacaagttaatattgaccgattgttttgcaggatctcctattctcccggttcttagttggtttttgctttacgcttgcttttttgtttttccttctttgagcttattgttttttttccccaccaggaagcgtttag

SEQ ID NO: 101660 - DNA, 768 bp, Mimulus guttatus
  Intron number 1 from transcript mgv1a013119m (locus mgv1a0 13119m.g) derived from phytozome v7.0 (chr-ID scaffold_2; pos 4436872 to 4437639 reverse strand)
gaatgtatttccatgattctttgttagaagagggcaaaaatatatgtctactattattcgaataagcaatgcttctggatttgatttttaagtgacaaattgtttttgttttttcttttttttaaaatgcctattagctaaatctggtcgattgaacttctaattaattaataacacaaaactggcatctaaacaaaataactaataatccgagccaactgctggtggccgtgggtgaatttgttatattgtattattgtgatatcgcgaccataatcatttgtaccgggtgccagattctcttcaccaaacataaaattatctcgaggggggacaattaaatagaagaacttaagcatggaaatatggttctagggagggtagaaggatcaaaggaatgataattaaattcaaaaccattttaaatttagctcaaaaactgaaattaagatcaaaatccctccatgtaggattccacatcaaatttttattaggataaattacaaccacctccccaagataacatgcaattacataaaaatctcttatttttgagaatttacatccagccccatgcagttctacatttcttacatacaccccctacgaaaggatattaatgtaagaaatttacaaattgcagtaggtgaatgtaattatgaaaaaatgatcggttttttcagtaataaaccttagtcagggggcgtttgtaatttacccttgttattaatcatgatagcatagacaccccaataagcaataaccaat

SEQ ID NO: 101661 - DNA, 809 bp, Mimulus guttatus
  Intron number 1 from transcript mgv1a007049m (locus mgv1a0 07049m.g) derived from phytozome v7.0 (chr-ID scaffold_335 ; pos 69517 to 70325 reverse strand)
aggtaacccgacccgcgcttcagtatttgtttctgtttctatttttttttttttttggagtaggattgatttataacttgttgaagtgggtttcaccttgatctgtttatcatggctgtaactaatttaatttgaagtggataacactcacactgaactaatttccattttgttttaatttatttgtttagagttgttttcttgatttggtagctaaaatatgtcaagggcataacatttgagcttgacgaaccgtgtactcaaaattaaccattatcgattggagaaacatgggaagtaaccgatgaaatcttcacgcgaaaaatctaggctattagacacaaacacacacacacacacacacacacacacgatgtaatgattaatcaacgatgaagtggtgcttgctttgaagaatgagattgttcgatttctgcatctagttgcgtataatgggtctactatagacaagtttcggaaactggacttcgttatgtgatgtgtgacgagatgctctggtgttagacggaggtacatgttcaaattttcgtctccttaaaaataggattaacataggttttagtgtctgtctttttttaactgttatgatgtcatgcatgtacacatataatgtatgttgttgtatcttttatgtaataatgttgtgatgatcttctcaatgtgtgtgagttggtgaaatggtggtttttgtcggcaatttttttaaaattcattctactgtaatatatttgctttgtttacggtgattagtaggttttgggttgcagagttatttattcttgggtttc

SEQ ID NO: 101662 - DNA, 884 bp, Mimulus guttatus
  Intron number 1 from transcript mgv1a011393m (locus mgv1a0 11393m.g) derived from phytozome v7.0 (chr-ID scaffold_2; pos 4509884 to 4510767 reverse strand)
gagctagccttgattgaccctaaaagagcaaaaaggtttgacctttatatatctactcttcttcttgcgttgacttttttaaatgaacttaattacattaaccaagattacttattcgtgcttgaattatatatatgaatttgtgcacaagagacttcttcttatatgtcacgtgttgaagcattaaccgataatcgagtcgaatatttcgatttcaaggaacattgatcactagattatatgtattttgatgagtaaactgcaaaaactacccctgtataatctcaaaatagcaaaaacccccctgtgataaataaactagcaaaaacctcccctgtgaaattatttaaatagcaaaaacccccctatggaactatttgagggttgacttgatataaaaagacacaaatacccctggagtcttgcaatgagtaaattcttatattttataaatattttaattattttatttaaaaaataatcaatttagttgtttactatttttttttaatttctaaacaaataaattaaaaagaataaatatacatataatatgtatatatataaatacattttgagggacaattttgtcatttcaagtctaaaaaatcagctaggggggattctgcctttgactaaatttcacaggggggtttttgctagtttatttatcacatgggggtttttgctatttcaagataacacaggggtagtatttgcagtttactcgtattttgattattgttcgaagcgcttgttattagaagttttagtgttcacatttgattgtcgcgtgcataaacgtaaatttttgaagtgggataaaggaaatggttgatttctttgtaggattcttgcaaatagacaatctgcggcacgatcaa

SEQ ID NO: 101663 - DNA, 936 bp, Mimulus guttatus
  Intron number 1 from transcript mgv1a024724m (locus mgv1a0 24724m.g) derived from phytozome v7.0 (chr-ID scaffold_26; pos 1004124 to 1005059)
ctctggcaattgctacagttctttccagtggtcgagtaagccctcttttctcttccacttttttttttttttttttttttttttaattcatggcatttcgtttgatcccccactgcttaactttttaaattgactgaatagatatcaattaggttttattttttttgttgcatttgctgttttcctgtaatggattgaatgtattttttcagcatgccagcagttttcctgtacctgctacgtttttttggatttagaagtatagtttcacgaacattcggggagttctacgcaaatccctttcgattttgaacgagttatagtttcgattttgttgcttcgcttcctttttaataaataattgctgcaacaagaagactttcgaaatgaagtgactccttgatttagaaagctggaaaagaacttttgtttatgtgaacactgtaaaaagtaggttattttgatagaatacatttgcaaggctttatcgttttcgtctcagcggataattccatctcattgagattaatttccaactttttattggaatttgtatggaaatgaaaatgtatttgcctataggaatttcggtgagaaacttagttatagggtatagaatgaatatgtatttgatttagtatgcttttgtttcagttttcatttgcatgatagatataccaatatttttgttttaattttggaatttgcagaatcaattattgtttcgctggactttatcacataattattgcagtttttgaatttaacgtcaactggattatgcagagtctgtttttcttttccaatcgagaaaatcaaatcattggttattatttggtcggtggtgtctttatagtggacctgaagtcaaattacatctgtttcttctttttttgtggatatgcattcaacttatgtatacatattttcttatag

SEQ ID NO: 101664 - DNA, 552 bp, Mimulus guttatus
  Intron number 2 from transcript mgv1a018418m (locus mgv1a0 18418m.g) derived from phytozome v7.0 (chr-ID scaffold_98; pos 140553 to 141104 reverse strand)
ctgtactgagacaagacattcatcaaaacatacaggtaataaaaaacaaatttaaattataaaaaaaaaaaaaaaaaaggaaaaacccttgtctgaaaaaacgaagactaaaagttaaaaatcaaatttgtcatttttacacagtgcgtgcaaaccacacgcattgcttcattcatccctaccaaaaaagtctgcatctatcttcactacggccagaaatttgccaccccttcattttgactttctttctttttttctttttggataatgtgtatttactattttacccttcctataggtgcattttcgtcaacgactgactttactaagcattatccaataatgccgttttttaattggctaatgcaagagggttatttctgccagttcatattgcacaattagggtttttatcttatttatttttaataattattatctttctaaaacagagattaattaaactagtttatccttaatttattcttcttttgttgctagtgtaattaattaatgttatcttgtttaatatctagagattagagaagttcc

SEQ ID NO: 101665 - DNA, 983 bp, Mimulus guttatus
  Intron number 1 from transcript mgv1a006956m (locus mgv1a0 06956m.g) derived from phytozome v7.0 (chr-ID scaffold_11; pos 670752 to 671734)
atttgccttttatcccgggttagtatggtcatttgccaatttatattttaccaatttcacacacacacacacacacacacacacacacacacacacacacacattaattcattctgcttgcttatatatcatttaaagctgtatctatcgtgacatctgtttttggcgtgagaattttcatgtggtttaatttgcatgcaagtggataagctagcattaacacacacacacacacacacacacatatatgtgtgtgcatataattaatatgaattttttttgattttggtttaattgattaattagtgtgtttagtgtttacgttcacattagttgatataattaaggagggaattatcgaagtgtgggaaagggttagtgttacttatttttcaaaaaatcccatcaagaactcaattatttcaaggtttaatttagtttaaggtagattatgacaaaattaaaggattgcatcactaattaataacgactgctttgctagttgctgcgattcaagaaaatagtaaggcactgcaataattgttattatatttattatattgaatttttgttaaaagaaatgaaattattggtgagtgtatatatatggataagatgataaaaggcatgtggggctttagatctcaaccagaaactgtaggtcagtaggacataaatacatatatttttttatatatatgtatatattatagatctatgattatttatactttattgaattattgattaatgaaagctaaaaggaacacagcttggattagttggattaatcttggacacttgtgtgtttattattctcaaaaaccttatttctcaaaattattagtattaatattttttcaataaaaccaattatggatgataagaaaatatatttataataattaaaaaaaagtattttacttgtgtttatatcaatttttacgaatatgtgttgcaatttcaggtagaatacccgatag

SEQ ID NO: 101666 - DNA, 271 bp, Mimulus guttatus
  Intron number 1 from transcript mgv1a019367m (locus mgv1a0 19367m.g) derived from phytozome v7.0 (chr-ID scaffold_12; pos 2535961 to 2536231 reverse strand)
tacaacaatttatacaagtatgacaaatgcactatatttctagtaaaattcttctatttttttcgatttatatgatataattatttttttcgatttttcgcccccccaaacttttcattttgtacactttagtcctaaaaacaaaaaaataaattatttctcaacttacccctatatttcagccccccaaaaaaacccccctgggtccgcccctggctgccgccaattggctgcatgccgattgtcatcactgttacctccggcgaggcaa

SEQ ID NO: 101667 - DNA, 762 bp, Mimulus guttatus
  Intron number 2 from transcript mgv1a013499m (locus mgv1a0 13468m.g) derived from phytozome v7.0 (chr-ID scaffold_51; pos 416459 to 417220 reverse strand)
gacattcctgggtatgtatcctttcgttttttctccaaactatgtattttccttttgttagagttaacttcgtcatcgttctagcattctactgatatcaagctgtaattagtagcacatgaatacatgatacctctttatctaggtgccattagatactgatgcacacttgatctttgaacatgttgcttcttagctggaccactgggcttttagcaattgatatgtttgtggtagttcaaagtgattttgtgtggacattcgttcttgatcttatccgtacaaatttagagtctgatactacctaacactatattacacatttgtttctgcaaattaccatcacttatcttccgattgggcttttcttgcattccgaaagatgtttaattcccttgtggcatggaatgttaactcaccgtgcgcttgcactcataataaaggtgtttaccatatagaagatgaaccattcatgtgtaattaatcgttgagttccatgtccttttgatgaatagtatttgctattgccttataactatctattatttgtgagtgaaatctgataccactgatttctgaatttgcataacatatcaaagatggcagttgttagagttcctatgtggtttattgctaatgtttcactgttattcacatgaatctttaacattcttcgatttgtgattagaatatgtcaatgtaatctgattgctattgatatatgaagttgcaagacaggaaaacacacatctgaaaaaccgg

SEQ ID NO: 101668 - DNA, 660 bp, Mimulus guttatus
  Intron number 1 from transcript mgv1a013499m (locus mgv1a0 13468m.g) derived from phytozome v7.0 (chr-ID scaffold_51; pos 417280 to 417939 reverse strand)
ataatccagacggttcctgtacttatcacgaggccgtatgtattctatagccttctcattctcttttatcctattaatgtatttaccacgatcgcttatgctgtgtgttccgttccatctgcgtagtttaattcatggttgaaaaaagttcaatttgcttttgtattttattttttaccgaagtgagcttagttgttagttttgaaagtattgctgttctatagtgcaatttttttttttttaatcatgggctcaatcgattttttcggttagttgtttcttaagcatcttgggagatgaaaccaaaattggatttgacctggtgttggccaataatttaagttggcaacgtttgtgaaatcgaattaagttgattgaatgtaatccgagatgcagatggatgagtttaacatagttgataaatcaaaatcaatcaggaggtaaagttagacgtatttcatatacgtagggttgtactttattaactggattacattccgttcgtttatcacatgttatgtgtttgccacatgccgttcatcagggtgtaggttgaatgttcttctgttttttgtccagctgatgatgtgtctgttatgataatggatttatatatatctctgatactaatttgctcgtctttccagccaagatttcacg

SEQ ID NO: 101669 - DNA, 833 bp, Mimulus guttatus
  Intron number 2 from transcript mgv1a003556m (locus mgv1a0 03556m.g) derived from phytozome v7.0 (chr-ID scaffold_120 ; pos 30062 to 30894)
ccgctgtccaacctgccaaattcaccgaacctcaggtaagtaaatgggctgtattcagattatttgttttactattttacatcgatatgcatcttttttcggataaaaatacggaaaaagtttcattttttttaaaatttttcagtgacaagtgggctttattgtaatctcacatgtattttttttggacccttttgactcttgtatgagaggcattgttctagttacgaaatcgaggatcttttacgtttttttggtttgtgatgtaatgaggtaatttggattatatggttatatatataaatattttttttgtctctagttttgcatcatgtgctttttggatgctagtgattgagctttcttcgtctgttacggtccccacggttatgtttttcctagtggttattatagtgtccaaaggaggatgtgacattgatcgtaaaatatgatcgaaccatctcatttctctctttttctctgaaagtgaaatgctactattttttcgtggttactgcgattgaaagagatcttattcgtttgaaagcatgctagtttttcaatccaatggaaggaaaaaccagaaacgtcacaatcgaaatcaattgtgctttgttttgttttcattaatctccccttttcgataattttaatttcgtttatttgagctaagcattgacgtgtgtattattacagcaagaatcttttgatagagaaaataaatgaacggcaccatatcaaatactagttctctgttcacatactacttgcacgaacgcaaagtacgaattgctgaaaaatcattttcttttttttttgtcggtgcaggtgaa

SEQ ID NO: 101670 - DNA, 799 bp, Mimulus guttatus
  Intron number 2 from transcript mgv1a000520m (locus mgv1a0 00520m.g) derived from phytozome v7.0 (chr-ID scaffold_27; pos 1336134 to 1336932)
tttggagcccggacacgaagcttattgctatccttgtaagtattttgaattagttggatataatgtaggcatctcaataggaggtgctgatcccgaagtaaaatgtgtgatttgtgctgtgcttctgttgcataaataaattagagcagcacattgttaaggttttgtaattttttaagatcatctgtaagctagcaccccatgatttaatacgcaccgtgtactgtcacttgttagaaataattgaactgtattaaatgcattcgtgttagtgcttagcagacttatgttgtttggagacaatgcgagaaaatgaattatatagacggccagttaacacatatgttttatacgagggatcgctatttctttgtatagtgttttttatatttgctgttttgtagtgtgacactgtagttggtaatatcttgtcagataactgacaatgatgtcgtggtgtgattattttggctacattagttactactctcatttggtgatagtccttctccaaaaatggtggtttataaatgatttcttctttatatcatttgataatgcttttcttggatagtcaaactgtgaatgaggtggcaccaattttttttggattgcatactcatctaggagcatatatttaactgacatctccatttttttatcaataagttcacaacttgtacgtataggatgaatgtaatttaactagcgactcaatcttgttttctgaattttggttatttaatattgctccctttttgcagacatcgtccttttatctgcatatttataaggttca

SEQ ID NO: 101671 - DNA, 747 bp, Mimulus guttatus
  Intron number 1 from transcript mgv1a005925m (locus mgv1a0 05925m.g) derived from phytozome v7.0 (chr-ID scaffold_19; pos 807280 to 808026)
tgatattccggcgaagaagaagttcttatttatcggtgggcaatgcgatttattttgatccgaaatatatttctagataattaaatctaattgagtatgcgattttgaacgtttagggcttttaaacacacatagatggtgattttcgtttgtataaattaatgcttttattttgatccgaaatatatttctagataattaggtttatctcgttcgaaggaaacacaatttgaaggagtatgggatatgatttgttaattaacagcaagttattatgattaatgtatttgtttggtgtaacaaataaaaaatttcttaatttgattataccatcgataggcgttcatgctgttctacttatgcatgtgccgatattaaaatttaaattaattaactactgcttccaaaacttatcatcaggttatttaagtatatggattttcaattagttttaaggagatcgtaaatgaaagttatcacaagagttgctatgtatttcgagtaattttagagaggtagagtttgtttggataaactgttataaattttgaggttaagatgtaaattgtctacttttcatttgctgcaccgatttatataattttcttcttttatattttaagcatttaagcatatctcatagtttctcgtgtttgtgtcctctaattttaaattattttcacctttcgattgcaatcaacactgttttcaggtagaaacaagtttttgttccgttatccaaacaag

SEQ ID NO: 101672 - DNA, 991 bp, Mimulus guttatus
  Intron number 2 from transcript mgv1a003210m (locus mgv1a0 03210m.g) derived from phytozome v7.0 (chr-ID scaffold_1; pos 715487 to 716477 reverse strand)
atttttcctcataacattggccttggtgccactaggtgagcagccccttttaattgtagctcttgctgtttcattttctgttacaagatgtgttaaatacttccaaggatctccgttttgtgtccttatctttgttactatacttggagattattatgttagtgattgttcattttcatgtatgcattaaatacgatcgggttactcttgttatagagtcttaatacgaacaacttataaagatgggggcaagctaagtgtgaggggataaccataaataggaatacataaaagtcgcgaatcatgcatcaagctattttgaattataaatgctgtctatttagatcaagttcctaggagaagttatcagatcaatccacttccgattgaagaaagtgaagcctacatagtttgaagttcctcaatgaaagtaaaattatcaggagcacttattttcggaataaggcattttgtttgagatggaaatcttccaacttagtcgcgaaagtgagattttgtgttttgttggaaaatataagcataatttcttgagaagatttaggaatctctggaataaggataaggagatagtgtttgcaatgcaggaaagaaatgtcaaataggaaaagtttcggtacttatggactgagtatgcatacgtattggtcaacggaaatttaatctgacaattcaggtaatttatgtgtccaaaaagtaaatgcatccctttgattctttcaccttgtaactcatttaaaacgacagtatatcaaaaaagtttgttggatttatttgtcgattcccatgtgcatgtggacacgtcgatgaaatttttgtctcgattcaaattctttaatgctttgattacgtgatatttgtagatgtctatgcccttcagcatgtaatacgatttttttgtttgatttggaacttttttattctttggttacatgattacactaatgacacataattcctatgcaatttagag

SEQ ID NO: 101673 - DNA, 1066 bp, Mimulus guttatus
  Intron number 1 from transcript mgv1a014748m (locus mgv1a0 14748m.g) derived from phytozome v7.0 (chr-ID scaffold_36; pos 42835 to 43900 reverse strand)
ctgcccaatttctttaattaccctccgtatttcacgtaattattcttctcaactctttcaccgtttttttttttttttaattttttttttgcgtatgtgggttgcggaatgtgatgaacagatttctaggttttgttgttttcagtatttttatttatttaatcatcatgttatgtatgattcaccgcatggttcaggttcaagagtttgatcaagtaatgcaatcaattattatcccatatgcaaaaaagggaaaattgtttacttgattgaatttttgtataaaaaatgtttttttttttgcttaaataagttttgttataccaacctcacatcaattttcttgagatctattaccatgaaatgcaaaggtttccgtgattttagttgcgttttcgtgttttttctctagcaactgtattgtccttcttagtatttgtttgctgaatcaaatgcagttatgtcattttctttgacttgtatatgacggtatttaatcgtttctttaagtgatacatgtcctcgtttcctgcagacttaatagttaagtatacatggtgaaattttattgttggtgttttcattttatggtaaagaagtgttgtacaattacaagtttccataaggagaacatctgcaaatgctagattattttttgcatcatgaccacgagaaatcatttttttccatctattggctcctaattctggagatatatatcatcatgcccactaaagaaaatgtatgaattatttaggaagttgcggaaatttcttttaatctcgagtagaaaacatcgtaagaatctacaagtgctttttaggacccaaaattgttgtcgatgcctctcgaacaaatagatttctaatgcgagagcctccagccaaaatcttatccttttggcgccgagcatgaatacttgtttcgaaaaatacttgagcatgtctaatttcctattttagattttcgtatgaaataattcatcgaggaactttagtcattttgaatgtaaatttttttcattcccatagtttgcagccagtaagagacactcgagataagcaga

SEQ ID NO: 101674 - DNA, 634 bp, Mimulus guttatus
  Intron number 2 from transcript mgv1a006017m (locus mgv1a0 06017m.g) derived from phytozome v7.0 (chr-ID scaffold_8; pos 1002153 to 1002786 reverse strand)
ggtatgtcaattaaattgcgtcacgattccagatctggctgttaattgatttcacaatggtgtataatttataatttgaatttggttatttagtcgaatttcagtacggagaaaaattcgtactgaaatatgagtgcaagtattgtaccgttataactatgcaaataattcgttagatcgtagatctaaagtagtgggattaaagttagctggtttggatccgatgattgtgagtttgactttgataatgattagggataatgtttttggtgggtggatctaagatcttagttgggcttgttgtttatttgttgaggtaattgcattgctactaagagtgggtgatttttcgtgatggtctaatggagtcgaaagtgaagtagattttcgttttctttttccgtacataaaatgcattatgctgtctgaaactaggttaattagaaactgtttggataggaatttataatcttcagatacatttataaattattctggggtggagcgtaaatcgtttcacatagcttttgcattttctttatttccgagaaacattttcaatcgcagtagtcttgcttttgctgatggttgctttctatgtggcaaacagctggtgactggttgcaaggtccct

SEQ ID NO: 101675 - DNA, 991 bp, Mimulus guttatus
  Intron number 1 from transcript mgv1a012486m (locus mgv1a0 12486m.g) derived from phytozome v7.0 (chr-ID scaffold_4; pos 2049255 to 2050245)
cccttccgccccttctaatcctgtcacctgcaattgtaagtcactaatttcaaaacttcgattgaattatctcgatctcgaatctgaaacgacgtcgttttagctgtttgttgtttttttacgggatatcatattcatcgcgaccgattttgatttggtaatgtaggttgttctgcatctttgtagtcgtatttgtgtttggcaaatccaggaagaaggaattgataaatgtagaaaacaaaaaagttaattgcacaggaacgaaaactaatgctgtcttcgattgttgcattttgactgaatttgggagctatcttttttcccgattgagtttcaaatgttttagcatcaagtttgagtttctcgtatagtcattatggtggaattttaaagtggcctagtagtactagtttgagacgtttaaactctgaatcggttgtttcccaaatcgtactaaccaaaaaagactagcattatctggaatatctaatttgagaagtcttggtacagtaaaatcattggtgttcgttcaaataagtcgtgagagagcttattatattttggtgtacttcttaatatgaataaaattacccatcttagatgcggtgctctagatctttcacacttttatgttcctgtactaattattgatcctagttccaatggggctttattcttagcttgcctttcttctcttctgaataatgttcgacttcacttatgaaaaaagatttaaatctcttcatgcttaactaacatggctatgacctttgttttttggtttcaccccaatagtaaatgatttaagttttgaactcttgctatactaacattgagtgttcaagtgatccgtgatgcaacttagggaaatgaatgtattgacggtataaatgggctgattgtgtcattttctttcgtgttgccgcttttcaaataaaatctgcctgttctgtgcatcacgttgctgtttgttaatttgaatatattgtag

SEQ ID NO: 101676 - DNA, 259 bp, Mimulus guttatus
  Intron number 1 from transcript mgv1a010662m (locus mgv1a0 10662m.g) derived from phytozome v7.0 (chr-ID scaffold_22; pos 1040960 to 1041218)
gataattttaatttcaatcattttgatcgccgaatgtacgattgattttttcttcccctaattttttattgtttgtgttttaatcattcagttgttttttttctaatttttttaaatattattatttaattttatgtaattatatgggacgttgcatgcctgaatggtgaaacccccaatttctttgatctataattttttttttcattttttttaaattgcagataattgcgaatcgaggcagaaattgtggagaaaa

SEQ ID NO: 101677 - DNA, 709 bp, Mimulus guttatus
  Intron number 3 from transcript mgv1a010662m (locus mgv1a0 10662m.g) derived from phytozome v7.0 (chr-ID scaffold_22; pos 1041568 to 1042276)
agcaccaaggtgaacacattaattctctgattttcgaaaattgttcggcgtacttatttaatgcttaggcctcgtttggttggggagattagctatattattaactaaataattggactttgtttggtgtttggtatccctaataatttgccgggtcgatccgccaacattatgttatcatggtttattgtcgcctcttagggttttttttgttagacattccggggttcgataaattaattgtgttttcattagattatttaatcttatcttatcttggcaaccaaacgaggccttagagtttcgattatttgttctacggtatgaatatgattgatatcatggtggtgtttatgagtgctttcgttatagtcagttctcttaaaaaactctggatgcttcccacacaaaattaagcctacgtttatcaacttaattcgattgttcttgactaaggaattagtgtatgtggtctttaaggcaataacaaaacgactgttttttatggtttttgttgcatcatctgtggtctaggtatctatgatttacgaacttcggctaaatttaatttattttgatttggaaaagaatgttgttacgagagtataaaagtggccaaattcaattgacggaataattataacaaaaaacatgcatctcttgttgttcatcaggccgcgtcgaagcaacctagggttttgaggggagg

SEQ ID NO: 101678 - DNA, 713 bp, Mimulus guttatus
  Intron number 2 from transcript mgv1a012350m (locus mgv1a0 12350m.g) derived from phytozome v7.0 (chr-ID scaffold_24; pos 1726046 to 1726758 reverse strand)
agcaaagaaataatttggtggagaaaaccgttgaggtaatttttatttatttatttatttattatatacggtgcgtttggattgaaggatttcaaatcaattacaaaatataacttaattagagctaaagatttgtatttttttgtcggaataatccatcctaaataagctcaattgatttgttactttggatttgaagttgtcagctcaaatccttccatccaaatgcaaccttatcgatttagatttttctgtctgtgtgtcagattttgattttatctgtgaattatctctaaatagtcttgatgattggttatcttcttaggtctcgtttggttggggagattagctatgattaactaaataattggactctgtttgatgttttgtatccccgataacttaccgggtcgattcgcaaatattatgttatcgtggtttattttgccttatcttgccttttagggagcattctcgttggacgataaaataattggattctcattaaaactgaaaagacttcttttcattaaacgcacattgtagatgtattgtagattttgaacattgtcgattttgaaacgcacattttcgataaaagacttctttttgctccactttgagtatataaaattagattccttagatatatacaagtgaggttgtctatctttttaacttctaaaaatttgttcccgtgcgcctacagaaat

SEQ ID NO: 101679 - DNA, 649 bp, Mimulus guttatus
  Intron number 1 from transcript mgv1a007985m (locus mgv1a0 07985m.g) derived from phytozome v7.0 (chr-ID scaffold_96; pos 886752 to 887400 reverse strand)
ctttcttgaatcttcctaccctaaaccagaaagaggtatgtatgcatcaccttcaacatgttatactcttttctttcatgcaaattgtcatgctgttttgtgtgtgtgtgtgttttcttcccaaagaatgaagaaaaatctagcaccccttttcccccctcttccattttctctatcaagaattagatttcatccttatttgctgttctttgtgtgtgtgtgtgtgtgtgtgtgtgtgtgtgtgtgtgtgtgtgtgtgtatcttgattctttgggaagaaaatagacactcaaaaaaaactaaaacacacacacaagagaaaatataaggggggagaaaagggtgttttcttcccaaggagaagtgattttagtttagtgtcaagaaattagtgtatataatataatataatttgatgttgattagtgataatggttcattaaatgtgtactaatcacttcacttcagttcttgatgtttaggattggtgccatttatagcacactgtcactcttcttattcatttatgggtcatattgtatgtttactatcttccgtattatatatgcagctatttaattaatatggtggtggtggtggtttaaatactgtagggtaccctgtgtttctttattattactacttgtgt

SEQ ID NO: 101680 - DNA, 676 bp, Mimulus guttatus
  Intron number 1 from transcript mgv1a015257m (locus mgv1a0 14408m.g) derived from phytozome v7.0 (chr-ID scaffold_17; pos 306107 to 306782 reverse strand)
tcttcttcttctcggctgccatcaggaaatcaattgtacgttatctaatctctgttttctcacaattctttcacgcgcaattccaccaccaactttccatattatttttattaattaatttatttattttctggaaaaaaaagtgttcatcatttcacatgggttcgttcacattgtcgatttcttctcttatttaatttgcatttttattcaattccatcgtttgggttttgaaggagaaagtatgagacgccagattctaatttttcacaaaatttactaaatttatttgtttatttaaagaacgaatcaaatgttttgaatgttcatcaattgacctagaaattgcagctcaaaagggggatttaattttttttttttttttttgggtacgtttcttgattccagctgcttaacggttcatacgtctcgatcgtcgttatttataccgtcatttatgttttaatggtacttttttttgattaatttcttcatgtgtgtatttcagataatcttggggaattttcgggtttatgccgtcgagaataacttttatatctcatctagttttatcaaggctagctgaattttcgggaaaaaacgtcaaatccacgagtttttaccgtcgaggaatattctatctattagctctcgttgaaaagtaattattattagc

SEQ ID NO: 101681 - DNA, 418 bp, Mimulus guttatus
  Intron number 1 from transcript mgv1a008366m (locus mgv1a0 08366m.g) derived from phytozome v7.0 (chr-ID scaffold_89; pos 176296 to 176713 reverse strand)
ctcattttgcccttttcctccgccgcacctttcaggtaatacagtgtgtgtgtgtgtgtgtgtgtgtgtgtgtgtgtgtgtgtgtgtgtgtgtgtgtgtgtgtgtgtgtgtgtgtgtgtgctgcgtgttttttttccgcggtgttatgtgatatgttgttatgcacattcaataatatattgagctcgtactcttcttctgctatgttgaacttgagatattttgatttcagtgagaattgatgatcatgaatatggtttatttttcaattgtgtgagatgcaaatatgtacatcatatcaatgttaaatcaatatcactttttctgctaatttgttttgtttttctctttttcttcttatcatttttaccccagtcattctggttataacattccttttccttagggttgacgattt

SEQ ID NO: 101682 - DNA, 917 bp, Mimulus guttatus
  Intron number 2 from transcript mgv1a016439m (locus mgv1a0 16439m.g) derived from phytozome v7.0 (chr-ID scaffold_181 ; pos 290613 to 291529 reverse strand)
gattctaccggtggagtctctactatttgccaagagtaagcccccatttttttaatttttgtaattttctttaagaactatacaatggatgaatttggtgtgtttagtttaaggtgtttaactgcatagcttaagataatttgttgctttggaggaaaaaaaaattgtttctatttattcgtcactttagattttgattgatacaatgataacacttttctcgattttgcccgatagcgctcttaattgattcaggtgaaaattgaaataacgaatcagaaacgatgttttagtcgattgttatgccttttttttcgtagtccatgcagttataatacgtgtcgaacaactcaaaacgataaatatacggcaaaatggtatatatagtaattgtttactagctataaataagcaaatcaatttcttgatcagttttcggtttttttttttttttggcctactaagtttgatgttcgatataaaagaaatattcaccaaaatattaattttgatgggataaaccactgaggttaaaaaaaagaaaaacgagtcaagagtcgagactactcgaaccatggttagtgaatcagtgatgcacgcaactgattgttcgtttcagtttttgttggaggttgcaattcacactttcactatacgaacaagaggagaagtttttgagtgatcagaaaatcaagactgatttttaagaatgtcgaagaccgtttagatattctattccaaattttatgtagcatttcttgtattgcgtataacatgttcataatgtttcattgaaattcaaataataactttgtgtatatatttaagaaaactaagaaattagagttcgatgtcacttactttactgtctacttctccctgaaacaggttcgtatcgaacatagactctgttccag

SEQ ID NO: 101683 - DNA, 692 bp, Mimulus guttatus
  Intron number 1 from transcript mgv1a015964m (locus mgv1a0 15964m.g) derived from phytozome v7.0 (chr-ID scaffold_64; pos 256195 to 256886)
ctgaattgcgctacagcttccagcgcaatttccaggtgaattaggacaaagccccaaatttccaattctcttgttttttttttttgtgtgtgtgtgtgtgtgcaaaagtgttctatgtgtttgtgtgtgcgcgtcgttttgttttacgttgctaattttggttttacttgtagttgtcaatgttaaagtgaggattacagttgacatgtgattttaacaatctttgagacatgtgaataaattgatttggtgctgcttctttcttgttcaatttaaccttgtgagagatcaattacttccacaactctatttattatcgacatgctcgtcgtggctctaaaatgcttgaattattgacattgatagagatgaggcttgaggtcttaagtcgagagctacccgaactttatagcgattacttgatagcagctaaggaaatcttaagaatctttcttaatttatggtcatttgattacaccgtaaatgtttttcgtgtttttagatttgaatgatcgaccagctatatatctacaagaactaaaggggaagcaaagaaacaaatgtgcttgtggacgtgacgttttatatctatgtatgtctttgttgtgtgctgttgattatgcacggtactgatgtagctctgtcgtgttcgtgcagtttctccaacaagtttttagcatcgacacagttgt

SEQ ID NO: 101684 - DNA, 404 bp, Mimulus guttatus
  Intron number 1 from transcript mgv1a007304m (locus mgv1a0 07304m.g) derived from phytozome v7.0 (chr-ID scaffold_16; pos 104531 to 104934)
aggtaaatggttccactgtcaaatccatatttgcttctttttttttttccttttaatttcttccgcttctataatcagatctgcccttttcatttttctttagatgtctaatcgttaattgcattattttactgcataatttgatcttggttttttttttttctttcttagattggtgtagctaaaggggatcctttccctttttatctaccatttcttaacattttttcaccgtttagggtattaatctgttagtgggatctgaaaggagatattttttaatcttttgtttcaacgtcgtaatcttgtctcaaattgtcagattttgcgagttcttaccattttgtgtttctttttcttttcatgcagctcgaaggagaaacccactctcgggtgagtctctt

SEQ ID NO: 101685 - DNA, 405 bp, Mimulus guttatus
  Intron number 2 from transcript mgv1a007304m (locus mgv1a0 07304m.g) derived from phytozome v7.0 (chr-ID scaffold_16; pos 104897 to 105301)
cagctcgaaggagaaacccactctcgggtgagtctcttgacaactttttaatcaagtatttaatcatagttgttgccaaattttgcttcatattttttttggagttgttttattaactgcggttgttttcacttagagctcttttactcgatatgttacaagattgagataaaagatgttaacttttttgatttttcaaagcaaattgggctagtcaagttaaatgttcagtttttcttttagttcttgatgattcttggagtagccaatcttgtccttaagctgatatttaataggtttgattgcttatcatacttcttcagctacttctgttttgatgtttgttattgtctctataatgtcgatacagaggcacgcggattaagacccgcaaacggaatatag

SEQ ID NO: 101686 - DNA, 493 bp, Mimulus guttatus
  Intron number 1 from transcript mgv1a010988m (locus mgv1a0 10988m.g) derived from phytozome v7.0 (chr-ID scaffold_96; pos 923393 to 923885)
gtggaattaactggtcattgctttcttggtaaatatttcttccaaatggcagttttcgattttcatgtttctgtcataaacttggctctgaactctggtagtatttaattcttgtcatggtttcgttgaaatttgcaacccgttatgcactttggataatgcaaaatgttcggcaaaaaagaataaaaatagtagagaccatattcgttgtaaggatgtttaaccatagattatcgagtcttggcatagttgaacacttgtattacaatttgcaacccgttaaataatgccaaatgctccgcaaaaaaagagaagaaaaaaaaaacactagagaccatattcatcgtacggatggttaaccattgattgtgattgatgaaagtttattacatctggtccttctttcgtcaggaagtaagttgcttgtcaataagttggttaacttcctgctaatcgagaatcgattattttgaattcatttcgatgcaggtat

SEQ ID NO: 101687 - DNA, 785 bp, Mimulus guttatus
  Intron number 3 from transcript mgv1a008410m (locus mgv1a0 08410m.g) derived from phytozome v7.0 (chr-ID scaffold_258 ; pos 182288 to 183072 reverse strand)
accattgccagtatttcatcttccaggtactttttgtcctttctcgtaagcaaagcttcgtaaatgattcgttcgtaatatatagtaaaagttctcttggcgcgctgtcagtgttatactactccgaaaactaacaagtatgcatataatttttatttttgtaaagaaaaggaggggggccatggccccctcccctgttgccctccgctgcctgctagtatgtttgtaatttggaagattatatcggcagcaaatataaaaatcaagataactctaatttagagttctttgatcacctatacccttttttcttgaagaaaaattaagcaattactatgatgcccttctgtatcgtgcttgaaatgttgggagctatttttactccaataacgaatgtttgtttaatttcgtcatcatccaatattctttagccataaaaagattcaggagacctaagatagtaagtactacattcgttttcatattaagtgttgtttaaggttgtttcatactgattaagaaatgcattatacaacatttgatttttgaggaaaaaagttcttatttgacaactttatgcatttatggcttttcattttctcttattaatcattattgttaaaattggaaaagaaaaaaaaaaactgtcctactttaaaacacttaatatggggaaaaaatagtatcgactatcgagcattgatttatttttattttgtaactattttgaatttttgtcacttcatgcagttactaagaggcctgaaatacctccactcggcaaa

SEQ ID NO: 101688 - DNA, 650 bp, Mimulus guttatus
  Intron number 1 from transcript mgv1a004085m (locus mgv1a0 04085m.g) derived from phytozome v7.0 (chr-ID scaffold_1; pos 3357666 to 3358315)
ggggcgttctccattgacgaaagcttgcgtcaggcgtgagttacccttttgtttttttgtcgtttttattttatgttgcggttagcgtgcatttgctttaatttgatatgtcatatttagttccgcattcgttgtgttttttgattggttagtttttggttactggtattttaattttcacataatcggctgatagtgtaggctttttttatgatgttgtgctgatataagtttaaatagctcgaagttgtggctttctgacgagtattgtaatgagtattcgactattcgtttgttcctgcgtataaaactgctaaattcggcaagattatagcatattgcaagaaaatattatgtggggtaactctatgtaattagtagatggctgccttgagattggtttgtggatgaacttagataaagatcggggaatgtggttcgtttaattaaagagagattttatagagttttgtcatcgaaaacttagtattgcttgtttatcttccatctcgtacatttgtctcatggcttaccgttcatgcttaatacgtttttggtaatgattattttcatgatttctgttgcattcatggatttgatttttgctttgaacaggtttccgattatagaaccagatcctggccacacaa

SEQ ID NO: 101689 - DNA, 904 bp, Mimulus guttatus
  Intron number 1 from transcript mgv1a005521m (locus mgv1a0 05535m.g) derived from phytozome v7.0 (chr-ID scaffold_39; pos 705324 to 706227 reverse strand)
agcccacctgagcagaggcttcttctttaccagcagtgagtgtgagctttcccttcttgctaattaagtgttttattagtggttaattaatgtgggattttattggaaagtagactcgatttgcgtttaaagattgtgtttttatccattcaatttctcaatgggttgtctctgaaactcttcttttttgattctccgtttccgggtttctgcgattatgtgaaattattgttcaaggatcttgagtgttgcattatcattattttctttaattggtttattttttgctaataatcattagcattttgggtataaggtatgtttctcgttcctgcatatttgattacaaagaatatcctgaaggagctgcttgattttgataattttgatgccgaaaaaaaatcgtttattttaaaaccattcttgattttattgcatcatcagagtattgacttttgaataacccttcaattcaaaggcttaggtaagaatgtagactttggtttggatgtttgtgtccccccatgtaataataaatccaggattttagttttagttttagttttagttttagttttagttcatttttgttttcttgattgactgtatatgaatcatttgttttacgttcgatttctcaacacctgaatattagttggattacgatatctgaatctggttagtgagtttagaaaaaaaaaaaaaaggagtagttcatgcgaaactgttaaaactaggcgtcccgtttttcagttcagtcggagtaattacaagaattatgctcttaatgtgttcttgcataatcactttcttacttatctgaatttattgtagcctaattatataaatttattttcttcacttctcaggttgggacctaattaggttctaagtcttgtaattg

SEQ ID NO: 101690 - DNA, 875 bp, Mimulus guttatus
  Intron number 2 from transcript mgv1a015967m (locus mgv1a0 15967m.g) derived from phytozome v7.0 (chr-ID scaffold_211 ; pos 145107 to 145981 reverse strand)
aattgccacaagagcaagatttacttcattgcgtacgctagctcgtaattatttacatatacacatagtgacgaagccagtatataggcaaagggggccatctcccccctccccacacaccaacatttctcagatccctattattttatatagacaatacaaaaaataaaaatcgtgtatggtagcattgtgggccctccctcgtaaaattttatacgccccttgcaaacttaaaattctgactacactagtgtaaatatatacacacacacacgcacacacgtatactaatatgcctccgtttatttaatttgattgcgaagatatgtcgtcttgattaattaaattatttgatctaattcgacgattcgaattatatactcggcgtttcttgatctagttattatacaattataggctctaatacgtaggcccttatcacgaattcgattggtttgctaggagtggtcctttgctaaaatcatttcgatacatgatttagctcacataggttgaatgcgtaagtcttgatttatagataaagacgaaacatgaatcggtgcagttgacgcctcgatctttttactaagcacgacatcttactaaatacctagaaacgataaacaactagtcttcatgatatttacgctcgttcataagaatggcgtagttacatacgatatggttgtagtcgtatacatactcgatcatgtgttagtagttgtgattgttttctatctcctaaattatgttacgggccaacaatataataaatcagaattgacggccggtacggtaacgcataatataatttaaattttttaaataaataaaaaaatgacaggtcaccagaaggggcaacagtgagaacaaag

SEQ ID NO: 101691 - DNA, 997 bp, Mimulus guttatus
  Intron number 2 from transcript mgv1a004761m (locus mgv1a0 04761m.g) derived from phytozome v7.0 (chr-ID scaffold_89; pos 1013975 to 1014971)
atcaagttgcattcgtaactcattcagcgcacgaggtacggtactgtgatgttcaattgttaatttttgaattggataaatttgtagcccaaattgaatattgataaagtgaaagtgattgtgtttgaacttgtaattcatattgattgcgaaattgagtttgtttatgtgctgattaggtagcttgatatttgcggcagatcactttgtactatgtttttcactaatggttgcgattttcattatttgccgatcgggtggaatataggattttcttcccatacttgttgtatttgtgtgggaactgtgaaatgttgaaaatgcaatagattttcttcacgaaaacgttgatcattgataacttggttaggtagaaaagcatcatgaattttatatagaaatgatcataatatctttgtaagttgtgttatcaattttattttctgagaagaagtgttatacatttgttaatccgatataatcacatttaacatatcaaattctgagcaaggcgaggaagatcggctgcatcatcctatttgattttgcggttgtagctaagttacgagcccttgatttccaaagctcctaacagggtattacaataataaataatatatttagctaagagtttgatgtcataaaccactggcactatagccaagtattaaagcttcagaatatttatttcatgaaatagtgcatgttcaggtttcgtggcaaacttgagttttgagctctgagcttcatgttttcaattaataatgcctaaaaaagttcattagaatcattacaattagccccatcaaagttaatctacagagttatttaaaatatctgcaagagtcctactcctacatttatggtgcttttaaaaatcgaaatgaagttgttagattagcttcaatagcttcatttgtttatttttataattattactccactattttttcggctagcagaatctgaagggtcaattggaagcaaaaggagttgt

SEQ ID NO: 101692 - DNA, 1022 bp, Mimulus guttatus
  Intron number 1 from transcript mgv1a020310m (locus mgv1a0 20310m.g) derived from phytozome v7.0 (chr-ID scaffold_684 ; pos 38257 to 39278 reverse strand)
gtggcaaagtaatttttcttccgttctgtggattgttttgattttggtgttcttggatgatcgatccctttactattttattgagagtaatctgcaaaaattaccttgtgataaatagtctagcaaaaacccgtcgataaatttagtcaaaggcagaaaccgttctcgttgacttttgtgtggctcactcgttggatgtatgttaagacgcaaaatgacaaaattatccctcaaaatgtacttatatatgcatatatttttcttttaatttatttgtttagaaattaaaatattattaagaaaatagtaaacaattaagttgaaaaattattaaaaatttggtaatcaaaattcagtatatgttttttaaatacaaaataaagaaatacataataatagaatttaagttttgttttcactcaaaaaaaaaaaatttaagttttgttttggtttagggataatttaaaatatatacataaattatctgatagcaataaaggaccatattgtacttttctaattaagatataacaaaaataaaataattaaaatatttatataatataagaatttattaattgcaaaatcccagggtatttgtgtgtttttaatttttatatcatatcaacactcaaatgagtaacaagcgagtttgctatataaataattttataggtgatttttgctagtttatttatcataggggttttcgctattttgagattaaacaggggtaccttttgtagtttattcattttattgacattgattgttatgttgcgggcaaggtgtttgttaaaatgacactggtgctagatgtttcttgttaatctgatatatgtaaaataaaaataaaaaatcgatttttctggactgaaaactgttcgatttcaccgatgattgtgagcatcatatgtatctcatcaaacactacatattttgcacgtgtttaaaattgaaatcccacgtgttgaatttgttgaacagagtttcagactggataaatcaacaggaaagaagtg

SEQ ID NO: 101693 - DNA, 712 bp, Mimulus guttatus
  Intron number 1 from transcript mgv1a019757m (locus mgv1a0 19757m.g) derived from phytozome v7.0 (chr-ID scaffold_247 ; pos 323203 to 323914)
gcgccctgtcccctcagcagcagcaatccttactggtgagccatgttcttcttgtgcatataattgatattttttgtatttaataatttactaaccaaagtatagaagccatcaccatagctcaagaattcttattgtaaggcctcgtttgggttgagggattagccatgattaactgaacaactggactttgtttgatgtttggtatccccaataacttgccgggtcgacccgcaaatattatgttatcgtgacttatcttgccttttaggcatatttgttattggatcatcgaacgtccaataatataattgggtttgattagattatttaatcttatactagttaatcttatcttggcaaccaaacgaggccttaggatatcttgattataattgtacaatcatttagctgcgttagaattttctttttcgggtatagttaaagaacttaatcatacaatccactttctatatagtagatgttccgataataatgcaccgttagccggcaaattgaatcgaatcggtttatagaaaaggcctaatctttaatagtaagggtgcagtatttcttctcttaatggtttggtatgttttctcttttaattacctccgcaaaatgatcgtaatgtttggtgtgtaattagtgatcgtatgtgtgtgtttttcgggtttaatagtttggttaactgtagaatcaagtgagaaga

SEQ ID NO: 101694 - DNA, 676 bp, Mimulus guttatus
  Intron number 1 from transcript mgv1a008310m (locus mgv1a0 08310m.g) derived from phytozome v7.0 (chr-ID scaffold_11; pos 2464240 to 2464915 reverse strand)
tttgttttgaccccctctgcgcccccatctatcaggtgccctcattttttttcctgtttgttttcattatttctcgttctttaacaagtgaatttcctgtttgaattcatcgatgattgttcgattaagtgaactgtaaaaaaaaacaaatttgatggtgagtttagaaacagttttaatctctgtttatccgctgttgtttggttacttaactctatgagtagttatcgatattgaggtttcattaggatttattgcagttgtgataagaaattagtttaatttaagtaggtactattttctataatgattttttagagtaagggatggtctcaatttcgaagatttctgaaatttatccgtttaatatcatgttgtgaaagtaaagtttgattctttgaatcttctaacctctttttcactagtgtttttctaaagcttttggatcttcgagtttcgtgtaagttcaggtaagaatttatttgaaggtcgaccattgaagtgtcataaaaatccactcttggtgaattttgtaacaatatatcgtggaatttttttctgttcaagagaacatatacattcatgaacttgagctatatacatatacatgcaatgccgaactatctctgcttgatcttaatacgtatccatctcacgtttttaatgcagtgtgaga

SEQ ID NO: 101695 - DNA, 596 bp, Mimulus guttatus
  Intron number 1 from transcript mgv1a006390m (locus mgv1a0 06390m.g) derived from phytozome v7.0 (chr-ID scaffold_229 ; pos 354049 to 354644 reverse strand)
cacctgaagttgaccagccactctgtgtttttcaggtatagaatttgagtagattgcaaaaaatacccatgaattaaaaaaagaaaacacatataatttgagtatagaattttcatgcattttctatgaatatgaagagaaaaaaaattgtgtgtgtatatatgtgtgttcctacttcacacacgtgttatataaatttgtaatataatagttggaaattcatcactcaagtttacactagttttatatttggtctcctatgttcataaaaaaaacatatttgtactcctcgtgtttcaataatttgacacttttggtaatttcagtcaatttacccttcgtttacagtagtgatgaacacaagtttgattccgttagttttaacagaaaaatgacggaaatgactaaaaatgttaatttttttaaatatgagggaccaaatgtgttttttttgtgaatatgaagggccaaaaatgaaattaaattgatgcaaatttgagggatgaaaactgtatattttcttatattagttgaatcttatagttcaagcactatttgcaggtaacatcattcaagtgtggtggttttgcaatcgg

SEQ ID NO: 101696 - DNA, 614 bp, Mimulus guttatus
  Intron number 1 from transcript mgv1a013744m (locus mgv1a0 13744m.g) derived from phytozome v7.0 (chr-ID scaffold_101 ; pos 437110 to 437723)
tctctctcttccttctatccatagttcccaatcaggtttcttcttctcatctaattattatcctcgtttgttatttcattcgatttaatttcacaaataatcaattttgtttttttttatttttttgggtaatgttgtgagcatgatgaacctgcaaataggaaaaaaaaaatttgaaatttcaccttccgaattgtcgtatttcttatttctgatccgataattacagatctttaggcctcgtttggtttggggagattagccttgattaactaaataatcggactttgtttgatgtttggtatcccaataacttgtcgtgtcgaccggcgaatattatgttatcacgacttgacatattttttttattggaccttccaatcgaatttcattaaattatttttggttaatcttattttggcaaccaaacgaggtcttaatttattattttacattttcgcgttttgatctgtgaattgtgatgtaaaatttgatagcctgcctctccttcagcatagatggtttattgaatttttcgtgtttaataaaggaccattgttattccttctcctgctgcaggcgaaaaaatcaaaggaaaacttaaaagaagtgac

SEQ ID NO: 101697 - DNA, 613 bp, Mimulus guttatus
  Intron number 1 from transcript mgv1a006235m (locus mgv1a0 06235m.g) derived from phytozome v7.0 (chr-ID scaffold_68; pos 1119103 to 1119715)
aactgcagtttttaggacaaagtcaaagtggtgttgtaattatttctgtaaattgtaatggaatttttttaattaactagattctccattttctttttaatcttttgaaaaacttttggatcataatcaaaattatttatagaattttcgattgggttttaatttccaaaaatgtatttgtaatattaatatgattacatatttatgtaatttattttaaatattatatatgtaaaacaatcatgtataaattatgtaagtggcattataatgatgaaattttatatggctagaatattcaataatcttggaactttggaaaatcataataatatgaatatgaaatttttgaaattggaatcaaattttcactcacaaaaaaagtcaaaaattgtgtttatagtaaaaattctattttgaaaatgttacttaatatattaattaggattttcttattgcaaagatttaattatattagaagatctagttagattgtgtctttaatacgaaataatatagcgactttatcaaaggaattcaaaaacacgtttttcatattgttttgtttccccaaacagcaacgctgcattcgtcgtctttatcaaaatctttc

SEQ ID NO: 101698 - DNA, 576 bp, Mimulus guttatus
  Intron number 1 from transcript mgv1a004382m (locus mgv1a0 04382m.g) derived from phytozome v7.0 (chr-ID scaffold_108 ; pos 729825 to 730400)
ccgtttcgcaggtgcgctagtttcatggagggaaatttgctttaatgtttggtgactgtacgtatttcatttagtgtgaaatcagatatagtatggaggtagtgatttcttcttctgatcaccgcccccagttccttttatactgtttcgatttcatgtgtttgttctttgctgcaacgttttgccagggttttgttttagtaaagccgaaatagaaggtaaatcataccgttggcgtgcattcaaaatcaaaacatttagattactagacggtttttggttatttcagttatggtggatttggaattcttggattttgtgtcgtttagttttaatttctattgtttgaaactgaatcgctttcttaagcatttgaaatcatacttttgcaatattgtgaagtttttagcgatggggagcatttcaaatccatcagaatgatatgaaaaaacattggaaatattgaaatatataactcgaatcctttaactccatgacatgtgagtgtttcagcttgatgatattatgctacgtgtcacaggtcggggattttgccgttgataatcgagctggaat

SEQ ID NO: 101699 - DNA, 588 bp, Mimulus guttatus
  Intron number 1 from transcript mgv1a001653m (locus mgv1a0 01653m.g) derived from phytozome v7.0 (chr-ID scaffold_22; pos 42741 to 43328)
ctcgacgagcggtcaaattacaggttaatatctaattgcattactttaaatttgttaactgaaggttttaataagactgcaattttctcttttgtttccttgattgtacttgagggagttatgtgatgatgtaatgttgctggggaattcggattatttggccaagaattttgagaagttttatatgtggcctaggaaattcataaatcagcagactttgactaccaaaagagtgaacagaggttatgctacaagcaaggatagtttgtgcttgaaattaaatgaaattattggtaattaaacggtcaaattccaaatataagtagttgcattttatcgatgttgatatctggacgactgctgctaaaatttctgtcaaaatgcagttattgcgtagtgctttgatctgataattagattgtctatgtaaagaacaataacataatagttcttcttggtgtttgaataattagttattgatgtcttaatgatgttgaagggacagttcaagttgtagatcatttccaaattatatttaggagatctaaattaatagaatgattctatatctgtaggcacaagcaggtg

SEQ ID NO: 101700 - DNA, 539 bp, Mimulus guttatus
  Intron number 1 from transcript mgv1a004076m (locus mgv1a0 04076m.g) derived from phytozome v7.0 (chr-ID scaffold_18; pos 2203632 to 2204170)
accaaacactagtcagctgtatactactcactccccttcaatttttctccttcaatttttctaggtttttactcttcaatcgtgattatgtttgttttggagatctggtacttttttggcttcataaaccatgtacctcttacatgcttgtatgattcttagcttgaggaacgtacaagtaaatatcttcaattacaaaattcagtttaaagttatagactgtttctgaaatatcagaatctgcacttctctagtaagctgtcactatgcacagaaataagaaagctaaagtggaaagaggattcttgtgtgaacaatcaatttgaataaaacatctcttgactgaatggatcacagtagtaatgtgttcggaatgttgtgcctattggcacagataagaaagcaaaagtggaaatagatttattgtgtcaataattgtcttccttcccatcaactataacccattttcgctctcatctagccttaccttataagatttttgttcttaaataggtttgcaggcagatcacactgttcac

SEQ ID NO: 101701 - DNA, 830 bp, Mimulus guttatus
  Intron number 2 from transcript mgv1a017311m (locus mgv1a0 17311m.g) derived from phytozome v7.0 (chr-ID scaffold_128 ; pos 621532 to 622361 reverse strand)
ttgctcgtcgaagtgctgtctctggaaaaaaggtccgtattacccctcatttgcatataatggcctatatatatgtattaaactgtaatatgtgttagtttactttcaactagatttaacagacaccgatttaacttaatctcatggtgtttttcccaatagaaccctgcaccccatcaagttataatctttaaaagttacaactaagagaaataatgatctgaatataggtccagacctacgcatatggtattataaaaccgaatgttggttttgaagactcggctttctttccctatggttggaatttctattcaattatttatttatctttttgtattcttaaatttttctcattactttcttggatgaagaagcgctgggtcatactgtaaaattaaaaagatggaaaattgtaattgtaatttagttgatggagggtgatataacttttgttctggcagagggtaaaatagtcatatcaaaacaagggttgattgggttttctagtggttgaagtttgagggtttcttttcagtattttataaagtgtaatcctacaaaaagaataaagtagaagcctgtctgaattactttggttaacacataatggaataatagttagtatttaggggctgactataaatagtgaaaaaagacaattcactagtctccatgttctgaatgaagcaactactatcacagtacattttattgctattatacatgggcgcaagtatgatatggtgtgttttttctctctctctctctctctctctctctctctctctctagatattgttgaaggttgacaaaacaaaggaggacaa

SEQ ID NO: 101702 - DNA, 509 bp, Mimulus guttatus
  Intron number 2 from transcript mgv1a011287m (locus mgv1a0 11287m.g) derived from phytozome v7.0 (chr-ID scaffold_300 ; pos 132122 to 132630 reverse strand)
ataaaattgacgctcttggcatattattgtatgcacctgtgtttctacactttattccattttttttagaatttttttattctcaatctattgcaatagactaatagactgacattggaagagaaagaaatataaatgctggaaaacaaaaaaaccgattcaacattgaaaaataaagactttcgaactgaactcgacggatttataaacgttggaagcgagactcgttttgaattttgaaatgatttttgtgtagccgaaaatttatgttcgtgtttcttcagttattgttgtttgccttcatgtaatgcttattgttatactaatacggcaaaaaggaaagacttagttcgattgggtttactttatagcccgatcggttaatgcgcagatgtaagatagattctaagtttgcgattgaatatagttgaaatatgtcgaactttgattaattcggagttgctcgttattttttgtttaaatatttcagaacacgtgtattgagacac

SEQ ID NO: 101703 - DNA, 777 bp, Mimulus guttatus
  Intron number 2 from transcript mgv1a008638m (locus mgv1a0 08638m.g) derived from phytozome v7.0 (chr-ID scaffold_178 ; pos 55378 to 56154 reverse strand)
cgtgtcataacaagaagacgctgcccggggtgagtgctgtatttgtgttaatttgaagtttgtaaattaggcaaaatgtgtattgactgtggttggaggtgacagtgtttgtttagcttgatttagtgttggacaaaaggccacccaaaagtaaaaatgaattatctgatctggcaaattaactttccttaaatgaatgaatagttctacttcactagtactttgatttgcttactcgacaatttctcgcatttatggttttattaattaaatgttatggaaagatacacgtcgtagattatggtactatttcatcgatgctacattggatttctgtttgaaatccctgtaacttgttaggctcttcaatgcagtaaagttgccaaatttgagaaatcgatttggattgtgagtgtgcggtataacttattaaaatgacgtacatctcacttttgagtaaccggttaaaattttcgtgttcatcttacttttcaacagaagaggtgggtatacgtatatttataaatttagtcatatcctccatcatttttctgagcccacattttcttgctgtaattttgctatccagggtaagcacattaactgtttgaataaatctgaatataccctattgaacggtttattattcaacccggatatatctatatctgtttttcgttttttatagctatgttttgttccttttttctcgttttgatataaaggaaagatgttctttgtgtctaattcaggcatccagtccgctgcaagtgaagt

SEQ ID NO: 101704 - DNA, 771 bp, Mimulus guttatus
  Intron number 1 from transcript mgv1a021573m (locus mgv1a0 21573m.g) derived from phytozome v7.0 (chr-ID scaffold_132 ; pos 183257 to 184027 reverse strand)
tcaccggtttcagtctccttgtaagtaagccccttctcctttctttctaatgcctgttacgtgtttgatgatttgcttcatagagtaaaaggtgtacaaagaaattctaaccaaatacagctatattactctgtttttttttttttcagaaaaaaaaaagaaaaagaaaaactcatatgtatctccattaatttgaactaagtgtatattcaaaagcatattatatacccgaaaaacgcaaaggcctcgttttcttagggagattagccattattaactaaataattggactttgtttgatgttcagtatacctaataacttgtccgacctgcaaatatggcttatattgtcttatcttgtcttttaggtagtttttttgttcgacgtcgtggcgtccgataaaataattgggttttcattagattatttaatcttattttggttaatcttatcctggcaaccaaacgaggccaatttgtattaagccaacggcggacccaggtgttttttgttccggggctaggatatgggatgatttaagaaaagaaaaaaggtttttttctgcacgaaaagtgcataaaaataaactttcggggcgaaagtctataaactaatagataaataccgaattaaaataaaaaaataattaaaaaatgtattaatttattgaagaatggcttctttttttttttttttgattgagctaatgttgagatgttttatttattgattacttaattagaaaatttaaattttccgagcagactgga

SEQ ID NO: 101705 - DNA, 749 bp, Mimulus guttatus
  Intron number 1 from transcript mgv1a000878m (locus mgv1a0 00878m.g) derived from phytozome v7.0 (chr-ID scaffold_11; pos 164837 to 165585)
gaagcagagagtacgcgacccgattgccgaagaaggtgtgtgtgtgtgtgtgtgtgtgtgttgtgtgtgtgtgtgtgtgtgtgtgtgtgtgtgtgtgtgtgtgtgtgtgtgtgtgatcttttatgtgaagtcgatattttaacttactaagtaaatgcatctgatggaaaaagaacaaatcaaacgttccattacaaaggcagtaaaaattacgagctgtttgtggttgaatttggggaattggtggtgtttaattgctgacaagactggtggtcttgattggaattatgtagctttacatgaaaactgaatctcataattttggtgttgctatgtcaaagtagaattgtggcatctaatttaataacattgatatatgtatgtattgtagagatgtgttagttactatcttcttcttttttcaagaaagttccactcactgtaacaaacagtatcaatcataagtgtacgaaataattacttccaaaatgtaatatgatatatagtagtacatgcttacctgcgatgagagagattttggggttgtattactgatttggtgtggtgcaaatagcctgtttacgatgaaccggattaacttgtcgaaaatcgaatcatgggataacagagaaataatgactagttgaaacaattgcactcctcgtttccgagcttatgagatatatgttattcgagtatttcttatgatttcaggagttctcagcaatttgagtgctttatctcctcat

SEQ ID NO: 101706 - DNA, 932 bp, Mimulus guttatus
  Intron number 1 from transcript mgv11b024665m (locus mgv11 b024665m.g) derived from phytozome v7.0 (chr-ID scaffold_2 ; pos 3743864 to 3744795 reverse strand)
tcggatatatcaacttcaaagttgcgcagagtgcggtacggtggagcttgagatcgatacccgatttcttggagaaccatggcggcactctccgatctagctatcctccgcagttgatttccccggcccaccgaaaccctctaacgggatagtgagattcttgatccatatatcacggattaatcttcaagaaattatctcaaccgtaccgtaggggatccactatgcgtcgacgccactctcccgacgcatgacctcacttcgaagatgttggcggaggcggtggagtgccaagtgggcggcaatgtccgcggtcatcgataattattcggagggtttcgagggaatcgcgtcactggtcgatgtcgccgaccatcgtcgccgcggaaagaagagggcccacaatgaatatatgggcatattgccgccggctttactacacacaaacttactacaaatatcaaaactatagtgtccgtctataaaaatcataattgcatgcgtatcgatcccctaattattgatgttgttgtctgctgcaattacgtaccaactgtttgttaatgttattcataattaagctaaggtttcaccttgtttttcagttaaataaatgttctaaataaagagtatcattttcaattcagtttgtttgtttcgcatcagtgcctacgatcaactattttgaaagtgaaaaaataacgattttatataaaattataatatgtttgtgatatatacatatatatagggtatatctataatgtaaattaataaaattcgacttcaataaaagttggtggctcaactggttaccaaagcccatttcttgaggccgaatgcaaatgatgtgatgggtctaaactctaaggcccatttcttctattatatttacagtattcattccgtataagtatttcggtagaaaatcg

SEQ ID NO: 101707 - DNA, 763 bp, Mimulus guttatus
  Intron number 3 from transcript mgv1a010477m (locus mgv1a0 10477m.g) derived from phytozome v7.0 (chr-ID scaffold_249 ; pos 19235 to 19997)
attccgcttctaggtcaacccattgctttatacaggtgatacagcaactctacactctgattaagattcttgaataaaggttttatacttagttactgtttgtgggtaatatgctgtgttttgaaaccccggcagaacggccggttgaaccgcgaaccattgcattgtcccgtccggtttgaccggttgaatagtaatatcggaacccaagtgaaaatcaggtttttctttgtccaaaattgtgtttttataaaaaaaaaatggctaaaacgaagtctttttactgtccagttgaaaaaaaaattaaataaaattaacttttttttgaaattagaagacatgctatatttttttattataatttctataataattgaaatgatttggtgtgatatgtgtgtgttgatatgttgtgtgtaaaagaaaaataagtttgatttaccttttaattggaaatgagttatgagttaatgtgtgtgaaagaaaatatgctttatttatgataaaaattatgtgtaaataattataacataaaaaataaagaaaaccggttgaaccctggttgaacaggtccaatcgtgaccctgtaccttgttcaagtcaatgtccggtccgattttcaaaacattggtagtatgttaacaatcaataaggtaatgtatatagaaataaaaatgaagcacttgcatataatttttgtttctgtcgtattttgcttgatgaatgagcagaactattttgcagtttctacactttctcgaag

SEQ ID NO: 101708 - DNA, 422 bp, Mimulus guttatus
  Intron number 1 from transcript mgv1a005406m (locus mgv1a0 05406m.g) derived from phytozome v7.0 (chr-ID scaffold_27; pos 734331 to 734752 reverse strand)
atttccactccagttccttcttacatctcctccaggtaccagaagattgtttctattgattgaagtgtttaatgtgtgaggttcaatttaacttctctgaatttgcacgtggattaactgttccgtggatcatataaagctgtcgtttgatatgatcgatataatgcccaaaattattgaatgagttcaatagtggaatctttgctatggtgtataccaattagatcctattggttgaaggctcgtcgtttgtaggaattaacagtctccatgaattgcttaagtacattctcttattttgaagatgattgtgtttttatgaggatattatgctttgcactccacattggacgacgtggaatttaaaatgcttggtgaatctttacttccgatgttctttttcataaattttcgacagtgaa

SEQ ID NO: 101709 - DNA, 872 bp, Mimulus guttatus
  Intron number 1 from transcript mgv1a014064m (locus mgv1a0 14064m.g) derived from phytozome v7.0 (chr-ID scaffold_141 ; pos 370982 to 371853 reverse strand)
caggaaatccttcactagaattcaaggtacgtataacactgtacatgactagatcgatgatatataattcatcatctacgtacaagcgacgaatgattctttttggcatgaattcatctatctatgacatatataatataatatatccaggggcggatctacggggtggccaagtatgccatggaccaccccaaattacgaaaataaatttgccttagtggcaaagatctccaagttgttaaataaagtcatgagttcgactccattatgtaatgtacaaaaaagtattgtttaatttttttgtctaaatttcttttgagcccctctcccataaacacattatattatatctatattactatttagtccacccaaaattcaaaatatacaaaaaaaatcttaacttttttctttgttttttagcccctctccccaaaaacacaatatattatatctatattattatttagtccacccaaaattcaaaatatacaaaaaaaaaatcctaaatttttcttgtttttttagcccctctccgcaaaaatacattatattatatctatattattatttagtccacccaaaattcaaaatatacaaaaaaagtcccaatttttttcttctcctaatttatccaaaaaaaaaaaaaaaaaaaaaatgtcaattttttttcccttctcctaatttatccaacaaaaaaaggttcaaatttttttccgggggcgctgcccccaaacccccaaaaatttaacccctctatacagtaaattcttggactcggcacaaccggcataccctgaattttcgtcctggatccgccactgaatatatccatgttctgttttgtgcaggtagacgataagacgaagcag

SEQ ID NO: 101710 - DNA, 706 bp, Mimulus guttatus
  Intron number 3 from transcript mgv1a012323m (locus mgv1a0 12323m.g) derived from phytozome v7.0 (chr-ID scaffold_102 ; pos 11118 to 11823)
ctccggagttgaaaaaagatctccagctactgaaggtgctgttaattatgtgatgtttccacaatttttgcttttggtacaataatacaaatataatttggaaaaaatgattttgcttcatatcgttgtgtctttgattgagccattggccacattccctaaaatgttaatccatgtacagattgcataatcagagtggatcgtgaacttcaaccaattcacatgtatatccatattaattaccgtgttttccttcaagtaagacattacgttggcagaatcggttggatcttctcatatagatagttatattttattcaacaatgcaccaaaataatattttttcaaatttcttttgaacaatttggttgtatcaagcttttggattttatgatccagtctaaatgttgattaggagcatgagtctgtatccagatttcagttgatagttaattatcagcccgtatttaactcattgtgcatgtctaaagtgcatccaaaaccaaaagggacctaattgtatagtgccttaatacattgatatatatggttgttccatgagaagaaaggggtgtttgtttgtttgtttgtttgtttgtttgtttgttctattgcaatttacttataatgatatttgttgattaaaagtggaagatggttatttgttacagttgaggaccgtgatagatccaaaaaggcactataa

SEQ ID NO: 101711 - DNA, 266 bp, Mimulus guttatus
  Intron number 1 from transcript mgv1a009871m (locus mgv1a0 09871m.g) derived from phytozome v7.0 (chr-ID scaffold_8; pos 3350240 to 3350505 reverse strand)
tcatcaatcgtctaaatcgctcgacagaaagaagggtttgtgctaatcgttcccttttttaatttttttaattttgttttttattcagatctaagaagaatgagattaacatctgttttgattctttttatttaatttttgtatttgttcttagtcaatctgaaatcaaaaaaagaaaaaagaaaaaaaggaacccttaattttttttgccccttttggattttgccctagaaatcaattttgtgtaatttgattatagggaagcc

SEQ ID NO: 101712 - DNA, 503 bp, Mimulus guttatus
  Intron number 1 from transcript mgv11b016424m (locus mgv11 b016424m.g) derived from phytozome v7.0 (chr-ID scaffold_3 9; pos 537373 to 537875 reverse strand)
ggtaaaaccggaatcaatcaaaactgtgacaagtatttctacgaaaaccataacataaccataatggtttcggtagcgagttataagcggtttgaagaagcacacacacacacacacacacacacaaaactacccgattccggtttaaatgtaaaatgtctaaactacccctgaaatattattttttgcaaggtacgtgaaatgtcgaggaaaagaaaaatttaatttagaaagtaagatgtaacaacttataagctcaaacttgtaagctagctgtcaaaaaaaaaaacttataagctcaaacttgtcgcttataagtattttgtaattccaccaactttgaaatgtcagtttgtaaaccccgctcatttcattttgcttcttcgtccaagtttgctctgtcagtttgaaaagtgaaaacccttttttcgacgtcggaattttactcgccggctctcgatctctctttctccagccactgcgttctctgtttccgccggaac

SEQ ID NO: 101713 - DNA, 759 bp, Mimulus guttatus
  Intron number 1 from transcript mgv1a024076m (locus mgv1a0 24076m.g) derived from phytozome v7.0 (chr-ID scaffold_58; pos 639014 to 639772 reverse strand)
aagattgagtttcgattatctgagcagagaaatgtggttattgattgtcgtaaaaatttactttcgtcttgtcttcgtatgtttattatacccacgcaaacatgaaccctaaccccctttcatttagttcattcgaatactcatgatgtaaagtgattggtttagggattttgctgggtgtgtcaaattattgacattttttcatatatcttacgagtttaacataaaatcagtttttcgattataggcatcattagttgcttccactcgccaaacactacttcgcttttcttttcgttcctcactataaatttcttggagagtaattgcaatgttatatataatataaatcatagtcaatctatccaatattattagaggttttattatgcatgtgtttatgaagtacacaccatacaagaaagtgaaaagaattaacgaacgtctatgtcagcttagacaagacaatgaatattctagaatccggagacaaagatatttaggaactatctcagccaaatagtatccgagacatttgttttgaatttgagttcccttattattaatccttttaaagatcccgttatattggctcaaagtctcgtcaaagtcccggtaaataatagataaagtagagttaagtggtgtcatcattcttttagttgttgtttcgcttacaactgatatttcaagattcatgcactgaattgctattttattgcagatatcgaacagatacttttggaagcacaacatcgg

SEQ ID NO: 101714 - DNA, 487 bp, Mimulus guttatus
  Intron number 1 from transcript mgv1a005313m (locus mgv1a0 05313m.g) derived from phytozome v7.0 (chr-ID scaffold_58; pos 1401601 to 1402087)
cactgattttggtctctctgttttctacaaaccaggtttcttttcaaaatccctctccttttttttttttcttttttttcttctcatgcctttttggtatatatatattatatattaagatcgatgttgttctccattctcactcttaattttaatctttgcctaatttctgtttaaatcttttatctgcatttaagatcgatgttgttctccattctcactcttaattcccctataaatccaaataacaaaaatcaagattaagtgggaaagaaaaaaaaaacaatgaaatggttcaagggtatattcattcgcttcttcgttgattggtggtactagaattcacatttgtgggaatttcttgggtttgattttcttatacacacgaaaataatagtcagattatataattcccaagcaaactatgttatttggcatatatatatttgtatgaaactcaatcgggctatattgtaatattgtacag

SEQ ID NO: 101715 - DNA, 644 bp, Mimulus guttatus
  Intron number 1 from transcript mgv1a003044m (locus mgv1a0 03044m.g) derived from phytozome v7.0 (chr-ID scaffold_24; pos 971478 to 972121 reverse strand)
taccgccgacatctactccgccgccgccggaacgagtaagctctgaacctttttgtgtcgctttttgtttttttttggttttttgcggcggcgtctggtgtaaggcgatgtagaagttgagtaggattaagaaatgttggaagaggcacttgcttggaaaaaaataggttaattttggtatactaggaccattttctcagtgttcatgctgggaagttgccctctgttattttgcataaattaataaaacaataggtggatataattgattggagagacaattctgaaattttaattttattctatttgaggggatttttgctctaattggtggacgcttattgtgaaatactgacggtacagacatatagttttatcggattagtgaagtaagtgagtgttttagtgtgcatgtatagttttagtttttgatgttggtgagtctttgtgagcatttttcggtgaattataaattacatctgactggtggttctgtaactctccattgtctattcaagtattcattttttttttcctttcgaaagaaactctagggaatattcaattttagcatcacataaattttgccttcacagtgagatagttatagttttttgggttttgcttctattgtatacagttca

SEQ ID NO: 101716 - DNA, 838 bp, Mimulus guttatus
  Intron number 2 from transcript mgv1a014408m (locus mgv1a0 14408m.g) derived from phytozome v7.0 (chr-ID scaffold_17; pos 304820 to 305657 reverse strand)
caccgtcgtctttgtgcttgtcatcgtctttcacggtaattaatttttaccgttttaattttgaatttttcgcatttcttgaaatgtaatggtatacttgttgataatatcttgtattgtttgtgttttagtgtagtttaatttctattaattaaggcctcgtttggttggggagactattattaactaaataattggactttgtttgatttttggtatccccaataatttgttgggtcgacccgcacatattatgttatcagggcttatcttgcctcgtaatgagcttttttgttggacgttctggggtccgataaaataattgggtttttattagattatttatcttatcttggcaaccaaacaaggccttagcatattaatcaatggcataagctaatcttccatatctgtattgaatcttcagggattttgggttcacgaacatgatgccaatcgtaatgcatcagcaacttttccaagtaatttcgtgattttttctctcggttctttctattaattttagcgaccggcttagatattttgatcttttactactctagtagaacatgtccatgatcaattgtttctacacgactttaaatatttatttttaatgattcttatgtatcactacaagctcgttttcgttttttttttccttctaactcaataaatggatgattttttttatttatttttagttttttatttttattattattaaaaaagacgatagttactggttccccaattcccctcctggtctctcgaaacatgtaatgataatcataaactatatgttttcatataaatgtagagagtgtcgctgaaaacg

SEQ ID NO: 101717 - DNA, 533 bp, Mimulus guttatus
  Intron number 1 from transcript mgv1a014408m (locus mgv1a0 14408m.g) derived from phytozome v7.0 (chr-ID scaffold_17; pos 306250 to 306782 reverse strand)
tcttcttcttctcggctgccatcaggaaatcaattgtacgttatctaatctctgttttctcacaattctttcacgcgcaattccaccaccaactttccatattatttttattaattaatttatttattttctggaaaaaaaagtgttcatcatttcacatgggttcgttcacattgtcgatttcttctcttatttaatttgcatttttattcaattccatcgtttgggttttgaaggagaaagtatgagacgccagattctaatttttcacaaaatttactaaatttatttgtttatttaaagaacgaatcaaatgttttgaatgttcatcaattgacctagaaattgcagctcaaaagggggatttaattttttttttttttttttgggtacgtttcttgattccagctgcttaacggttcatacgtctcgatcgtcgttatttataccgtcatttatgttttaatggtacttttttttgattaatttcttcatgtgtgtatttcagataatcttggggaattttcgggttt

SEQ ID NO: 101718 - DNA, 789 bp, Mimulus guttatus
  Intron number 2 from transcript mgv1a008777m (locus mgv1a0 08777m.g) derived from phytozome v7.0 (chr-ID scaffold_48; pos 1159256 to 1160044)
catttaaggtttgattttcaacaagtgttcccttaatactcgaagatatttcaattcatctgcaatgggattaaattggttgtgtttaattgtgttgtgtaatcggaaaatatatgtagtgtttaccaaactttatgcttgaattgaatgtcaatacagttgtgttgagcttagtaagttagtaacgttctacccaagcttatggaacccgaaactgaattgtttatcggtttagttgttaaaagaactaaacttcaaatgtatttttaattgagctgataaaagaacttaacttcggtgaacttttatttaagctgagcgtgactttaccgagagtgtttttatatattttcttttgtaacttgccaatttgagctaaattgtcacaatagggcttctagggtaggcttgtttagtcaacaaatggagctcaccgagtttctaatagttatcatgctgaatttcaagtcgtgcggttagacttttagatcgagtttgagaaaagctcttcttagaaattgaggatgctcaccgttggaagactgcatttgattccattgcctgaaattgggatgtatgtggagttaattagcttagttagaaatcgtgcgctttttggtttttgcggaaatacttattgctttgaagttggaactataagaagtgctattgatttttctccaaactgcaccgacttgttgcgtgcatatattttcaattggatgttcatcaagattttttgttggttttgcagaatctgttatttagtgtgactgaacctcagtacag

SEQ ID NO: 101719 - DNA, 948 bp, Mimulus guttatus
  Intron number 1 from transcript mgv1a003574m (locus mgv1a0 03574m.g) derived from phytozome v7.0 (chr-ID scaffold_223 ; pos 260611 to 261558 reverse strand)
agtgaaaagacaactcgggccggtgaagcatcaaggtcagctatcatgcgcttgcgttttctaattcatcaatttctacatttttttaatgttttttttggggcattgctctaattttcggtttgctaaatagatttttgtttttcgctacggtttatttattttattttttttgtgggggaggttaaatttgtgggatgagaaatggtgagccactgtgtgatatttgttcttatgttttgaagtagattatttatgagacacttgtgagaaaaaaattgaattaaaatcagcaataatgcatgagcacagggtaatacgccaatgcattgaagacctaaattgggggtaacgattgtgaaattaaaatccctaatctctgaatattggccgtgttagaatattcatgaatttgggatgaacggttcgatgtaataaggcaacaacgagaagaaaaaaaatcttcaatgtagactgaggagtgattggaatatgtgtcgttgtgcagatttggttcagtgtggtgatcgacctttttaccgttgattttttagttagcacaaagtgtttctgtattaattagttttaagttgagtgtgtgtgtagtgtcgatgaattcatgtgttgagtgtgtgtgtagtgtcgatgaatttatgtgaaacgtgacgtaaaggttagaaatcaataggaattgttagtgccttctgatggagctaaagatgcgaatttgaatctgatacctgtgtcgttcaaatgattcgtcaatcgaatttagttgcatcatttagtgagttatagttacgatttttagtttttctttctcccacgttgccgtatttatgttgcatattcacgtttgtcgaattatcttaattgtaatttctttgtcctactcgtaaacgcttaaatagaatacttgtcctattatcaataatattttaccaggtc

SEQ ID NO: 101720 - DNA, 638 bp, Mimulus guttatus
  Intron number 2 from transcript mgv1a015970m (locus mgv1a0 15970m.g) derived from phytozome v7.0 (chr-ID scaffold_64; pos 33362 to 33999)
ggaatctgaatctgaatcttcctgtgcagtaagtcagcctcaagatttttcatagatatatgtgaaaatgatgaggctatttcattattcatattagttgaaggtactgtattggttgagcctacctacctaatacaagaaatatatatggtcctcctcctccctaatgaaagtcaaagtgtgaaactcttcttcctctcctctcctgcgctggtaaatggtaatccttgtgttgacagcaaagagaaagtttttaaaatctttttcttatcaagtttatgtcttatgattatatacatacagctttaacctgtaaatggtaagcagattttgatctttgatacctaaacacctcatgtatatagtcctaagtaagataaataagtttttgctgagaatcttgtgtctctaatcatcatcatcatcacaataagtaacaaatcttttgatcttgctgtttgagaaattttactaatcactttattccgagtaattctgaaatgtatggaaaatatttagagagtgatacttgatgttgagatatgagtgagtgtatatagttagtggtgcatttatattgaaatagtagtagtagtagtaataataataatgtgggtaaattaattgatatggcaggg

SEQ ID NO: 101721 - DNA, 472 bp, Mimulus guttatus
  Intron number 3 from transcript mgv1a020880m (locus mgv1a0 20880m.g) derived from phytozome v7.0 (chr-ID scaffold_7; pos 2777910 to 2778381)
tccgggttgttgaagatagcaaggggaattgtcaggtagcttgaaaaaaccttcactatcttgcatgtcatgatttcagtttaattatttaacgattgtacatatcaatttttaaagaatacagatatatcttgcctctcttttagcatgctcgatttcattaaaacctgaattggaggatcatgggaaagtatttaaattccataataacaaatctattgagtttgtttcgatttgattgatttatttgacaatggaattcgaatcctaatccacccatttggagtcatttgaaattcttccccaaatcctctaatcaaatccaattttccaatccgaattaaccccttaatgatttaataccagttttaagggtttttttttgtttttttttttttgggttccataattcagtgggaaattttatacgtaaataactggaggtgcttaatgtagaactacataaaagagg

SEQ ID NO: 101722 - DNA, 516 bp, Mimulus guttatus
  Intron number 2 from transcript mgv1a015430m (locus mgv1a0 15430m.g) derived from phytozome v7.0 (chr-ID scaffold_36; pos 37667 to 38182 reverse strand)
tgcagtcgaacagatcgaccaactagaaatttttgatatcctttttacacgttttaacgctctctctttatggtccgtttatgttgaatttacatgttttttttttcagaacttagtggcgttttaggattctatatggaccttatttccttgcatattgatgattgataatggtatttttatattagtcaatgttaaattattttcgcatgtttgttggcgaagggaggaaagttgttcacttgtttgagactggtgtgttagaatatgtatggacattcctataagagaagcctcttttcgttttctttttggggtcaattttgataaatctcaaattcattaagaggtctcgtctcttagttaataggtcattttagtttgtaagggcgattttatgaggaaaattctgccgataaaatgttatgcagcaaaaagtactttcgaagagaaacaatttgtactactttaactttggcacatcatattagagatataaaagatccagagcaccct

SEQ ID NO: 101723 - DNA, 590 bp, Mimulus guttatus
  Intron number 2 from transcript mgv1a000089m (locus mgv1a0 00089m.g) derived from phytozome v7.0 (chr-ID scaffold_210 ; pos 92372 to 92961)
cgcttcgacaccgctttttcaccccgaaattgaaggtagacagttcataatcagctttggaaatcctgcactgcaagatcacgaaagttcgggagcaatatatgatgctgggttgaatatggcgatgcgtaagtgcacaaccttgttttaattctaggaaataaaattctcgtttcggtatttatttattttttcccccttttccttaccattatcaaaaatattctgacttgtttatatttgtgccagtttgagagcctctatgtggaaaacttgtgtaggaactttagccatgaataatcgtcccagccaatgagtttgcactcgagagatccattaaaatgttgtttcctgaaattaaaaataaaaaactaaaaaaaaaattaaatcttgcataatttgagtttgaaatgcgaaaaagaaaaaagtgcaactttacagcatctgaacaaacacatgaacaaacacagagaagcttatgaagaacgtagccttctgcatgcatcatagacatctgtttttactttttataatatattggtttttcaaactttgaaaaatgacatgaactctgaactgctattcgacag

SEQ ID NO: 101724 - DNA, 549 bp, Mimulus guttatus
  Intron number 1 from transcript mgv1a008109m (locus mgv1a0 08109m.g) derived from phytozome v7.0 (chr-ID scaffold_84; pos 310941 to 311489 reverse strand)
acttgcttcccggccattcctttgcttctgtaagttattcaatccattcttcattttgtgtttttatatatatttttttaatttttgtattaggtgatacacatatgtatacatgcactgatgcatacatgtatatatacatatacacatataacgatgatataagttagcttcccaagttgaatgtcgaactggaactgacgatctcactacaagaaaaaaattgcattagcgacacctgacaaatgcaaaagttgtcactaaatgcatatattgagtgacaacaatatttttttgcctaatcatgtgaaaaataggtgttgtcactcaatttttttttattttttattttttttgtagtgctcttgggtgtggaacttaatcaaatatttcgtcgagttttttaaatcgttataggactatattagtgtttttacatgtattagacatgagtaaaggcccaatagaaattatcttccctgtttataatctttaacagataatcttatcgatttacatcggtttctgaaggttagagcaggaatcgag

SEQ ID NO: 101725 - DNA, 405 bp, Mimulus guttatus
  Intron number 1 from transcript mgv1a010702m (locus mgv1a0 10702m.g) derived from phytozome v7.0 (chr-ID scaffold_1; pos 1235359 to 1235763 reverse strand)
ccaccgtcgaattacgtcgtcggagctgaaccgtaagatttctgatccgatgcaaaaaaaaaaaaaatcattttttttttcatttttgtaaacagaagctatgatcatgcaaattttaatcggtacatttgaattttccttcgttcccgatacgtccatctcttttcgattgatttcttcgatacttcacgacaatgtgtgttcttcatgtactaggattatatatttattgtttctcaattaatttacatcgttgggttgattgtaatttttttgctgtaatatttcgagaacttgccaatgacagaatattctctgttaatatttactttattttttaatttgctaaaactgcaattgctattctcaggtgttcgtcaaagcccaaaaatcgagagcttactt
